United States Patent Application Publication US 2007/0048818 A1 - sequence listing, part 4

SEQ ID NO: 7000 - DNA, 57649 bp, Homo sapiens
agtgttatgtgccaagaaccttgcaaagaaagacttcttcagtaagtaaacacttatttttttccctcttataatgttatgcatgtatttctgaaattttaaactttaaaaaaagattgggtatattctcttcaaagttttgccctttacttaatagaaatccatggttctccaagctttatttcccggttgactacaacatgggtagttccttagctgaaatatacagaacttataaatcataccgcaaaacctgtctttcgtttcctattctggtcacacccaattttttctgcctctctacctattagaatattgctttctgctggatgatgtattctcagctctaatacaaatgaaatacttttgtataaaacagctggatttgcatacaattgttaatcagattttataaattaaatcacatttacaacaccctataattaaaggaattgcaaaaataagagactccttttctaaaggaaggaatcactccttaagaaagtcatgcagtatctggtcagtgcctgcagcattaaattcttcacacactttctgatcctcacaagacatctttcagttcttaagtggtattattcatgctttcaagatgaagaaacttaggctcaaaggctttctccaggtagccaggaagctccagcatggtggctcgtgtccatctctatctctgacaactgtccactttgccacctgtctgatctaataaacctctctgattcattctctagcatttagggacttaccgaattaaggcctggtgaatacttgcttccatagataagataggcaaagatcagtaaacaaatttcggggcattattaatttttagaaagtctaaatacaattactttcagacacttttccctccacttaattagccccactttaatagaaatttgaatgtaagcctttttttttttcagtcactttcttttctaccctctaaaaatctgagtatggaggcatactaggctctcttagaaagctcaatagacataacttattttgctgattgaaattatcctgaaattagagaacacgaattgtgtgttctgtgtcacatggatggatgtgaggtctcatctaggtgtgggtctcctctctcctctagggctccctgacccttttgcaaagattgtcgtggatgggtctgggcagtgccactcaaccgacactgtgaaaaacacattggacccaaagtggaaccagcactatgatctgtgagttgaatgttctgtaagccccatgcggagcggcaggaaagcaggtgtctaccttttacgagaaacatccaagagaaaaaaaaaaaaggatgactttttattgataacaaaagcggatggccaaatgaatgtctacattgcctaattttagaattcatgtacttggaagttcttgcattttgttactttcttttttcttttttttttttttttttgagacggagtctcactctgtcacccaggctggagtgcggtggcgtgatctcagctcactgcaacctccgcctcccgggtacaagtgattctcctacctcagcctcccaagtagctgggattatggacatatgccaccatgcccagctaatttttgtattttttagtagagatggggtttcaccatgttggccaggctggtcttgaactcctgacctcaagtgatctgcccaccttagcctcccaaagtgttgggattacaggcgtgagccactgcgcccgactgcatttggcatgttcatagatttttatggtttggttttgtacatgtgatcctcaaacttttcaatctcctggccattttagcagaaaaaaaggccatagtttgtgaactccacatgctactgtttttcagcaaaaccctaaacctagttgtagtttctacctaaaaaatgcattttttttttttttgagatggagtcttgctttgtcgcccaggctagagtgtgcagtggcgcgatctcggctcactgtgacctccacctcctggattcaagtgattctcctgcctcagcctcccaagtagctggaattacaggcatccgccagcatgcccaactaatttttgtatttttagttgagacggggtttcaccatcttggccaggctggtctcgaactcctgacctcatgatccacccgcctcagcctcccaaagttctgggattacaggcgtgagccactgtaccaggcctaaaaaattcattattatgactgtatgtttctgttgactttgaaaatttttgctttttagtacatatatattttctgcaagagaaaatatagttttatatgatcaaagccatcaatttcttatagtcattcaaaaactggattgtactttgaagaccactattttattttattttattttattttattttattttattttattttattttattttattttatttttttttgagatggagtcttgctctgtcgcccaggctggagtgcagtggcgggatctcggctcactgcaagctccgcctcccgggttcacgccattctcctgcctcagcctcccaagtagctaggactacaggcgcccgccactacgcccggctattttttgtagttttagtagagacggggtttcaccgttttagccgggatggtctcgatctcctgacctcgtgatccgcccgcctcggcctcccaaagtgctgggattacaggcgtgagccaccgcgcccggcctattttatttttaaattaaattaaatttttttttcaaacagagtctcgctctgttgcccaggctggagcgcagtggcgcaatcttggctcaccgcaacctcctcctgctgggttcaagcgattctcgatcttcagcctcccgagtagctgggattacaggtacccgccaccatgcctggctaatttttatatttttagtagagatgggtttcaccatgttggccaggctggtcttgaccttctgacctcaggtgatccaccttggcctcctgaagtgctgggattataggcgtgagccactgcacctggctgtgaagaccactattttatatgcacccatgttttcatgttcctactaagatattttcatcaaagtaatcctgaaagattattgtcttttagttaatacaaattatactgtatttgggtgggatttttaagaattatattctaagattcagtttcagtgacactgaggctgtgtaagtgggttgagttcctctctccgttgacttgcagtgacagtaaatggaggtttaatgtcttagtgtcctcttgtgtactttgaatagatccgtaggtttgtaagtagtcccttgtcgcaaaccagtattctgtatcaaacctaattggtgagaatttatgaatcatgttactgtcctatgcgactattaaaatatagtaaatttgctgggtgcagtggctcacacctgtaatctaagcactttgggaggccgaggcaggaagatcacctgaggtcaggaggttgagaccagcctggccaacatggtgaaaccccgtctctactaaaaatacaaaaattagccaggtgtggtggcaggtgcctgtaatctcagctgctggggaggctgaggcaggagaattccttgaacccaggagacaggttgcagtgagctaacactgcgccattgcactccggcctgggcgacaagagcaaaattccgtctcaaaaaaataaaaaaataaataaaaataaataaaatatagtaagtctgttataagattattatcatcgtgtggttatctacatttgccccttccataaggagcaaggtagttcttcttcccagcttgttgaaattaatggatacgtatttattaaatgcctgttacatgtgtaatacagaggcaacattattttataaggtttcttaaagagaaaatctcaatgagatatcataattcagaaatacaattaaaagctgggcatagtagctcatgcctgtaatcccagcactttgggaggccaaggcaggtggatcacctgaggttaggagttcaagaccaacctggccacatggcgaaaccccatctctactaaaaatacaaaaattagccaggcatggtgatgcacgcctgtagtcccagctactcgggaggctgaggcaggagaatcacttgaacttgggagttgcagtgagctgagatcacacaactgcactccagcctgggggcaacagagcaggattctatctcaaaaaaaaaaaaaaacaaaacaaaaaaaaccaaacacaattaaaaatgagttttgcactttctttccagatatgttgggaaaacggattcgataaccattagcgtgtggaaccataagaaaattcacaagaaacagggagctggcttcctgggctgtgtgcggctgctctccaatgccatcagcagattaaaagataccggatgtaagaaccaaacactttcctgcctcttaatgcaaccaaagaaagcttaggaggcatcgttttttgttttgatcgctgaatactgaattcctgccttcctccctagttcacgttccttgggttaagttttgaattgtttgtttacagaccagcgtttggatctatgcaaactaaacccctcagatactgatgcagttcgtggccagatagtgggtaagaactttcttgtctgtgtaaagagatgcttttccagaacttacattcaacccttcatcgccgagaactcacatacaggcactgacgatgctgacgggcctcagaggacagaccacgtacggggccttctcttcagtactaggaagttttgtcttgtgtagtttttattattttatctaattcccttctcctggcttttttttttttttggtttttttttttttgagatggagtgcagtggtgagatctcagctcacctcaacctccgcctcccaggttccagcgattctcctgcctcagcctcccgagtacttgggaccacaggtgtgtgccaccacgcctggctaatttttgtatttttagtagaggcggagtttcaccatgttggccaggctggtctcgatttcctgacctcgagtgatctgcccgccttggcctcccaaagtgctgggcttacaggcgtgagccaccatgcccggcccccttctcttggcttttaaagttgagtaaaaatgactcgggtacagaaagatttagggttagaattttaaatgtaattttaatcatcacatttatggacaatacatttttgaccgtattatccaagggtagataataagaatggtggccacacatacaggagttgggaaatagtttcttctggaagccccatcatatatgtaaaaagcatagagttgtgaagaattccatgtaatatgatttgtacagtcaggggactgcattatttagaatgaaaaattaaagtgtgctaatgttacaaagtgttggctagaggcagtctgttggaagtgatttagctgttaaataactcatcctattatccacccacttgtattagtgttttagggtaactcagatattgacttggaagcactgctgcatggaataaaaaaaaaaaggtctctctgcagcacactggagtgattctcactccaaatcttttaggtattgtcctgtgtagacctgacccaagataaatgaatagtgcagacatacaccctgaaatctaccatcatgaaaaagttctcaccgaatgctttcctgcgtgtaatttcttttttctttgtggcgggatgtgccagggagaaaaatgagtaactgaaaacaactttataaaagtcttgttcatagtaaagatagagaataaatatttagattcacttagactttgcagatactgaaagtactctctgtgtctttattcattttttttttgacacggagtcttgctctgtcgcccaggctggagtgcagtggcatgatcttagctcactgcaacctccgcctcccgcgtttaagcgattctcctgcctcagcctcctgagtagctggagttacagctgcttgccaccacgcctgggtaattttttgtatttgtagtggagacggggttttgccatgttggccagactggtctggaactcccagcctcaggtgatccgcccgccttagcctcccagagtgctggtattacaggtgtgagccactgtgcccggcctctctgtgtctttattaaacttaagtcagaatgttcttaagaaataaaaactgggctcagtggcacatgcctgtagtctagctactctgaggctgaggtgggaggattgctcaagcccaggagtttgaggccagcctgggcaacacagtgagacttaatcccccccaaaaaaacttcttatttttattattttttttaatttttaattttttttggagacagagtctcactctgtcacccctgctgcagttcagtggcgcgatcttagctcactgtaacctccgcctcctgggttcaagcaattctcctgcctcagcctcccaagtagctgggactacaagtgtgtgccaccatgcctggctcatttttgtatttttagtagagatggggttttgccatgttgcccaggctggtctcaaactcctgagctcaggcgatcctcccttcttggcctcccaaagtgctgggattacaggcatgagccaccgtgcctggcccaaaaaaagtcttcttaaaaaataaatcttcttgaaaataacttagagggactgaatattacattgttatttttatggagaccaggagaaacatagcacccttttcttcaccacatttacaaggaatattccaagtagcatgcagctactggagtaaaatgcttcgtattggaaagcataggaatatatgtgtgtatgcatacacatatgcctcgttttttatgatattgtacataaattctaaattagcaatgactcactgtattataattatgtaaaccccgctgggttttaacacaagtcgttcttttctcttttagtcagtttacagacacgagacagaataggaaccggcggctcggtggtggactgcagaggactgttagaaaatgaagggtacgtataaccacagcaagaggcgggctgagttctctgctgccttaacctctcggcctataggaaagcgcccttccctccttaagtcactctgcagaatgcttgagatgcataaaggatgttgggataaaactgtgaaccagtttacttggctataaaggaagctgtaaatacaactggagttggctgggcgtggtggctcacgcttataatcccagcagtttgggaggccgaggcaggtggatcacgaggtcaggagattgagaccatcctggctaatacggtgaaaccccatctctactaaatatgcaaaaaattagccaggcgtggtggtgggcgcctgtagtcccagctactggggagactgaggcaggagaattgcttgaacccgggaggagggggttgcagtgagccaagatcatgccactgcactccagcctgggtgacagagcaagactctgtctcaaaaacaaacaaacaaacaactggggttgtgcctgactcaaaatccagtgaaagaggctcccacgggccaaagatgggtgagtttgagcatcaataagaattataactgcctgtaatcccagcactttgggaggccaaggtggccagagactttggtctcgagtttgagaccagccagggcaacatagcgagactttgtctctaccaaaaaataaaaaataacaaattagctgggcatggtggcacgcacctataatcccagctgctagggaagctgaggtgggaggattgctttgagtccaggagtttgaagttgcagtgaaccctgatcacaccactgcgctccaccttgggcgacacagcaagaccctggctcaaagaaaagaaaagaattataactgccatgaatttggaacatatcagatatattaaaaatctttgggttcataatgacggggggaggaactcaacacactaaaaaaatacaacaaactgccgaaccgtcattggtcactgtcacaattttgcagtcccccatgaattaatggacctggccaacaagcagtaattgctaacaacatcacaaaagagagatgatccaacattaacacacctcttggaaatacagggaaccaggaatgtgtctcacggccccaagggaatataatcaacaaacatccagaatggggccttctgtaggacagacaacccagggtcttcaacaaatagactgcaagaaaagcaaagacaggagggaaggagaacctgtcaacaattcatattcaaacaaacttgagacatagctacacatgcaaggtgtggactttggatcctgatttatgagacaattggagaaatctgaacaccggtatttgatttttttaaaaaattaatgaacattttttagtcatgataatggaaatatttaaggatgaagtcataaaatgttggggttggtggggagggattggaagagtggacattggatgatggttagctgggaggggtggacacagggggttcattgtactggtctctcattttttatacatatttgaaatttttcaatctaagattttaaaagagtatttgcttctaagggacagtagcctattaaggtgaattgtcttcaaaattgctcagggggtgaagattgatgtttaaaaagtatctaaaggcattttggcattttatgtaaccaggagtttcattatagagtaaaataacaaggaaaatggagtatttggatatgattttattttattttaaagatggagtctcgctctgtcacccaggctggagtacaatggcacaatcttggctcactgcaacctctgcctcctgggttcaagcaattctcagcctcccgagtagctgggaccacaggcgtgtgccaccacacccagctaatttttgtatttttagtagagatgcggtttcatcatgttggccaggctggtcttgaactcctgacctcaagtgatctgcccacttcggcgtcccaaagttgggattacaggcgtgagccaccgcatctggcctggatttgattttaaatcaagaaaaatgagatctcatttcacaaactcctcatagtctaaggctggtttcttctaatcatttcagtctaccctatggtgaaattgtacagttggccttggggacactccggccacctgttcctcttagaagagtctgtctttctgtttgagtggcacatggtgaattttacaaaactaggcccttggaacactggacgttgttaaaggaaagcaaatcaatttatgtgacggtgtcccctaggacactagccctaaggcgctggtcttgtgactcctccatggtgacaccatgcctgcctgctctcgtccctttcagaacggtgtatgaagactccgggcctgggaggccgctcagctgcttcatggaggaaccagccccttacacagatagcaccggtgctgctgctggaggagggaattgcaggttcgtggagtccccaagtcaagatcaaagacttcaggcacagcggcttcgaaaccctgatgtgcgaggttcactacagacgccccagaaccgaccacacggccaccagtccccggaactgcccgaaggctacggtgagagaatgtatcctgctgtggccaatgccatctgccctgtttccatgagttgactttttttttttttttgagacaaggtcttgctgtcacccatgctggagtgcagtggcatgatcatggctcacggcagccttgacctccctagctcaagcgatcctcgcgagtagctgggcttataggcatacaccatcatgcctggctaatttttgtattttttgtagagaatgggtctcgccatgttgcccaggctggtctcaaactcctgggctcaagtgatccacctgcctcagccgcccaagtgctgggattacaggtgtgagccactgcatctggcctttaaccctttttgagtagcctgtgccataagtgcggatgtttgcgtggctatgccatttgataattgtggcagtgtaaagacaactggaagacaatggtcctaaatctagctaatcatgaattttcagcaattgctccaaatctcccagtttagaaatcaagtgaaaatcttaggcaaacgaacaccaaagcaaaccaaggtaacatgtaggctagatgagggtgtctgtagtgctctggaaaggagagcatggggcgagatggagaagaggggattattcggccacctcagagagaagaactgggataagaggggagtgttatctagatttagataataccagacgtgagggcatcgagggttggttacaaactctccctggaattgaacttgtctcatttggatctctaatttcttgtgtagaacaaagaacaacagtccagggccaagtttactttttgcatacacagactggagttagcacgtggcacgaccccaggataccaaggtaagcctcctgaaatggacaccccccagctgtctttccagcagttgacttgaaaagccaataccttccagatgtgttgctcttgttttaaactaaaaatagtgatgaatgagatgatattgatgtctgggatttccttcagataagctggggtggggggagtagacaggggtacatttgaaacgtgagtcattgttgacctttgaaacaaggttgaccatgatcattgttgaagttggttacacagcaattccttatgatcactaacttttttatatgcttaaaattttccatcataagtcaaggaaatataaagactctgttaccctttctctcttctactttactgtccccattgcctcagtccctcggggaccattcctgggggagatgcagcttttctatacgaattccttctacaaggccatacatctgagcccaggttagagagaccccccccccaccccataacagagttaagtttctttttttcttttgctttttatttccttttagaatagcattactacctaatatgatttttggtaatatttagttcctttttattcatgatttgtttcatctgagaataaacttcctgtctgattttccaagactatgtttaatgtatgactcagtacctataatgagactggaaatatattacctgcaaatgaatgaggtgtctcttttgtaccccctgttagaaatgacaggcttttgtgttaattagaaacacatcttggtcagtaaagctgtgctcccttctgactgtagattgtgttgaaattattaatcaggagaataattaatcattcttagagtggaaaatacttgttgagcaaaaagcccatttgaaaatgagaatgcctcgtcctgctgcaactgtttagaattgcgagtttctgaacgcatgttcctgtacctcccttagccctgaaaagcttggtgctgtctgggaactttccaatgaagaaacccttctggccgggaacatttaatgacacttgtgaattcagatagttttctgacagcactaagatacttcctactattagggccttctttcatataagaaatgatatgccgtggggagcccctgttccttatcatggttataagctctgaaactgcctatttttttttttggagatggaatttcactcttgttgcccaggctggagtgcaatggcgtgatctcggctcactgcaacctccgcctcccaggttcaagcaattctcctgtctcagcctcccaagtagctgagattacaggcacccaccaccacacccaactaatttttgtattattagtagagacagggtttcatcatgttggccaggctggtctcgaattcctgacctcaggtgattcacttgcctcccagagtgctgggattacaggcgtgagctaccgcgcccagcctgaaagtttggttttaaatctctcggatgttgctgctgtttgcagcagagaggcctggactgagtagaggtttggcgtaagtagcaccacgaaggtccatcttagcagagctgggacacagacaccttgataaggaacctctgtggcttctgttgctgacttttggtctcattcctccatactcagttggacaaacctctctgtatcttccattttggtagagaccttaacagtgtgaactgtgatgaacttggaccactgccgccaggctgggaagtcagaagtacagtttctgggaggatatattttgtagatcataataaccgaacaacccagtttacagacccaaggttacaccacatcatgaagtaagactttaaaaatattttttgctgacctctttcattggtaatcgaatgctttcttggactggtatttttgtgaatttattgactgtcttgctggttggataataagcatggtcaaaatgatgttaaatatctggcggataattgcatattttaaactcttaaattagctgtgaagagcactgaagccctatgttgttgctacccttttcttacttgcagcctacataaaatttaccgagatggcagtattaggcggctgcacgaaggaagtttccgcacgcagcgctctcatgagacacgtggcccttaggttgagaagtagagatacgtgctatccccctagtgcctgcacggtggggaactggataccttggaactgggaattatcttggatcccatatttagtgttccaggcctgtcgtgttctcagagccaaacattccacatagctctttttttttttttttttgagacagagtccagctctgtcacccaggctggagtgcagtggcacaatctctgctcactgcaccctccacctcctgggttcaagtgattctcctgcctcagcctcctgagtagctgggattacaggcgcccgccaccatgcccagctaattattgtatttttagtagagatgggattttgccatgttggccaggctggtcccaaattcctgactgcgggtgatccgcctgccttggcctcccgaagtgctgggattataggcatgagccactgcgcctgcccccgacatagctcttttaaccgacagctctgtgtctcagtggcaaaacttgaacaggacaaatgccactttgtcaccgtactaatcctactccttttactgaaattttgctctcaatgagcaggtgtagaaatctcttggcggtaaaaatgagggatggttttcattagatttcactcgagcggtctgctgttgtgcctatcatgagatttcatttgagttctccactgttacctcctttaaaattttttcccatcatctccatttcattctaactgccaaggtgcatctgatgatgctttggttcatctcatgggtgcgtaatagatgcataataaatgacagccatttccatttttatttgtggtggtaatgtgtgagataagtgtttgcttggaattgtggtacctccttttttttgagagagagagtctggctctgtcacccaggctggagggcagtggcgcaatctcagctcactgcaacctctgcctcccgggttcaagcgatttccctgtctcagcctcctgagtagctgggattataagtgcccaccaccacacctggctaattttttgtatttttagtagagaccgggtttcaccatgttgtccaggctggtctcgaactcctgacctcaggtgatccacccacctcagcctcccaaagtgctgggattacaggcttgagccaccacgcccggcctggggtacctcctttatggtactgtagacatacatttaggctaatgtggccatcagcaagtttgacacagctagctaggtacctggttacgtcatcagggaaacaaattctccctgaagttgtgtgcagctagctctctcctctgaccctgtcgcgtacgtgggtgcttgcagctcccctggccggggcttcggagtgactttctgcatctcttcttctcaagtcaccagtgccaactcaaggagcccagccagccgctgccactgcccagtgagggctctctggaggacgaggagcttcctgcccagagatacgaaagagatctagtccagaagctgaaagtcctcagacacgaactgtcgcttcagcagccccaagctggtcattgccgcatcgaagtgtccagagaagaaatctttgaggtagagagttcagggccactgcccagaccctgttcagaaacaaataaggcaattcagacaaaggaatctcaaatgcgattgttttcaagggctgctttaaatgaactgctttgtgggtgatgtctgcgtttcagggaacccttctttctgtttggtatttgaggtattgattttattactaagggaagtgcagagtttgtcaggaccacagcctgtctagagggagggaatggtattcatttcctcttatggtaaaaatggaaaaactaaatagtttcacctctaggtgaaaacctagaggtgtatacagaaactagcactaaaaaatagtgggaaccgccttgtctacatgatgtgggttaaatattcctgcaatctgcaatctgcgctttccccagagccaggtagtctccctcctctcttcttgtatgagatgtcatctgagggctctccttctcagggcagctcaggggctgggggccatcctgcttctcctgtggaaattggcgaggagcaggtggctcttgggacaggctctgtcccttacacagcttcctgcaggagcaggtccctaaacagaccaggcccttttcccaagaaagctgaccatacaggaaaatctccatggcatttgggccatttcctgccctcctttgtggagacactgtcagaaatgatcaaaggagactgagcacagattctccctgggtgacagcactaagggagcactggggggccgagggagctgagcgccttccccaccgcgagggctgggcctgagtgttggatgggcagcttggccacagcgcccagccctgcctgctgcatgtatgcccttgttgcagggctagaaaagcgctgaagtactgacttcactaccagctcgtttcctctttccctcttgggttgccagagtttatttgtttgggtttttttttttttttttttttttgagacggagtcttgcactgttgcccaggctggagtgcagcggcatgatctcggctcactgcaacctctgactcccaggttcaagcgattctcctgtctcagcctcccgtgtagctgggattacaggcgcccgccaccaggcccagctaattttttgtatttttagtagagatgggggggtttcaccatgttggccaggctggtcttgaacttctgacctcaagtgatccgctcactttggcctcccaaagtactgggattacaggcggagccaccgcgcccggctgggttgctggagtttgaattgcgttaaatttaaagcacgaaaaatttcttaagtgcctcgttactgaatctacatctataaacacgtagcggcttctgcttcaagtgctgagtgtgagggaatagcaggctgatcacatgtgttctgtgctgtgcttaagccaccttatgtcttacttaaaatctttttgccttttgactcagtgggaaatcaaatgtgatttttcactttagatataaagagaggctcagaactctcttagcattcagactttctaatgtcttgattttggttgcgatgcacaagttgtttatagtgtgcattgaaattaatttatacagagaagaatcaaccctagtgagttttgtccttaagtccttggtgattcactgaaaacagacacgtgtttccctgaaggttagtgtttcctggcatcgtgtttgttttgttgttgtctcagagggagaaactgagaaaaaagatgatggaatatactagatgccgaagaaacattctgatgaggagccagataaaacttgaattggaatggatgcgtgttcttaaccgggctccattatcaatgacctttcataactttaagaataagaatgttcttctctctgaaactgtgatgttgctcttcaggagtcttaccgccagataatgaagatgcgaccgaaagacttgaaaaaacggctgatggtgaaattccgtggggaagaaggtttggattacggtggtgtggccaggtgagctgcttgttcattcaccttctctgctgtgtggatctcagtcttttcaagagaagtcatttgcccttctccagtgctcatcaccaagcactcctgggcagggctgatgtctccttggagcagtcgggccatcatgcactggcttcagccaccctgcggagaataggaattcctccgagcatgctcgtgccagcctcttgccataacctaccagaatatccgtgattgtcaccactaattgacttcttgtaaagctagaattaaacttttaaattcactcccttcttttgaaacatgaggagcatgctcctgaaatttaacacaggaggcagccttgctctcctctgtagaggatttgctgcagggagcagggcagggattgcatttgtgcatgtaaattgcatttgtgtcaaaggaattttgtaaaatgttaaaattttggtcaaaataattcaagaaaatgatattaaaaaacagaatagaatgatgaaaaactgctatttcatgtcctgcttcttttcagcttcaagacaattttttttttttggtcttttttgagacggggtcttgctctgttgcccaggctggagtgcagtggcacaatcatagctcactgcagcctcaacctcctgggctcaagcgatcctcctacctcagcctcccaagtagctggaactacaggtgtgtgccaccaggcctggctaatttttaaaaagttttttgtagagatgaggtcttactatgttgcccaggctggtctcaaactcctgggctcaagccactctcccatcttggcctcccaaagtgctgagattgcaggtgtgaaccgctgtgcttggctaagacaactgcttcttaactcttttagctcttttctttgaataggtatcttgttatttccggatttaatgatttatgggcatatacataagatagactgactctagttactctcatgttcaatttagtaatatggatctttttagttcttccatcatttgtaactttatgtcctgtgctttcacctttatttttttgatgtatcaactagagacatgatctctggacctctcatttgcataagaacaggatattcatacttacaactttctcttcagcattccttctgcctcttaaattctgtcatctgtaatattacttttatgttgtcaaggttaagatttacattctcttctgtaaccaaaatttggtcagtctcctatgcttgtctaccaattatttgtaaagggatgaaagtttatacggtttacattattatgaatgaaaatattgtccattaagggtttaaatagtattctagaatttaactttttggaacaaattctaatttttccaagaatttcttcttcccttttttttctggagacagcatctcactctatggcccaggctggagtccactggctggatctcggctcactgctacctccacctcccaggttcaagtgattctcatgcctcagccccctgagtagctgggattacaggtgcgagtcaccatgtccagctaatttttatatttttagtagagatggggtttcaccatggtggccaggtgggtgttgaactactgacctcaggtgatcctcccgccttggcttccctccccagtagctttcactgtctctactgccccttgaacttcaagtcctccaggatggttacacatcataccttctgacagcccccgtgtctcctgcaaggcctctgtgcagcctgatggcgattctcttgctcctctgtgccgtggttgtcctgagacttcactgcttccctgggtgaggtccattgtcctgggcgtcccatagcttcccctttcttggcgtcctcccttgtcatgctgtgaccaccgcatggttgtgtggtgtgatgtttctctttctcatctgcatcttccaagagagtcaaactacatgcagtcaggaacttgtcttgttcacagctgatccccggttcctagaacagcacctaacacacagcggaacacttgtctctgtaaatatgtgccaaatgaatgaattttactttttgttaatttcttcgcacattttctttctttggtcattctgaaatgcctgttactcagctgtcggactccctggtttggtctggtaggagttacattccttctgcgttttccgtagtcatccagtcttctgcgtggagatgggtcgttgtgaatttcccttgactgacatgatgctgtagtggaaagagttgggaatctctgctctgccacctccagtttggtcttgtagtgttatttcaccactggagtcttcctcctaatgggatgatacttagagaacggtggagagatttcagttgcatgtgtattacacatgtgcaggtgtgtgttcattatccgatctgtgggagttaggctacacttatctccccagtatttagtcctgaagtcctttctgtagcctctctttttggcctgtttagttattgcttcccttaccacttccagaacagaactgattgtatctttacgctgtccatggctcggtcggaatgtttgcttgtattttaatcacttcctgtctagacaactggaggtctttgtctttttcaaaaaaggttcttcctaaattgaaactccaaaacttgggatgaattcaaattcagcaatgttgcctttgtagtaaaaagagactttataggattcggagtctcatctcttctggcagttcctttctgttcttttgagtacaatgaagaactgtttttgtttgatattttttgtgtattctcacgattttcttggacagattatctgcatttgtgtctgtccttccctattcgctctcatttctgtttgaaaaagtaagaaattccagaataaaatttggagctgctatcttaatgcgatccgttgaaaaggagttttgagcagaatgaatagaagactcttcgtagatctgccacaggtgtttgtctaagggctgggcttaatgcaacctgagtgtagccactgaaccatacaatttctatttaaagtgccttttttttggcttgactgtttttaactttggggtttttaaaataataaaatgatgcaaacattaaagaaattcagaaaataacaacttaggctgagcgtggtggctcacgcctgtaatcctggcactttgggaggccgagatgggtggatcatttgaggtcaggagttcgaggccaccctggccaacatggtgaaaccctgtctctactaaaaaatccagaaaatagccgggcctggtggcgcatgcctgtagtgccagctactcgggaggcaggaaaatcacttggaccaggaaggcagaggttgcagtgagccaagatcatgccactgcactccagcctgggcgacagagtgagactccatctcagggaaaaaaaaaaaatgtagaaattttagcgcgtctcaaatgcatttttgttgtttgctcccagggagtggctttacttgctgtgccatgaaatgctgaatccttattacgggctcttccagtattctacggacaatatttacatgttgcaaataaatccggattcttcaatcaaccccgtaagtatgaatgaacaaagaggtagggaattgagttggagaagttttgagatggattttcagtttcattctcagtccttggtctatttgttgtagacttaatcaaagacagtggtaagcaaaacatggagaggtaaagtgaaaactgaattaagatggatgattccaatcctgtattttcagagatcgtgatcactgggtgtgctgtgttgaaggagatgaagggtgaaactgagctgttcatacactcacactttgtgatcatttgagggaactctggtgtgatgatcgtatgtgttaatggtgtcattctaaggagtaggttccgaagtccagcctcctcccggtcaaaactggaatctttccagaactagctttttaagccacaaatgctgccacccttagcgtgctggttttagagatgaagaagtcagtgcagtgtttgcacgcccagctcaagggtgggcagccggccagcaggggactcctcctgtggcaccacggccttcaccagcgtcctgcacaggccactgaggcgaagtcgggacaggctccgcttgtgcattcaaatgtggaagaaccttttaccaacatggaagcagagttttgattcattttttgaggtgaacataattcaaacctgaaagtagagacgtgtggttcctgagttaagaccagaacggctctggttctagaatggttcttttcttttttttgagagagagtctcgctgtgtcccccaggctggagtgcagtggcatgatctctgctcactgcaacctctgcctcccaggttcaagcgattctcctgcctcagcctcccgagtagctgggatcacagacccctgccaccaggcccagctagtttttgtatttttagtagagatggggttttgccatgttggccaggctggtctcgaactcctgacctcaggtgatctgcctgcctcagcctcccaaagtgttgagattacaggcgtgagcaaccatgcccggcctaggattgttatttgatttggcttactcatacatattttcctgtggtctttttctcccccttagcatttcttccctccctccctctctttccctctcttcctttcgttctggatcgagggagtggtggtggaggaggaagggaacttgcccttttctttcctgtgcagtgggaggaagcacagggctggcttcctgggtgcgcgtccagcatggtgccgaggccctgcagtgtcaaggccctgggcttggttcgattctctgttgtcacgaaggtgaaattctcagtcattgctgaacacggggctcctctgccagttatatggcccttctgaggaggtgttggccctgagagcatacaaaacgctgtccagcgaatctaggcaaatttctgctacacaagcagccttctttcacttgttcaggagcggggcctgtgagtccctgagtcagtaggtctggttgcctctgggacacttttcccaagaagcttggggacagcacgagattcccacattggccggcaccatgctgacaaattcgtgttctctggtgccccctacaggaccacttgtcttatttccactttgtggggcggatcatggggctggctgtgttccatggacactacatcaacgggggcttcacagtgcccttctacaagcagctgctggggaagcccatccagctctcagatctggaatctgtggacccagagctgcataagagcttggtgtggatcctgtaagtattgactgacggccggtcacctggcttagggcccaccaccacgtctatcgtatgtatgcgcgtgcgcgcgcgcgcgcgtgtgtgtgtattttggggatgtgtgtgaagccattgtattataacctgaaacaaaaaaaggggattttttggaaggcggaggcgggcagatcaattcagtccaggagttcgacaccagcctgggcaacacagtgagaccccgttactgcaaaaaaatacaaaaaaacccaccagatctagcaaaaagtactcagttgacttattttcctcatgatgttgggcaggtttctcttcatggactagtttcttttgtttccttgaatgaagaaggcgcgatcacagacgttaacaggccactccccaggcccgttgtggggtgtgtgtgagacactcagggcatctccagttaacctacacaggggccaagcaagtatcaaaacaaaattaacatttagttacctctgctttagaattattctaaacactctgttaagagcagcaggcagtgacaagatgaaccgtgactatcacgggtccttgcagatttcacggggacaaaacatcaggctctgacagatggagggaatgtgggtgagtcggagtcggggctcctggttgtgtcccatgtgtcacatgttccaacttgaacaggggactctggggatcaggtagaaaatcttccactcagctgggtgcggtggctcatgcctattatcccagcactttgtggggccgaggtgggtggatcacttgctcttttcacttgaggtcaaaggttggagtttgagaccaacctggccaacatggtgaaatcccgtccctactaaaattaaaaaaattttaaaaagccaggtgtggcacatgcctgtaatcccagctactcaggaggctgaggcaggaaaattgcttcaacccaggaggcagaggttgcagtgagctgagaccacaccactgcactccagcctggatgacagagtgagtctctgtctcaaaaaaaaagaaagaaaaagaaaatcttccactctgcctaggctcaagaacgatggcagattcaagagctagttttcactttcgagtacttttgtgtttgaactgatgcctttgggaaggctgcctctaagggaggaacagtatttttttttttttttttttttttttttgagacagagtcttgctctgtcacccaggctcgagtgcagtggctcaattatcggctcaacgcaacctccacctcccaggttcaagcaattctcctgcctcagcttcctgagtagctgggactacaggcgcctgccaccacacctggctaattttttgtgtttttagtagagatggggtttcaccatgttggccaggctggtctcaatctcctgacctcgtaatccacccgcctcggtatcccaaagtgctgggattacaggtgtaagccgctgtacctggccaggcacagtattttcttggcatggcttcatctccaggtcaatttccctttgaccctggtacctcttcacgttcctgccttttgactcccacactgcttacaaagcagctgggttgtgggtcccctgaaatcacaggatggtacagcaacctgctgcccgccttctatgactgtggaagccaggagccgggacatctggaaacagagctgtggtctcagggtcctccagcacctgttgctgtgccacccccacgcaggttctgtgtctgcccgaggctgtcctgtcttgcagccccgggtttggcagtcgtaaatgttttctgtctacccaatggccccgcgtggtggcagagttctaacctacatccttctgtcttatttcaacagagagaacgacatcacgcctgtactggaccacaccttctgcgtggaacacaacgccttcgggcggatcctgcagcatgaactgaaacccaatggcagaaatgtgccagtcacagaggagaataagaaagaatacgtccggtaatgccacctgtcggggacggccaggtgcctggggcgcggctgagcctgcatttagttgctgtagctccttcgctgtgtgaggcctgcatgtccctgatggctggtgcttatgatcagatcacatgaacagaggcgactttcagaaaccgacagctcagcagcagcgtcagggatctgcttggaggggccctgatggggccaggcctggcctgagggacagagcccatgtggggaaggacttttcagtgaccacctaattctgggtgcaaaggtggggggcaaaggagagagcagcagcttggagggtctctcgtgctcagtccgaggaagccaccctctcagtttttttccacccctaacttgaggcagatctgtgttcaggcctaggcacttgcggcctaggcacttgcagctgagaactatgtgggcacgtctgtgtgccacgctgtcctgtgctgtactttcaaatgtacttttacacatttaaacaatttttaaatttttacatggtcttgctatgttgccaggctggtctcgaacccctggcctcaagcaatcctcttgcttccgcctcccaaggggctggcattgcaggcgtgagccgccatgcctggccagaacatgctttcacattgcagcaattgatgtgacagatcaggttcaatcctcctgttttcgcgagcaaatcggaatgaatcagggcacgtgctgagtcatttttaacgtgatgccaaggtttggtactactagctggtggtgtgtttgtctgtcttggagagatccggggagtggggggctcagtgtgttcccatgtttgtcagactgtgatatcagaacctgctcacaggtcgggcgcagtggctcatgcctgtaatcccaacactttgggagaccgaggcgggcggatcacctgaggtcaggagctcgagaccagccatggccaacatggtgaaaccccatctccactaaaaatacaaaaattagccaggtgtggtggtgggtgcctgtaatcctagctactggggagggtgaggcagaagaattgcttgaacccaggaggctgaggttgcagtgagccgagattgagccattgcactccagcctgggtgacagagtgagaccctgtctccaaaaaaaacctgcccatggcggaaaatccacttggtgttgcatccaacttgcgagtttttcttccaggttgtatgtaaactggaggtttatgagaggaatcgaagcccagttcttagctctgcagaaggggttcaatgagctcatccctcaacatctgctgaagccttttgaccagaaggaactggaggtatgtgcctgctgtgcggagtcgacccagggcgtccctgtggctggcgtctgcctgttttaaatccttgctgcagggggcagtgtgtgccgctttctagtaagcctaggagctgctggggttcccagactagagccagggctggagcaagagtggggagtagagggtgttcatgccagttagtaaccggcgagatgtctgcttggcggtaggaaatctgactaactcccgggaaactgttcaaggtggctgtggcttcccttgtttgcaagatctctagcaggggagattgcatagccctctcctgtcttgggagaaccaggttctcccacaagagcatcttactgctttttattctggctcttcctagcctaggaacaaggggctactgtcttctctagtcatactgcatgcacttgaacacggtgattcattcagcccttatccatctctggtgccaaatagctcaagccgtgtagattgttctccaagtctttctgctgccagtgaggagagcttgggagccaagagcttggatggagcagtagttctggggtgaacttttgtggttttttttttttttttttttgagacacggtctcgctctgttgctcaggctggagtgcagtggtgcgatcatggctcactgcagcctcgacctcccaggctgaagccatcctcccacctccgcctcccgagtagctgaggctacaggtgcacgtcatcatgcctggctaatttttgtatttgttgtagagacggggttttgccatgttgcccaggctggccttgaactcctgggctcaagtgatctgcccaacttcggcccccacaaagtgctgggactacaggcgtgagccactgcacccagcaggggttgaactttttaagccaattgcggaaacatgccctatcggccccagccccacctaactcttgctgaattctcctctcttcagacttgaaactccacatgtccttgagtgtcctggagagaccctgggacgtgccgttattcatggttagctctgttcagtgtcaccggttggttctttgatactcctcaccgatgcagagcaaaaaccccgctttggttataaaataacatcccatcaacagctgtgcaccgcggtccttggggttggagacccgtttggaggaggcggacggaagcatgtgccacaggcctcctgtttgtagctttcttcctgtctcaacatctgcctagtacacagctgctgctttgcttgggaatcgacttttcactgttgtgtgtcgggtacctaggaggcgcatcctgacgtgggtttatgcattttggaagtaattcacctttctgcacctcctcagctgatcataggcggcctggataaaatagacttgaacgactggaagtcgaacacgcggctgaagcactgtgtggccgacagcaacatcgtgcggtggttctggcaagcggtggagacgttcgatgaagaaaggagggccaggctcctgcagtttgtgactgggtccacgcgagtcccgctccaaggcttcaaggctttgcaaggtgactgacgtggaggcagggctattcgatgacgcgtctatgtgcgctgtgggcaggaagagctggaaggtggctgggatgtttttctgagatgtgtgctagaaaatggcataaggaatgttctccagtagctaatgctctgccctacagaggtggttacctggcaggggccgtgtgtgagcaggtgtggggccccgctgagcaaagactgtggagccactccagggcacctggattccccctcctcactgcttccaaaaagccaagagggtctggacagcaggggccttcagagtgtctgtgaggccagcttagccaagatcccggggagggagctatgggggaaccgcccccagtctcagtggctccaaagcttggagctgcacatgaacccgtttagccaccaaccacaccgaaagatgatgtcctgctcactctgtttaagccactgaggtcgccggaagtggggtggaattctgtgcgaaaggtgcccatctgcctgtagggcaggcggcctaatgtctcatcttttacacttagggtttggagggtacgttgctggaaggagtgaggtgagtgaagggtgtcaccatactgaaatttagctgattggactgtaaatgctgatagacacacagacacattgtaaacacagaatattccctctgcctcgctgagtaaaatgaggttaattccatttcagtcggctttggccatcagggcacctgcatcttttccattgtgacctctgcctatagatttgctgctgggggcccagcatggataaaaaggggtttgaggctgagccccgctcgtatctgggagcctctgtctgcctgaccatgacagctgctcccagagcttgctggtgcctgtcatttacaaagcctttctcattcagttctcccaacaaccccgagagcctggctgatggggattattagccccattccatggatgaggaagccgagactcactgaggtcatgggatttattatccccccgaggaaaaaaaacaggaggtgtgagtggggaggcagggcaggaatccaggcttcctgaccaagtcacttttctcatggcgccattgtcttgcccacagcaggtccacatgctaaaccttcctgcttagagatagtccctgtcattgtaagggtctcattagtcctccaataattggatagactttagcccagtgtcctccaagtgtctagaaggtgggtcagaggtgaccagggtcacagtcccgaacagggagtgctggtgctgtgggagggcactgaatggtggcccgggcagagtggccagggccctgcaggaggtctctgaaggccctcacctggcccagcctgtcctgactccccaggaggctggggcttggagggtgtggcctgtgagggggaggagccagcttcctgtcccaggaccccagaaaccaggggctgcacactgagaccctctgcccaacataaagatggtgtctctgctggtcctcattgctcccggagtcctgtcctgccactgaccttggcccagcttgaaaggagtatctgtgaatacacaggagcaaggggcagcagagccaaggcccgtgccctctgcgccctcctttcccagcacctggcacccctgtcagctagccgtctttgcagcagcagtggtggctgctggccagcctggtgctcacttggggctgagtttggaaacacctgagcaagaaggggcctggtgcctctccctgccctacagaactggtgggcaagtcgtctattccagagggtgggtacaaatagctctgaccctcagggagcctgtctggagcaggcccatggtcagggtgcactttagggggggccttagcagtccttgctctgccccctgcgatattctaaaatgttggcatcttggctgagtgtggtggctcacgcctgtaatcccagcactctgggaggccgaggcaggtggatcacctgaggtgatccaggagttccagaccagcctgggaaacatggcaaaaccccgtctctactaaaaatacaacaattagccaggcgtggtggcatgtacctgttatcccagctactcgggaggcaggagaattgcttgaacccggcagtcagatgttgcagtgagccgagactgccccactgcactccagcctgagcaacagagtgagaccctgtctcaaaaaagtgtctgaattttgtcactttgatagccattgcaggcatgtcctaaaaccaggcctgggaacctcatggccctctcacaggacagcctgcctgggtgtgggggtgggaatgtggtcagggccctgctcctgggggctgtgtggccgggaagcgccacggctgtaactctgaagtacattaactagaatgttgtcttgtaaggttctacaggcgcggcagggccccggctgttcaccatccacctgatagacgcgaacacagacaaccttccgaaggcccatacctggtaagcaccgcggccaggaagtcacggcgtcctgggagccccagaggatgctgacgttcacgttttttttttgttgtttttttttgagatggagtctctgccaaaatatttttgtcatcatcagaactcaaaagccacagcacctgagacagaaggagaaattctagagttgaatgacaattctgaagccctcaagcaagagactttccccccgacattacgacactgtatagagcggctttactggccatgtaaaaaaatacctgtaagagggccaacattattgctaaacttaacatacatctttcttacagtatatataacctaaaatttaaatatagattttctcttgatttagttttttgtttttgagacagtcttgctttgtcactcaggatggagtgcagtggcacgatctcggctcactgcaacctctgcctcctgggttcaagcaattctcatgcctcagcctcctgagtagctgggactacaggcgcacgccaccacacttggctaatttttgtatttttagtagagatggggttttgccatgttggccaggctagtctggaactcctggcctcaggtgatctgcccacctcggcctcccaaagtgctgagattacaggcgtgagccaccaagcccggcctcatgttattttttaaagctgttttccgatttgtaggactctgtttcatttatgccaattctcaatgactggcagtagtgcttgtgtcagatgggacaagtactttgcagcgtcccacacaaaggttgtcagagtctcttatgaaactaattttgttatgagccatgtaattaattaatattggtgtttcagtggagtgtggctaccactccagcaggctcaagtcttcctctctgccaggtcttatgtacacacacctgttggtaaggaaaattgtatagtttttagtttggatgtattgggcttcactttatctgacatttctgggtccccatcttcttggaatcctgcttatgacacacgtaccttgtctattgcaaatgttttcttcctaaattttaacttaaaaacgagtctccatagtagattatttcctgtatggtttacaaatacaatcacttgcgtacactttgtcctggaaccatccattgagacgagtagccacatttccttgggggaaccagttctagatgctgctgagatgccccgtgagatgatggaaggttcctgtcttggaacccaaggatgcggggtcagatgctagctgtgacaccctctgacatgtgatttggggcaagtgacttcatattctaacttggttttccacacctgtgaaatggggtaatgcagctggtcctggaccatggtgggtgccaaggtcctgctccaagcatggctgtggcgtccattacgggaacgcaccatgttggctgcacaccctactcacaaggcttttgtcctttagtagtttagtgcttggagttagatggatgtggaaagtatgctctgaagctccagaaaaaagagtgcccgccctggaacccagctctgtagagacagaaaccatccttaattgcttaccctagaaagccagaagtcactgtacatcctctgggtcacaattttgtattttttggtttgctacgatagcttcttaaaggatgtctttttctttgcacaaatactggaaatgagcttccccctggaaatatcgagtcagaagttgaatattcatttcatcttttaaggatctgtcatcttgttagttttgagatctattttgtttttgcagggaattttccagactgccctgttttggtctcagatcaagtcccagaggaacagacagacacgcagtacatcgttagtggtgacgttgcctgacagccagtctaggttacaggggctgccaaagaggcattcccagtacagagaaagaatttctcccaaagacagacaaacagaaaacaagtggagagctttgtcctgatagaagcagtaaatagtaacttggttatgttttggttgtgaaggcccaagacttactttactgtgtgttgattgggcacagtggctcccagcacgttgagagggcaaggcaggaggttcacttgaggccaggagtttgagagcagcctgggcaacctagcgagaccctgtctctaccaaaaagcaaaaacaaattacaaatctttgtattagaagcagaaaaacacaggggacatggagaactcatcaccaaccctgccccaccccccattcctctcccctcccacatatacttctcactgcctgtccttggccttgaggttggtcctagggctggactgcccacacggtgactctcttttgtcctttttcagctttaaccggatcgacattccaccatatgagtcctatgagaagctctacgagaagctgctgacagccgtggaggagacctgcgggtttgctgtggagtgaaaagcaaccaaaggcaacagagtctagctcatggccaccagaccaaaagcatccagcttctgtgcacctcctgcaaagctggcagaggccctggaattccagatcacctgaggggaaagggttgtctctctcctttctgttgggggagggggatgggggacttttgttggtggctcccacccatatatccctcctttaccatagtactcccacccacttccatcacccatccaataaaatgcagccaggtttagcctttggctttggtcacacaggatattctgctgtgttgcaacccatgtggtgataaggctcacagccctgagctctttacgggagcatcaactcacagttaggggactgggcgtggctgattgagggtttggaactggtggctatgccagctattccatctcaaaacagccttgaggccccttttcaatttgagcagctgctagatatcttatcagagctcagattccagatttcacatcccagcagccggttctgggtagcagatcaatttccaactggaaaataactatataatgtatgcttattggaattctgccacagcaggaagcttgagtcaaaatgtgtttcccctttgaaaggagaaggaattggagcagcttttcctggaggcccaggatatttcttttctgggtatcttggctgaaaattttgttttacatagagaaaaacgatcttttaagggtcccttttgctgcattatctgtccagtttgacttttttttcagtgaaaacaccatgtcatggagtgtaggaaagagcagaccaaaatcagccctagagccaaccagtcagtcccaaagctgtgacctctgtgccactgttgtccatagaagagcatcgactgtgtcacttaaaatattagtaaaccatgatgcagcaactgctaagagctaaactaacaaaattgtgtcatcatagctgctggcttggtgtgaactcgcttaaaagcaatggtgaaaggataacctcgatgatgtaaatccacccaaagatactgttctacaaaaagtagggtgtggacgcaaacctgtgacagcagagggggacgacttcacactcactgcctcatgtggcccctttcccagtggcagctggtgacactaacgattgctactcggttcacttgcccagatgtcttcatatgatgagcaaggccagaagcaaggctagattcgaagtttctgacaccatttccagtttgcacaaaagtcagtattttatcttaaagtggcttgatttccaatagctgaacttgggcagaaaacagcaggccaatgttcctatgtggtttctttgttgttgtttttgtttggggtgggggcaagtacagggtaattcatgagcaagacatttcactgctgtcgaagtctctgggatcccgctgtgggtctgagatggcctgggaaggaccttgtggacaatggttttatctgttctttttgtcactgttaatttctgggctgctgaggttctagaatagaagggctgccaaatgaggtttgctgcaggaggaaagtttaatcccccattccaaaagtccaggccaaatggtgggcttagcctctttgaaaagttctgccttgcccccacaggtgggcacatcctgtgtctcattcaccatgatgcttcctgagggtgttctagaagcccgttccccagtggctgtatccagcctttccttgcatcatcttcctcttgaaggtgaggaagtgaaaactacagacctcccccggacagcccactctctatcacgagcctaacccgcgggaggcggaagagacatccattcgagaactgaagcggcctccgggatgaggtcagaggccccacctgattttcctggtggtggtatccaaaatcttcagtaactaggaaggaaaccagggtctcatggtttaaaagactttgaagcaggaatgttgcatttgacgcctttaaaactacctttttgctgttgggaggagtcgggggcgagccttagcagctgcaccgccatccccatgctggttggtgctgccctgcctctcgtgccgggtgttgcttcagcccagagccagagggctgggtcccgggtcctccacaggtgaccccggtggacacacgcgttcccatcctggcctccgtctctgcttttccacttctacctgcgtgtgggtttgccgccttgtcatcggttgtgtgagtgtcgcagacctttccagagctccggttcactctttccaaacaggcctccctgtcggtggcactgcactcctagaaccttcagtttctacgatggtttgtttggtccttttgaaccaccccaaagaactcaacatggcaaagcaaatggtaaaagcttcccgactgttctactttgggtccgcgcgaagcccactcacgtgtgatctgtgttgcccctctcggtggtcccaggcgatccagccatgccccctgcccctctgcccagatgcttcaggggcccggcttttcaggcttgccctcaccagcggccgtcagccgacactcagggatgtagctaacaccactccgccagtgctttcagtaggaagagctgaggctgcctgggaggcccggggcgaccggaaaagggctctctcaagttctgaaaagagaatctgccaccagatcgaatttcgacccctgagcttgttcggacgtatggtccaaattcagattaaggtggtcacccaacccgagatgtcaggaaaggccttctgcagagaaaatgtccccccacccgccatctgcagccaggtgtgtgccacacggcagccttcccgaaacatagtatggattttaaaaatgtgtttatttttgtttctcaaccactttataacgtattttttaatttattttgtaatgtcttgttttgaagtattgctgctatccttgttatccttcccactgtttttatcactgatttattttgtgaaagttgtacactaatgttctatgtcaaaatcaaaagtatttaatgaaatactagttctatttaatgtggttatggaaccagctggaaacacaaaacaaacagtgattgtacagcaggctgggcccaggaggtcaggttcattttgttacatatgcaataaactcacgactttacatttttggcgtctgttattttggtgtggaaatgagattctagtgtctttgcaaacccacaagaaaggaagtgtgtaggcagcaggaatactggcaagggccttccaaggaagaaggacagagataaggatagaattgtaagggaaactaatggcaatatggtagtgggctgaaagtgctctatcgggaaaaaacatgggattgagaaaatttagaatttctttgcgcaccggttatcttttcgttttttccttttttttttatttttttgagatggagttttgctcttgttgcccaggctggagtgcagtggcgcaatctcggctcactgcaacctccacctcccaggttcaagcaattctcctgcctcagcctcccgagtagctgggattacaggcttgcgccaccacgcccggctaattttgtatttttagtagagatggggtttctccatgttggtcaagctggtctcaaactcccaacctcaggtgatccgcccgcctcggcctcccaaagtgccgggattacaggcatgagctactgtgcccagcccttacttttttaaaaagttgtagtaaaaatactgtcagccctacataccagtgggttccacatatatggatccaactggggatcaaaaatatttttttggctgggtgcggtcaggagctggagaccagtcccagcttcttgggaggctgaggcatgagaattgcttgaacctgggaggtggagtttgcagtgagctgagatcacgctactgcactccagcctaggcaacacagcaagactgtctcaaaaaaaaaaaaaaaaaaaattttttttttaaatggatggttgcatcagaacatgaatagatttttttttcttttcattattccctaaaccatacagaataaaaactacttacatggcatttatattgtattagaaattataaacaatctagagatgatttaaagtatacaggaggatgactttttttttttttttaaaaaaaagagtctcactctgtcacccaggttagagtgcagtgacacaatcttggctcactgcaaccttcgcctcctgggttcaagcgattctcccgcctcagcctcccgagtagctgggactacaggaatgcgccaacatgcccggctaatttttgtattttcagtagagatgaggttttaccatgttgcccaggctggtctcaaactcctccacccacctccaccttccacagtgctgggattacaggcatgagccactgcacctggcattactgacatcttaacaaagttaagtcttccaatctatgaacatgggatgtcttttcaatttacttaagttttctttaacttctttatacaatattttgttttcggcagacaactggcaagtcttgcacctgcatggttagctttattcttttagatgctattataaacataattgctttcttaagctcttttgtggacattcattgctagtatatagaaacataactgcatttgtgtgtcaatcttgtaccctaaaactgcaaaaattcgtttcctggctctagtggctttcttgtgaattctttgcaattttctatctgtaggagatagctttaccttttccttccaacttggatgccttttattttttatctattagctctggcttatactttccagtacaatgttgaatagctgtggtaaaagtgggaatttttttcttgttcctgatctcagagggaatgtttataagtaaaatgcccttctgtatcagttgagatgtacatgtttttttccctgtgttctattaatgtgatgtgttacattgattgatttttcttatgttgggccacctttcccttcctgggataaattccacttggttgtggtgaataattcttttaatatggtcttggggccgggcgttgtggctcatgcctgtaaccccagcactttgggaggccgaggtgggtggatcacgaggtcaggagttcgagaccagcctggccaacacagtgaaaccttatctgtactaaaaatacaaaaattagcctggtatggtggcacacgactgtagtcccagctactcaggaggctaaggcaggagaatcgcttaaacctgggaggtggaggttgcagtgagccaagactgcggcactgtactccagcctgggtgacagatcaagactccgtctccaaaaaaaaaaaaatgctgttggattcaatttgctaatattttgttgaggatttttacatctatattcataacagatattggtctatagttttcttgtagtgtttttgtctggctttcaaaaatcaccgtaatgctagtctcatagaataagttaggaagcattctttccttttcaactatttggaagagtttgagaaagactggcattaattctgctttaaatgtttgctagaattcaccagtgaagccatctggtcttgagcttttctttgttgggacgttttagatttttgattcaatcttcttactagttatcagtctattcagattttgtttctttatgattcggtcttggtaggttgtagagttctaggaatccatttcatctaggttattcaatttgttggcatacagttgttcatgatactctacgatcctttatatttctgtaacattggtaataatgtcccctctttccttttagctgattcttccttcttaatcatctaaagttttgtcaatcttgttgatctttttgaagaaccaactcttagcttcactgatttttgtcatttgtcttttatttcctctgctatagtatttattttcttctgttagctttgggtttagtttgttctttttttcctaattccttcaggtataatgtaagttgttcatttttaaccttctttttaatataaagatttacagccataagtttccttggtcatggtgaataatccttcttagcactgctttcgctgcattccataagttttggtatgttgtgttttcatttgtctcaagatattttctaatttcccttgtgatttattctttgacccactggttgtttgaaagcatcttgtttcatttccacatatttatgaatttcccagtttccttctgttactgatttttagcttcattctgttgtggtcagagaaaatactttgtgtgacttcagtcttcttaaatttattgagacttgttttatgacctctctggagacagtctattctggagaatgaatgttccatgtgtatttgagaagaatgtgtactctgctgttgggtggagtgtttgtgtatgtctgttaggtccagttggtctacagtgttgttcaagtcctgtatttccttattgatcctctgtctagttgttctattaataatttattgaaagtggggtattgggctgcgcacagtggctcatgcctgtaatcccagcactttgggaggctgaggcaggcgttcacttgaggtcaggagtttgagaccagcgaaaccccgtctctaataaaaatacaaaaattagccaagtgtggtggcacatgcctgcaatcccagctaccctggaggctgaggcaggagaatcagttgaacctggaaggcagaggttgtagtgagccaagattgcaccactgcactccagcctgggtgacagagcaagactctatctcaaaaaaaaaaaaaaaaaaaaagtggggtactgaagctttctactattatagtggagctatttcacccttcgcctttgctgtgagcctctctgggtttatcctagctgaaatttgtcaagcttcttaaatttgtatgtccatttctttcttccaatttgagaaagttttgtccattattttttcaaataagctctgtcctcttcctttcttctctttctggaatttcctaaattggacctgtcctaaatcggacaccttgatgtgttccataaatcccttgagctctcttcattttttctctttgctcgtccagttcagtgatttcaaatgatcagttttctaaggtgtctgattctttcttttgcctgtttgagtctggtgttgaaccactgtattgaatacttcatttattgtatttttcagtgccagaatttggttcttttagataatttctatttttggttgatattctcattttgttcatacatcactatcctgatctcctttaggcctttgtcgtgttctcccatagatctctgggcatattcaagacaactgttttaaagtcttttctaacaagtctgatgcctttgtttcttcagggatggtttctagagatatattttgttcctttgaatgggacatgttttcctgtttctttgtattccttgtgatttttttttttttttttaaactgggcattcgcaaaagcagtcatctcttccagtctttgaagagtggtggggaaaagcttcactaattcagagggtatatcgtaatagttgctatcagcctgaggcgacagcttaaggtcatctcaggtcttttaggggcctctgtttttctttcgtttataccatatacatggctgcttttcaaagtcttaatttttagccaggcgcggtggctcacgcctgtaatcccagcactttgggaggccgaggcaggcagatcacgaggtcaggagatcgagaccatcctggctaacacagtgaaaccccgtctctactaaaaatacaaaaaattaactgggtgtggtggcgggcgcctgtagtcccagctactctggaggctgaggcaggagaatggcacgaacccgggaggtggagcttgcagtgagccaagatcgcgccactgcactcctgcctaggcaaaagagcgagactccgtctcaaaaaaaaaaaaaaagtcttaatttttcaaagggtcttaacccagctgcttcttaggaataagatgttctcttatattttctgcccataatctcttgccccaggtatccactgtggtgcccctggcagattttacatgtcgtacctgccactgccttccatggctcttgccagcctgagatctgaactatgccaccttccctgtttcacctctgagtcagatgacatagaaaccagtccttcaggtagcccaaagacagggcagaacactgcaaatcagttctgctctgctccctccggtgcaagggaagacactggaaattgggctgcttcctcccaaacacccagttgtgccagggaggaatgggggaagggcaaataaaaatgacataaaaactattttcaatgtggctttttcttgattgggtgttcagctggttgctatagacctttggctggttcccagagctcctagtgagtgcctagttgtttttttttcccctcaatgtttccttggggaaatgtgggcctggagcttcctggtctgccatctccaatctctcttgattggagaattcaatccattttacatttaaagtacttactgataagaagggacttacttctgccatttaaacttttttttttttttggttcctcatttcctccattactgcctttcgtgtttagttcattttttatagtgacacggggattacacttgacatcctaacattacaacaacctaaatcgaatttatatcaacctaatttgaataacatacagaactctgctcctgtactgctgtctcccttactgttactgacatcacaaattacatctttatacgttgtgcacccaatattagcagttgttaatggatctgtctttttaatcatgtagaaaataaaaagagttacaaaccatcattagaatatactagattttataactgtccatgtatttacctttactggagatctctatttcttcttacaacttcaagttgtaagatgcttagtgttcttttaaagaagtttatagtgttcagcgtttcaacctgaaagactccttctagcatttcttgcaaagaatgataatgaactccctcagcttttatctgggaaggtattaatttcttcctcatttctaaaggacagttgttagatgtagaattctaacaggttttctttctttcagcagttttcatatatgagcccattctcttctgattcccaaagtttctgatgaaaaatatgctgataatcttgagaatctcttgtatgtgataaattacttctctcttgctgctttcaaggttttcttttgtcttcaatgaagtgtcttggtgtgtgtttccttgagcttatcctatccagagtttgttatgctaattgggtttgtagatacattttttttttaatcaaatatgagcagttttctgttgaactttctttaaatatactttctgcccttgcctctctacttctggtctcatttatggcattccataggtaggttccttaggttttcatttactttcttcattttttttcttttgattccccagattcaacagtttcaattgccctatcttcaagctcattgagtggttcttctacctgcttaaatattttgaaccctttagggaatttttcatttcagttattgtactttttatagttccagaatttgcttcctttataaaatttctatttattgatattctcattttgttcatatactgttctcctgtctttgttttcctttagctccttcagcatctttcaaacagttgttttaaagttactgtctagtaagtctgctgtcagcgcttcctcagtgatggtttctgttgatttgtttctttgaacgtgccatacttttctatttctttgagggtcttgtgattgtttcttgttcaaaactggacatttgaatcttataactctggaaatcagattctccttttttcccccccaagcatttactcgtctccccacaccaactgttgagggtatctcaggatcagcttgaggtgaaagcttaaagtcttcccaggtctcttctgagcctgcatatttctctaggtatgtggagtggctttctaaattgccctgtatacacatttatttcacagttgatttctctgctcagggactcacaaggctgcgatcaaggtgtcagccagactgtattctcatctctcggctcaaccagggagaatcttcttgcaggctcctccaggttgttggcagaattcattttcatgtgactttgtgatggagggacctggcatcttactggctgttggcaggaggcccaagtaagttgtccgcacatgtgcttttcaatatcctcatccttaagtctggctccccaaatggaaaaacaggtaagaagaaaaacaatagctcaggctgttcccttaaatcctctggaagccacttcagccagtggggaatgcaacaatggctacccacctctatgtttgcacttctgcaatcaaaacactgaaccttgatacgtggaggccagatccttacttttcaccctggctccaggaagtcatgccaggaacacgggcatggctgcctaccacaagactcaggatggggagacgctaatatcctaaaggctgaaattgaccgaaattaactgcaacttaccagccaagattttccttggaagttgcaagcatccaaattagactccagagttccaaaacggttacctcagacagattctgccactccaatttttgtctcggtgcggagagagattccttcctcttctgtccccttgctggatgtcactcttatatctttttttatttctcaccctggcacagtcactagaatgcagtgtgtgtctgtaagcttagccagcagacacagtcctgcgctctgatgtctgtgagaggatgcagcactctaggttagggaacgtgtgtctggcttgttggggcattttctactgtcaaaagtcggagtattttcaggttttgatctcagtgtcatcactaggtagttggggctttaaacaagttggtaagcctatctgtgtgcccacatctaccgtgtctactaccttgatcacttttctttttttttgagacagggttttgctcttgtcgcccaggctggagtgcaaatgacatggtctcggctcactgcaacctccgcctcccgggttcaattgattctcctgtctcagcctcccgagtagctgggactacaggcgcctgccacgacgcttgtctaatttttgtatttttagtaaagagggagtttcaccatggttggccaggccggtctcgaactcctgaccttaggtgatctgcccgccttggcctccaaaagtgctgggattacaggcatgggccaccgcacccggccaatgacttttttaaaacatgctcttttgaaactctctcgtttgttctttcatcttcccttccaccaccataagcactgcagctccctcaggaagccatagcatccttgtcttctgatttttacctgatgatcatatacagatatatatgtatacatattttttgtgtgtgccgatttttttccatgtctatgctctcaagaggcaggatgactttgttgagagcagagctaggatgtaggatcaaggctttataacatgaccttgaatattaccctgataccaaagccaggcaccaggagaaaactacaaactaatggcccctatgaatactgatgcaaagattttcaacaaaatactagcaaaccaaatccaacagcatattaaaaggactatataccatgataaattgggatttattcctgggatgtgcaaggataattcaacaaatgaacaggataaagaggaaaaaccacaaaatcattttaactgatacagaaaagcatttgacaagatgtatcaccttttcagataataacttcttccagcaaactaggaatagaaggaaaacacctcaacataataaaggccattatgcaaaacccagagctaagatcatactcaatggtgaaagactgacagggcttcctctaagataaggaatgagacaaaggtgaccgttttttgccacttgtactcaacacagaagtggaaattccagccagaataattaggcaaatggggaaaaaaaatccaaattgaaaaggaagaggtaaaattatctgtttacagatgacatgattatagaaaagtctaacgaaaacaaactattagaataaacatatttagcaaaattgtaggatacaaaaatcaacatacaaaaatcagctgtgtttctatacactaacaataaataatccaaagaggaacttaagaaaacaattccatttacagcggcattaaaaagaataaacaggaacacacttaaccaacaaagtcaaatacttgtatactgaaaactgtaaatcattcattaaagaaattatagaagacgggccgggcatggtggctcacgcctgtaatcccagcactttgggaggccaaggtgggcggatcacgaggtcaggagatcaagaccatcctggctaacacggtgaaaccccgtctctactaaaaatacaaaaaattagccgggcgtggtggcgggcacctgtagtcccagctactcgggaggctgaggcagaatagcgtgaacccaggaggtggagcttagagtgagcagagatcctgccactgcagcccagcctgggtgacagagcgagactctgtctcaaaaaaaaaaaaaaagacattccaagcttatggaataaaagacatactatattgtatttttaatttttcatttttttttgagatgttctcccatccaggctggagtacagtgctacaatcatagctcactgcagcctccaacttctggggtcaagtgatcctccttgctcagccttccatgtagctgtgactacaagcacacaccaacacacccagctaatttttatatttttggtagagatgaggtctcactatgttgcccaggctggtctcaagctcctggcctcaagcaatcctcctgcctcagcctcccaaagtgctgagattacaggtgtgagccaacacacctggccaaaatattgttaagatgtcattactactcaaagtgatctatagatgcaatacaatcactatcaaaatcccaacattgggctgggcgcagtggctcacgcctgcaatcccggcactttgggaggccaaggcgggtggatcacctgaggtcaggggttcaagaccagcctggccaacatggtgaaactccatctctacaaaaatacaaaaactagctgggcgtggtggcatgcgcctgtaatcccagctacttgggaggctgaggcaggagaatcgcttgaacccaagaggtggaggttgcactgagccgagatggcgccactgcactccagcctgggcgacacagcaagactccgtctcaaaaaaaaaagaaagaaagaaagaaaaaatcccaacattttagcagaaacagaaaaataaatcctcaaatttgtatgaaattgcaggggaccccaaatccagaacaatcttgaaagagaagcacaaactaagagaacttacacttcctggtttcaaatcttactaaaaagctacagtaagcaaaacattgtagtggtggcataaagacagacagagagaccaactgaacagaacagagagcccagaaatcaactctccacaccatatgcgtcaactgattttgggacgccaacaccctttccaacaggatcgtcttctcaacaaaattatgttggaaaaaccagatatccacaagcaaaagaattcagttgggccctcagcttatagcatatacacaaattaacttcaaagtggaccaaagatctaaagtaagtgttaaaactataaaactcttagaagactacataggagaaaagcttcatgagattagatttggcaatgattttttgacattacatgaaaggcaaaggaaaaataaattgaactgcatcaaaattaaaaacttttgtgcatcaaatgacactatcgacagagtgaaaaggcaactcacacaatattagacattatttgtaaaccatctatctccaagggattactatccagactatataaagaactgtaactcaacaacaaaaacaactcaattgaaaaacgggtaacggactagaattgacacatctccaaagaagatatatgactggctcacaagcatatgaaaagctgctcaacttcactcatcactagggaaatgcaaatcaaaaccacagtgaagtaccacttcatgcccattaggatggatgtcataaaaaaaaaaaaaaaaaaaaaacccagctgggcgcggtggctcacgcctgtaatcccagcactctgggaggccgaggtgggcggatcacacgaggtcaggagatctagaccatcctggctaacaaggtgaaaccccatctctactaaaaatacaaaaaattagccaggcgtggtggcgggcacctgtagtcccagctactcgggaggctgaagcaggagaatggcatgaacccgggaggcagagcttgcagtgagctgagatcgtgtcactgcattccagcctgggtgacagagcgagactccatctcaaaacaacaaccaccaccaccaaacaaaaaaacagaacattgcaagtgttggcaagaacgtgaagacacagaaaaccttacctattgctggtgggaacgtaaaatgatacagctgctatggaaaacagcatggcagttcctcaaataatgaaagatagaattcctatatgatccagcaagcctacttctgggtagataaccaaagaactaaaagtaggaaattgaacaaatatttgtatgcctatgttcagaggagcattattcatagtggacaaaagagagagaagccaagtacccatcagcagatgaacgaacaaacaaaatgtccacacaggcaacgcaatgcaattcagccttaaaaaagtaaggagagtctgacacgctgcagcatggatgaaccttgaggtcattatgctaagcgaaataaaacagtcacaaaagcctgggtgctgcggctcatgcctgtaatcccaacactttgggaggctgaagtgggtggatcgcctgaggtcagtagttcaagaccagcctggccaacatggtgaaaccctgtctctactaaaaatacaaaaattagccgggtgtggtggcgggggcctgaaatcccagttactcaggaagctgaggcaggagaatcgcttgaacctggaaggcggaggttgcggtgagccgagatcgtgccactgcactccagcctgggtcacgacagtgaaactccgtctcaaaacaaaaacaaacaaaaaacagtcagaaaaagacaaatattgtatgattccacttacatgaggtccctagagtcatcaaattcacagagacagaaattagaatggtagttggcaggggcggaggggagggctgatggggattgagtgtttaatgaggacagatttttccagatgggaagatgtaaaagttctggagatggatgctggtgattgctgcacaacgaaggtgcataatgccactcaactgtgcacttaaaattcatcaaaatggtaaatttgatgttatacatatcttaccccaagaataaaaagaagtctgatcatagcacttaccttgaaatggtgtttggagaaaaagggcatattgtctgcatggtctggaccctcctcactctggagccggcagcctcccgggtccagctcccagcaatgctgtgccgggtggacagagctgaggttcatggtcactgagttgctgcctgaagggctccagactccagatccttgatctttccacgtggagctcatgagagctcctggatcttcaccggggaggtgctatctcctgccttggccattccaaggttggttttcccaacaaccagggggaaggtgtgggcgaacctggcagcaggccgggcctcttcctcaccagtagcaccagctccagactcccattctccagtgtgaaagacaaatgtcccccaaccctaacgccacccacacatctgcacagacaccaggcttcatggagcgcaagacgactcacacagtggcccaggccttgtcacacgcagtgaggacaatcagaggagcacggtcaccgctcaggcctgatgccagcaggacacccaccagctgccagatgagcacgcaatcactcctcatttgcaaagcacggctcccatcattccagaacccaagacactgtctcacaaagacagctctctgcaaggaactgggaagtaacttgagtccagtcagaccggcaaaaatcagtccctcggccttgacctgtgagcagcatgtgggcttggaatcaggctggacgggcttccctcccagtttctccacagctgctccaggcctgggacaagcttctcaccttctgtgagctggaaaccccctctctataaagtggggaaccacccctctgggctgagggctggagcccagcacagagaccttgatggtagctgccagtaccgcccactgcaaaccagcctgcacccaggccataacccagcaacacaactgcgatctcaagctgccaagggacatcttgtcaaggccctttcatttgaccctgtggtgggatttgggtaaactcagctgtaatcatcattccgtggtagcctggaacaatggagggtaaatgaaaggcaaggagagtcaagggctggagaaggttctgtggcctgcggcagaggtccagagagggctccgtgctgcccccgtcccctggggcctgtaaagggccatcttcctcgaagaagatgtttctgacatcatggcgtgtgctccttggggactgcccctcccacacgagggcaggcctggctgaaggtacacactggatgaaggacaatgaggaggtagagctgggtacagagtgcttcatgctgagcctccgggcatgcttcgtgtacactccgcacactctccacacacacacgttacatggcagcagtcctgaaacacatgaagatagctgagggctccgagagtctggcatgccgacccgctgctgagatcaggccgccattctgagagtcccgcacgccgacctgctgctgaggtcgggccgccattcctcatcaacttgactgaatatgctctgagctggcttcccaggtgccaagtcatggcctcccctgtgatcacagcagcactgtgcctgcccaggcagcgcacgctgtcaccaagaggctacgctgaggagcccacactgtctctggggcctctggttcccaaggggctagggacattgagagggaagaaacccctcatggaaacaagcattttaacataaacaagggacaataaacccttttataaaatatttattctaaaaaaaaaaatcacactgtacaaatttagatagaacattatcaatgctcagatttataaaaatgggaacagaaagactaaagctagcgaaggaacgtacatttctgttttgtctttttaaattaggaaggtaaaagtgattttttcttcaggtgcagtgatagtaaatgtctagaagacatccgaagagccagaaataaaaagcacaggagccgcctgcagactctcagagttctgtcttcacccactgaatccgaagtggatgcgtgtggcgctcccgcagggtggcctggccccgtggatccacgccgaacgctcaacgagattcccaaggctggctgtgtacagcctaaaactttgtgctcagagaaaaaccagcatgatgggttcatcaactcctgtttctcaaacaaaatgagttttctgtacacttgttacaaaggtctgtacaaaagcacgaagctgctgtgaggtgttatttccgaaagagttaaaaatggatggaagggagctgttcgtacagttccgcctgtacattcacagagggaggacaccataaaaaaaggactcactcagaaattccagaccggagaatcctggcttcttaaaagattattttgaaagcttggaataagtttcagctctgccatttccaaccgcttcgcccagcatcgtcatagttcagcttcctctaaaactatattctccctttcttacacgcaaactaccaggaaaataaccgcaacccagtgaaactatggggcttctgtgaatataaggaacgaggcagggagaagtcgtaaaagctgcgggctcagagcccggagcgcccttcacattccgggtggccgtggcggccacagtcacagccaggggtgccaggcggggtccatgcggcacagattgtccaggctgtttgccgcggccaccagggtgttcaccttgctttccccgccttcgaactgggcgaggttgtgcaggcgggtcatgatggcggtgacggctttctgaaccagggacaccagttgctggctgtccatgttctctggctgcccggcggccgagagaggagaggacgtgtcctcttgtgtttttttgtgccaagcaatgatctcgtcccggagaaccgttttcagaatgccatccacctgcgtgagggagagaacgagacgacttgtgtttaaccaagaacagcccacaggggcagcttcctaacaaggtgggactcaaccacagcggccgctcagggccaccaagggccagtcgagtttcagcaccaggccaggctgtgtgccctcaggacgggctggggaagccgctgggggacaaaccccttcctccacttggagcagcagccagaaggcctcagtgttgggcagcgcggacctagatgacaaaggcagccatgctgcgactgaggcccaatctgtttatttgttcacttgacaccttccggcatctgccgagtgtcaggcaggcccgttccaagcactacagacaagagtgaaccaaagagaaaaccatcccttgccctcacagcaaaggacataacacacaggggtgctggccactgtggagagcgcagagcccgtgaggcacatcagcagctcctgcaaggccgtgacgcgcgggcatctgagtggctctagcctgcgcctgtgataggacgacgtggagacccaccttaaagtttggctgggcgaagcaccgggcgaccgcaatcatggacgctgtcaacgggccggagaccccgatggtggtcagaaactcagaaatgttgggcgtgagtcgaaatgggacaggacggttggcatccaggtctccagtcgcgtcgtttatgtcaaatcgaaagtaggcaacattcagtttgccagtgtcctaaatttcagaaggagacactttaggaacttcagcagaaaggcgatgtcacgaggagaggatctggctgttcaaagcaggttacctgagcgatctgtaacatctcggggttgagtctatttaaatgcaggacgaattccgcgaagcctatcagagccagctggatggtgaacatcttccggaacgtccagtagtccgtggcattggggaaggtgtgcagcgcccactccttgagcatgctgcgcggcaccatgttactctgaacctccttgaggatgtcgcggaggacctgaaacacagcgctccgtgacactcccatctcactcactgattttttttggaaaagaaaaattctcaaattgcaattcctctttaacttagcaccaagagcaaattctgtaaattctggtgacagatttaacgcacgcattgttaggagactgaaggcgaggaggcacaagatggctgtttccctccagggttcgccactgtctgctctaaagcaccaatgcggctggtctgcgtcaaagctgcagttacctaatatgcgatacctgacaagaatgcaggtaaatatctgaacatttccacccttgctgactatggaatatatcaggccaattaacagaacacaacagctggacaacagcagcaccacttccaaccaagactttatactaatgacagatgtttcacaaactgaaggagctggtctaaccacacacaccacacgagagactgaactctgtactagagactcatagactactgcagacatcaccaactcagtaagagttcactcagttaatggacttcccgttcgaccatctggtacaggccatctacggggtcttttcccagcttagtcctacccacgtgctctgtgggaatggctgtgagaaagcaggcccttctgccggcaagaacaagggaggccaccggcgacacatgcagtttgtttgtttcctcatccgtcaaatgggaagaagcacttctgagactgcaaaggagttccaaaatctgctccttaagcagtgagaatgctggcaaaaccatcaaaatcaactttgtcagaactctagaaattaaaggcttacaacagtctggaggagcttttttatttagttaaaaaacaaaacaaaacaaaaaagcctgggctgggcgtggtggctcacgcctgtaatcccagcgctttgggaggccgaggtgggtggatcacgaggtcaggagttcaagaccagcctggccaacatggtgaaaccccatctctcctaaaaatacaaaaattagccaggtgtggtcacaggcacctataatcccagctactcaggaggctgaggcagaagaatcgcttgaacccaggaggcggaggatgcggtgagccgagatcgcgccattgcactccagcctgggcaacaacagcgaaactctatctaaaaaaaaaaaaaaaaaaaaaaaaagagaagaatgaaggagtagaataaataacaaaataaacaagaggaggaagcggctctgaagctggattcctctgtgctgtgggcatctccctctgcctataggccctggcagctgctaagctggaacaaactgcctagtcggtcactcacgctgtttagaaacaggatgactctgaggtcagcatgtatttgtcactggcttccacgctgtcgaaagttaatgtcgccttaagaatataatccattcctctcctgcaaatacctcagaactgcccatcatccacagaatgaccaggccatggcctgtgccacaaaaaagccctggtgtcaattcccaagagaggccatgaactctgtcaacagaggctgatcagaaacagggatccatgcctctgcctgcacagagctggaggctgcacctgatgctgcagcctggaatacctcgggccctgccgtgccctgggccacagagtacaccatgggctcaaccttcctcaaccaaactaagtcctccaggagccaggagaactggaacaagtccctgggtgactcgggacaaggtcacagcatccacctctgtggtctctccttcttgggacccatagaaaggaccacggggcacccagggagaggccaaaacagctgcccctgggtgccccacacaatcccccaaaaatctccccacctaaagcccatacctgccctgcctcctaccaagggcaaaaacgtgcaggtgaatgaggggcctctgtacctccgaggggctgcaggccagggccacccaagactcctgcgggcaccatgctccgggctcaggcaaccgaaacagctgggccccatgcactccagagtctgtcgctttttgtattttagaaaacagcacacatgctgcacatcgcctaacacctccagcagcagaccaggtgaacaggaacatgaagtggatgaatgaagcctataaacagcctcccatcacctcagatcaggtgtggctgtcaagtgagcctgccagaaacttactttaaaattctaatttcggcgcttctttgtaagtacaggcagagggcaaggggcctctccaaggtcgaggactgacccgtgtctggtcataacaaaccgtccacgacaagtgtcctctcaccaaggtcaatagctgtctcatttccaccatctcatgagtctaataaagttactttaaatgacagaggtggcccccaacaaatgcctgttcatctcctaaacacccctgtctccaggcactgccccacacaggagggctgcaggcggcagctcggcccccggcccggccccactgctacctggtggctggcttgggttccccgcgcctgcaccgtagccagccggtcatagtaacgggagatggggttgtcatgctcgatgcccttcttggcgcagcgctgcttgtagatctccacaagggaaagtgaagaggggttgtcctccacgaggcgcatctgtggggaaactgccacaacccggggcactggggagagaggaagagaaacggggcaggctgagggtgaccgcgggccagtgctcagctccaccgtcagagtgccactgggagcagagctgacccggctctgtatgccttgggggcttagctggaagaacccggtggtcatgcaccatccatttgctcaacagatggcatgaggctctgacggcacgaactgatcgtcaccttgtgtccacaaacagaaatgctttagaaggcaatcttaaaaagacatcttggccggacacagtggctcacgcctgtaatcacagcactttgggaggccacagtgggcggatcacgaggtcaggagatcgagaccatcctggtcaacatggtgaaacctcgtctctactaaaaatacaaaaattagccgggagtggtggcaggtgcctgtaatcccaactactcaggaggctgaggcaggagaatcacctgaaccagggagtcagaggttgccttgagccgagatcacgccacagcactccagcctggcgacagagcgagactccatctcaaagaaaaaaaaaaaaaaaagacatcttaaaaaaacaaaaaataaaggatagcctatagtcccagctactcgggaggctgaggtgggagaatcgcttgagcccaggagttggaggctgcagtgagctgtgactgcgccactgcactccagtctgggtgacagagcaggaccctgtctaaaaaataagaataaacatggctggccatggtggctcacgcctgtaatcccagcactttgggaggccaaggtgggtggatcacatgaggtcaggagtttgagaccagcctggccaacatggcaaaaccccatctctactaaaaatacaaaaattagccaggcgtggtggtgcgcacctgtagtcccagctactcgggaggctgaggcagaagaattgcttgaacccaggaggtggaggtggcagtgaactgagattgcgccactgcactccagcctgaatgagagagtgagactccgtctcaaaaaactaaaaataaaaaaaaacagactctgccaaatgctcactcttagaggctttccttaatcagagtctatgggaagagtccggccttcctgctctgagacagctgctgtctaatgatgcaaacttgtctttcagcacctaggacggctgtgccccatctttggaggaggaaaatcatccctcaggtcatcttctgtgttctgtccacataaggaaagcaaccagcatcaacctgatcgtctagccccattaatgtgtaaatccctgtccacacatggtgaccagtactctgttcccaatcaccattcggtattggagatgcagttaatctacaacctgccagacaggatgctaacctgcaccgaaaccactgtggtctgagtcagctggaggcggcaggagcgctgggcgaccactccagagcctgtctccccagtgacgtcaccttggggagcagcaccagacttgtgtgcagtttctcttccaaaagtgggataatagtacctaccccatagggttgtttgtggattaaatgagataatactttgtgaagatactaggttcagggaatattcagatatcttgttgcaatgaagttggagggagctgaaagatttccagaagatggcagattaagcctgcccggtgagggtcccagtggcagctgtgtcccagccactgtaacccctgacgtggagtcaggggcatgtgaagtgcacacagatgattctgacttctgtgaaccaagtggctgattctgtctaatgtcagttaagccacagctgatggcttgctgtcctggcgtctacccataaagaaatccccaaatgactccaggacacacattaggaccaccattctgtgctgaccaagcatttggaagcagagaaatcaataacccacagctggaatcaacactacaggtcatgttatatacatgttaaaacatacacagctttctgtgatgcattttgagctttctttaggcttttaaaaaaatcttattttgagatataaaaaaattaagggtcagagatttcaggtcaaaaggggctgatcacagctttggtggcaaaagaaagttccataaaggactagataacatacattgcagcgggctcccgacttcagggattacatgctaaaaagtcatcaaagtggctctcttctctggataacattataagcatctcatctacgtgccggtacaatcaggccactcacgataactcagtgacaaagacttcattcagaggttgcttatcagctatttgtgtccccctggcaatttctgtggccttaacagggcagctagactttcccgagtcctgcatttcacccaggaatgaaattcagggagggcccagagtgcagcgtgtgaagcagctagaggcgcgctggaaacctgatgcatgctgctgcctcgctggcgcccaggctcggccggggtggtttcacttctcctcccagcagcctgggttcccgggaggagaagcaaaaccggcagcacccactgagacgccccagctctccaggggcccactccgtagagtgcaaaagaccttagaacagggatgtccaatcttttggcttccctgggccacattggaagaattgtctcaggccacacataaaatacactgacacgacaggtgatgagctaaaaaagaaaaaaaaaaagaaaaagaaatctcataatgtcctaagaaagttgacgaatttgtgtcgaaccacattcaaaggcatcgtgggccccatggagcccgcaggttggacaagctcgccttagaggaaaggtggacacagctctcatctctcagtgagaagcctgaaggcctggagctgctcctcttcctgaggccttccctggtcagcacagactacaacattctctgctgacgcagctggaccctcaaaggctaacgtgagctgcctgtgcaccccacgaggtgtggctctcatccccacctgtgaagctgcctgtgtacccagcgagctgtggctctcaaccctacctgtgaaaaacaagtgcctcttggtggtctcctttctcttctccaaacaggggttcagcagacgcagcagctgcaacacacgctcctctcgccgtgactctgtgaggcaggcgtcgttcatgacgaggtatgggtagatcttgccattgtgtccccggatgtacagccgccgggctgcggtgttgtgcttctgcacaatctctacccggggcatgaacctgccagagcgagaagccatgaggacatgccctgcatctctgctaccagtccttgtcttgagaagaagctaggaatgtccgaactgtcacgggaaaacggactgtgtaggccagcggtcgtttatcaatttatttgtaccctgcctcaccctgatgcggtgtaaatgagtcacaatattttcaattcagcagccacggacggaagtcaaggaggagggagagctggccaggacaggagccagatttggaggaaagggcaactaaactctggacatatagaaaagcagagctgtgtctggttcagaaataaagacgaaacacactttttgttaaaagaaacctcttcaaagccctttcagcatttcaaatgagatgcagcacactctaggaaatgctacaatcatctgattctgcctcaatactgtgcttcgaggatttacaagagtgggacacacactgttttgtcaagttctatggtgactcggaagaaggtctgctgaatgcaaacccagactgcactcaggacagctaaccagtcagcgcgggcagaacttgtaaagtgcctgaccacttacattccagaatcatcttatgttctcccatgtcagggaatctgtgtccaaaattccccacagggtccaccctggagctcccatggggctccatgtccatgggcgccgtgggttagttccacctgccaggctggcccactcaccgtgcaatcttgatgtaataatgcgttggctttggcatcagaaactccccaggaatttccacttcagctgtctgtgccgagaaattgctcaagaaccggcacttttcctctatgaggaagaatttggggagttgcttggtcttggcctccaagattttgatccactttttcaacttagaaataagattatgaagcttcatggatcctggaacgctgaagtcaaaatc

SEQ ID NO: 7001 - DNA, 5541 bp, Homo sapiens
ttttttttttgttgtttttttttgagatggagtctctgccaaaatatttttgtcatcatcagaactcaaaagccacagcacctgagacagaaggagaaattctagagttgaatgacaattctgaagccctcaagcaagagactttccccccgacattacgacactgtatagagcggctttactggccatgtaaaaaaatacctgtaagagggccaacattattgctaaacttaacatacatctttcttacagtatatataacctaaaatttaaatatagattttctcttgatttagttttttgtttttgagacagtcttgctttgtcactcaggatggagtgcagtggcacgatctcggctcactgcaacctctgcctcctgggttcaagcaattctcatgcctcagcctcctgagtagctgggactacaggcgcacgccaccacacttggctaatttttgtatttttagtagagatggggttttgccatgttggccaggctagtctggaactcctggcctcaggtgatctgcccacctcggcctcccaaagtgctgagattacaggcgtgagccaccaagcccggcctcatgttattttttaaagctgttttccgatttgtaggactctgtttcatttatgccaattctcaatgactggcagtagtgcttgtgtcagatgggacaagtactttgcagcgtcccacacaaaggttgtcagagtctcttatgaaactaattttgttatgagccatgtaattaattaatattggtgtttcagtggagtgtggctaccactccagcaggctcaagtcttcctctctgccaggtcttatgtacacacacctgttggtaaggaaaattgtatagtttttagtttggatgtattgggcttcactttatctgacatttctgggtccccatcttcttggaatcctgcttatgacacacgtaccttgtctattgcaaatgttttcttcctaaattttaacttaaaaacgagtctccatagtagattatttcctgtatggtttacaaatacaatcacttgcgtacactttgtcctggaaccatccattgagacgagtagccacatttccttgggggaaccagttctagatgctgctgagatgccccgtgagatgatggaaggttcctgtcttggaacccaaggatgcggggtcagatgctagctgtgacaccctctgacatgtgatttggggcaagtgacttcatattctaacttggttttccacacctgtgaaatggggtaatgcagctggtcctggaccatggtgggtgccaaggtcctgctccaagcatggctgtggcgtccattacgggaacgcaccatgttggctgcacaccctactcacaaggcttttgtcctttagtagtttagtgcttggagttagatggatgtggaaagtatgctctgaagctccagaaaaaagagtgcccgccctggaacccagctctgtagagacagaaaccatccttaattgcttaccctagaaagccagaagtcactgtacatcctctgggtcacaattttgtattttttggtttgctacgatagcttcttaaaggatgtctttttctttgcacaaatactggaaatgagcttccccctggaaatatcgagtcagaagttgaatattcatttcatcttttaaggatctgtcatcttgttagttatgagatctattttgtttttgcagggaattttccagactgccctgttttggtctcagatcaagtcccagaggaacagacagacacgcagtacatcgttagtggtgacgttgcctgacagccagtctaggttacaggggctgccaaagaggcattcccagtacagagaaagaatttctcccaaagacagacaaacagaaaacaagtggagagctttgtcctgatagaagcagtaaatagtaacttggttatgttttggttgtgaaggcccaagacttactttactgtgtgttgattgggcacagtggctcccagcacgttgagagggcaaggcaggaggttcacttgaggccaggagtttgagagcagcctgggcaacctagcgagacactgtctctaccaaaaagcaaaaacaaattacaaatctttgtattagaagcagaaaaacacaggggacatggagaactcatcaccaaccctgccccaccccccattcctctcccctcccacatatacttctcactgcctgtccttggccttgaggttggtcctagggctggactgcccacacggtgactctcttttgtcctttttcagctttaaccggatcgacattccaccatatgagtcctatgagaagctctacgagaagctgctgacagccgtggaggagacctgcgggtttgctgtggagtgaaaagcaaccaaaggcaacagagtctagctcatggccaccagaccaaaagcatccagcttctgtgcacctcctgcaaagctggcagaggccctggaattccagatcacctgaggggaaagggttgtctctctcctttctgttgggggagggggatgggggacttttgttggtggctcccacccatatatccctcctttaccatagtactcccacccacttccatcacccatccaataaaatgcagccaggtttagcctttggctttggtcacacaggatattctgctgtggttgcaacccatgtggtgataaggctcacagccctgagctctttacgggagcatcaactcacagttaggggactgggcgtggctgattgagggtttggaactggtggctatgccagctattccatctcaaaacagccttgaggccccttttcaatttgagcagctgctagatatcttatcagagctcagattccagatttcacatcccagcagccggttctgggtagcagatcaatttccaactggaaaataactatataatgtatgcttattggaattctgccacagcaggaagcttgagtcaaaatgtgtttcccctttgaaaggagaaggaattggagcagcttttcctggaggcccaggatatttcttttctgggtatcttggctgaaaattttgttttacatagagaaaaacgatcttttaagggtcccttttgctgcattatctgtccaatttgacttttttttcagtgaaaacaccatgtcatggagtgtaggaaagagcagaccaaaatcagccctagagccaaccagtcagtcccaaagctgtgacctctgtgccactgttgtccatagaagagcatcgactgtgtcacttaaaatattagtaaaccatgatgcagcaactgctaagagctaaactaacaaaattgtgtcatcatagctgctggcttggtgtgaactcgcttaaaagcaatggtgaaaggataacctcgatgatgtaaatccacccaaagatactgttctacaaaaagtagggtgtggacgcaaacctgtgacagcagagggggacgacttcacactcactgcctcatgtggcccctttcccagtggcagctggtgacactaacgattgctactcggttcacttgcccagatgtcttcatatgatgagcaaggccagaagcaaggctagattcgaagtttctgacaccatttccagtttgcacaaaagtcagtattttatcttaaagtggcttgatttccaatagctgaacttgggcagaaaacagcaggccaatgttcctatgtggtttctttgttgttgtttttgtttggggtgggggcaagtacagggtaattcatgagcaagacatttcactgctgtcgaagtctctgggatcccgctgtgggtctgagatggcctgggaaggaccttgtggacaatggttttatctgttctttttgtcactgttaatttctgggctgctgaggttctagaatagaagggctgccaaatgaggtttgctgcaggaggaaagtttaatcccccattccaaaagtccaggccaaatggtgggcttagcctctttgaaaagttctgccttgcccccacaggtgggcacatcctgtgtctcattcaccatgatgcttcctgagggtgttctagaagcccgttccccagtggctgtatccagcctttccttgcatcatcttcctcttgaaggggaggaagtgaaaactacagacctcccccggacagcccactctctatcacgagcctaacccgcgggaggcggaagagacatccattcgagaactgaagcggcctccgggatgaggtcagaggccccacctgattttcctggtggtggtatccaaaatcttcagtaactaggaaggaaaccagggtctcatggtttaaaagactttgaagcaggaatgttgcatttgacgcctttaaaactacctttttgctgttgggaggagtcgggggcgagccttagcagctgcaccgccatccccatgctggttggtgctgccctgcctctcgtgccgggtgttgcttcagcccagagccagagggctgggtcccgggtcctccacaggtgaccccggtggacacacgcgttcccatcctggcctccgtctctgcttttccacttctacctgcgtgtgggtttgccgccttgtcatcggttgtgtgagtgtcgcagacctttccagagctccggttcactctttccaaacaggcctccctgtcggtggcactgcactcctagaaccttcagtttctacgatggtttgtttggtccttttgaaccaccccaaagaactcaacatggcaaagcaaatggtaaaagcttcccgactgttctactttgggtccgcgcgaagcccactcacgtgtgatttgtgttgcccctctcggtggtcccaggcgatccagccatgccccctgcccctctgcccagatgcttcaggggcccggcttttcaggcttgccctcaccagcggccgtcagccgacactcagggatgtagctaacaccactccgccagtgctttcagtaggaagagctgaggctgcctgggaggcccggggcgaccggaaaagggctctctcaagttctgaaaagagaatctgccaccagatcgaatttcgacccctgagcttgttcggacgtatggtccaaattcagattaaggtggtcacccaacccgagatgtcaggaaaggccttctgcagagaaaatgtccccccacccgccatctgcagccaggtgtgtgccacacggcagccttcccgaaacatagtatggattttaaaaatgtgtttatttttgtttctcaaccactttataacgtattttttaatttattttgtaatgtcttgttttgaagtattgctgctatccttgttatccttcccactgtttttatcactgatttattttgtgaaagttgtacactaatgttctatgtcaaaatcaaaagtatttaatgaaatactagttctatttaatgtggttatggaaccagctggaaacacaaaacaaacagtgattgtacagcaggctgggcccaggaggtcaggttcattttgttacatatgcaataaactcacgactttacattt

SEQ ID NO: 7002 - DNA, 2281 bp, Homo sapiens; identical to SEQ ID NO: 6977

SEQ ID NO: 7003 - DNA, 2715 bp, Homo sapiens
tagacctcctgcaaaggaaatggtcacactcttggttgaccttagcttagtgggtaagcccaatgagcaaagagaacaaaaacctgaggagtgttggaaaaggggaaactcatcttccaaagtattttgcttctatgagaaagggaatccattacataacattcttggtttctctctgctccctctttcacttctaccagacagaaggagtgaattttctgactagaaatttaaaggacaggaactagcatctgtgctttggtcccttcctcctttttttctttgggatttgcctgtctgcagagagaacacagcctgttctgctccaccattgtataaacatcagagtggaagggtctgccccatgcagttggatgactggagttgtccaacactgtctgactatgtatataaataagtgcctaatttgggggctcagtattaagaagcttgcttgcccacagcagtaagccatgttctgcaatatcttaattagcagtaaaggtgatatttcatctccatctgcttggccatttatcagctggctcttctagaaggtacacagcctcttagcaaatggtggatgtggccaggattaccatgaaaccaccttttggaaagttaccactaaatacactaagtccagtcagtcaggaggcagagtagacttgtttcacatagaactaaggctggacaaaataaagccagagagctgatagcttggatatcattgtgagctagttagacatagactttctgaaaaaccatcagtactagggtcttaacttgttgagtcccacaaacagccttgagaaagaattttagtgcttagtgcaggtcatttttttaagaggtaaacccggaatataccggttcaggaagtaggagagtgaaaaatgcaaaaacaaaaaacaaaaaccatgaaactgtatattaaggaagaagttgctggtatgggaactaggactcaacctcactgaggacctctgggagattgcacagaacactattcttacagttgccccacaacaccccccgccgccccctcactaccaccaccaaggggcaaaaaagctaggccattcacccactcccattggtcatgggttgagggctgttcccaggggcagtattaattccctggcacttccagcttgcctcacacattgatttagcatcctctgaaggtaggggaaggccctcacacaaagactgagaaactgttattgcaaaaaagaactggcagatcatgacagtaactgctacaaatctaggtgttgtgtcaccacagaagaaaacattttatgtaaggctcagtggtcctcacagcttttctatctcacttgacaatgaagatacaatcttacaaggtgtctagccaggaattttatcttcatcaagggtaaagagacgatgggaaacaggatcagagagatgaggacctgccaaaagaaaaaagcacaacaaagtgacatccaacaatataatatatgggaatttaaaatgagacaaagccaagtcctgagcttttttaatgaatggaggaaaagcaattctttgagaggatggagtagaacatgcactcagaacaagaataaatgttttaatgtcagtactttgctgaatgtatatgcagaattgacagactccatccatttccatcaagggcatcaaatttcaactattgtttgcttagtctgcaaaaatagccaccctgcatccttgaagcttaattcaactccttcagtaagttttagatgatgggtagttaaaggattaaactgctgcagttgaactcttatgccttataattgatatattgaaaggctaaagcatgttcgattcctgatgatagcaatctgcagtggcatcataagcacattaaattcagactgaaacattcagcgaagttaatattgacttcacaatgttctaagatgtaagtgaagctatgctctttttgccttataaaattagactgcaaaaaaacaatttttgaggatattcccagtcaattgacttggttacagagtgagcaggaaatcaaactctagttaagttcatagatactggtgttttattcatttggaaacagaagagaaaaagagtatgctgtagtaaattgtttataaattctttttaattctaaaggagggggagaaagtgaaagtaaaaagcaaacattattaatctcttactgtcacaaaaaaaacaacccactcttacacctccatcattgcctaaaagacaaaaactccaaagactggcatttgagactcctcacagtctgccaaaactgcctcctccctcgtcaggtcagtcaccaagtcctttcagttctatctccaaacacatctcagtccctgccaccatggtctgttatctgaactactataacagtttcctaactggcctccctccttcctctctggaccctccagtgtgttccttcgtaacagctagagtggatttttaaaagtcctcccatggagttggagaccagcctggccaacatggtgaaaccccgtctctaccaaaaataataaaattagctgggcatggtggtgcacacttgtaatcccagctacttgagaggcagaggtgggaggatcacttgaaccccggaggtggaggctgcagtgaattgagattgtgccactgcactccagcctgggtgacagagtgagactccatctcaaaaaaaaaaaaaaaaat

SEQ ID NO: 7004 - DNA, 273 bp, Homo sapiens
gagccagactgcactttgctgtgtgggatctagaaggtggcgtgctggaagctggtgctgagtgatacatggggacaaggtgggagtgagagagaccagcaaggcagtgaagagactggagagagactgaaggggtcagagaaagggcagagcattcagcatgggagaggcgaagaagactttgaggatattttgttgaacaaggcatggtgtgcaggtgacttccttaaaaacattcctctggaagcagaaaatagatgattaccaggggct

SEQ ID NO: 7005 - DNA, 445 bp, Homo sapiens
atgttttccagctgaaataagtgaaggaatgaaggggaaactattcttagaagctagccttcacaagccgaggcaattccaaagcccaaggcaacaacaggagccactgtggcaaagaactgggaagtgagcacacaggagagtgtggaaactatgccatcattatttagagcacaaactccctggatcaggggatgttgaagagagagggctcaaaaggaaaatacagaatggggaaaaaaagggtcaaaacagaccgcgcaactgggcttgccatcattgcctatttctcaacttggcaagaatgcaaatgtctcatatgtcaccctgagagaaatatctgtggattcttcctcgaggaatgataaaacatgttaacgtcttcaggaggattccccccaatcaggtttaagttcagagatcaaggagatcaggtaacacacag

SEQ ID NO: 7006 - DNA, 4753 bp, Homo sapiens
tgttacagactttggtaatttattaatacacttgtaaaatcttaatagcataagaataaaaattattagtgatcatgtaaatacatgaaacatttaaaaaataatccaaccaaatatgttacaactttgtttttatccaggtttccagtttatgcaaacttctgtgaaaatgagctttgttattggtgaagacattggaaattttaccagccaaaacagagtttctctcttattcagggtaagatgtaattgcagtgtgctagcgctggaagggacctgttttatatgttatgtatgttacacgtcagccctccatgtcctccagttctgcatccttggattcaaccaactgtgggttgaaaatactggaggtaaaaagacaaaaaataacaatgaagaacaacaacaaaaatacacagtataataattacatttacatagcatttattttgtattagacattataagtaatctagagatgatttaaagtatatgggagaatgtatgtagattatatggaaatatgagggtattttatttaaagggacttgggcctgtggataccaaggaataactaaggtaaaactgagcataagtggcctgtccatattttgttaaatatcagattattgattagtgatcatcaacattttcccgcattcatgcagtgcggcctctgaaaacatggttgaacatcctatggaatttttttttttttttgagatggagtctcactctgtcacctaggctagagtgcaatggcgcgatcttggcttactgcaacctccgcctgccccacctcgggttcaagtgattctcctgcctcagcctcctgagtacctgggactacaggcatgcaccaccacgcccggctaatttttgtatttttagacgagacagggtttcaccctgttggccaggctggtctcaaactcctaacctcaggtgatccaactgcctcggcctcccaaagtgctgggattacaggtatgagccaccgtgcccagcagaattttttaactatttggttacgactaatttggataatgtagtgcatgcagctttgatttgtgccactaagagtgggcaaactgtcttcctttttgtgaatcagtaaaaattttccctcaacatgtgtttgacagttgtcattcactgctaagttaaggcatttggtaaaccacacagcctctgcatccttcctagcgacagccacaagaaaaggtgggcatgggagggaaaatgctcttgtgaattgaactggaggcaagctccacttttctttagaaaaagatgtagatcaaaataactaatattttcttccttgctcgatttctgtgccttccatggtacatcaaaataataggaccagtaatggccacaatcctgttgactgctgttaccttcgccccaatatttctttaagcatttcttaagcatctagcttgtgttttgttatatttaacagattttcttaaagtattgtatgaattaaaaccagaaataacttcattttcctagaaagggataatttctcccggagaataaatcctgaggatttagttagatgctgtgggtattgtattttaaataatattttaatgggagcagctgattgactttcaaatggattgtttacattaatagtaattctgcagttgttttactattgcatcagtctgccagacaagttccatgtgcatattttaattcagaactaattatacttaaaaatttaaaccctgcatacttccccaaaaatgtttagggcagttaaaaacaactcttttggaagatgactcgcattttaagaaatgagagaacactgtcaaatgatgaatgcatttaaaaaataatttgcaaagtgataaaagcccttagttttaaatcttacaatgacattagctcttacaagaactcagtaagtatttgctgttttttaatgggatagtaataaggttgaggtttttgttaagggacgtttacttatcatcaaactctatacttactactacaaggaaactccaagtacattaaacactatgttttataattctttgccacactgccaataaattctgttcacattttaaggatgacaagtccactatatgtaacacgtaagaatgctatcctggcagtagacacagggccagaataaactggcaagttttcattccacacaagtgtgggaaaaaaatgactacaacttaaactttatttacttgattgagagcttattgcacatgaaatgttttatgtggttgatcttaacttcgtttacattgacttctatgctcaagattgttcaattgctgctgctgccgttgtgttttctttcaggatcgaggtgggtaccttcatataatatcttctttttaatttcttctctggcaattctttcctggattctttgctttgcataattatacctacaatgaaaccttagaagaaaagaatatgaataaattgttaatataaagtcctacagaaattaatttatgaaatttctctaaatcacacaaaacttaaatacagatgactactaccctgagactgaaaaatatgttctaatttatagtgctatttttgggcagttttggtgtcagaatacctatcaacacattctttttttattaggaaaaaaaggatgtctacataacaatttgtaaagtgataaaatccattagtttttaagtcttctgatagcattggctattataagaaacaagtatttgctctcgtttttaacgggataataatgctatgtctacataaaatgatttctaccaccttaaatagctcactgtagaaattcatgtataaatggaaccatatagtacatacatatcatactcttaggtctggcaaatatttgaggttcatccatattttatattcactcatcagtagttgtaaacacattcttaaagtagcattttcagatatgaataagcagggatgaaataagtattagggtaagggaaatggttgaggctttcctaagtgaagtgtaaaaaccacagctttctttttaatgggatgtctaatatgcatttatctgttcaagcattttaagatttccatgaaaatgtcctgaaaaatcaagattcttcattgagggtgaggatctcccaatgggagactgctctgaaaagagcatgtgctttttgaattagataacctactataatcatggatgttcttgaatacttagcaaacataccagcatcccaaagtcaccaagataaaccctcctactccaacatcacatgatcttctaattctacctgtaaaaataagcataacaattaattagaatataattacgttatatacattactccacctagaaaaaaaaatagttcattatgtagagaaatgctttttttagtacatagagaaataaaaaatacagatactcactagtgaacaaaaaatgtccaaagccagccacaacagatcctaatgaaccatacaatattgaatgccgggcgcagggagtattttcaacatctaaaaatcctaggagcttaagggactagaatgaaaaaaaagaacctagattgagtaagaaagtatttcattttggggtgctttggcaaaaatgacaatacaccatttcttttcttgtagttgagggtttaaactagagtatgtgccacgtgacaacctaaatcagcttgcgttgtctttgtccacctttggtatgcagtctgaatctttaaatccgaaaaccttacaaattggaccggaaaacccttaagcagtagggtaacttggagctgtatcttaatttgctaatcaactgacttggaaataggataattcattttatgagctctttaaatgagtttatttgggaatatgcctatcattggaattgaaagcagcatagcttgcttcagtaactccaataatttgggaagcagaaatggaaaaagtaatttgagtcatgtttgcttatgtagtgccgtttaaaattcccctagtaattacctttcatattttattaactaggttaacatcaactgtggttgtaagagtaaatgtttcaccttaagataaacatgggcaatatattaaactctagtctgttttcttgcctgtgaagtgaggctgcacttgattatatttgattctttgttcgtaatacatgggaacgacagctaagtgtggtgaaaaacgcggggatccaaagagctggatttttatctcagatctgccgctaacttttgtatcctataggctacttttatttctatggtctcaatctataacatgaatgggttgggttaaatgactgaagttccttcaagtgctaaaattctttttctacagtcttcattggatttatgtatttcttattcctaatatgtttaactgggatgtctgtcactctagggcggcaagacagacatttaaaagtaacagtcacactgctgaactggcatttctgttaacacaaaagtttagaaaactcacggtaactgttacttgatttaagtgtatataaaattttcagtaaggctgcttttaaaaggaaccactgtccatttaaaggtttcatagttatcttcaatgggttagtattgtttggggcaggacattaaactagaagggattctataggatgaggtgatacctagaaggtaatatattgtaaggcaaaagagattagaagaaatggggaaaggatagtaaaaggcaagtcagattaaaggttgaaacatgaagatattctcaattgtat

SEQ ID NO: 7007 - DNA, 13422 bp, Homo sapiens; identical to SEQ ID NO: 5357

SEQ ID NO: 7008 - DNA, 102 bp, Homo sapiens; identical to SEQ ID NO: 5358

SEQ ID NO: 7009 - DNA, 640 bp, Homo sapiens; identical to SEQ ID NO: 6036

SEQ ID NO: 7010 - DNA, 606 bp, Homo sapiens; identical to SEQ ID NO: 6037

SEQ ID NO: 7011 - DNA, 628 bp, Homo sapiens; identical to SEQ ID NO: 6038

SEQ ID NO: 7012 - DNA, 640 bp, Homo sapiens; identical to SEQ ID NO: 6036

SEQ ID NO: 7013 - DNA, 513 bp, Homo sapiens; identical to SEQ ID NO: 6040

SEQ ID NO: 7014 - DNA, 612 bp, Homo sapiens; identical to SEQ ID NO: 6041

SEQ ID NO: 7015 - DNA, 640 bp, Homo sapiens; identical to SEQ ID NO: 6036

SEQ ID NO: 7016 - DNA, 640 bp, Homo sapiens; identical to SEQ ID NO: 6036

SEQ ID NO: 7017 - DNA, 654 bp, Homo sapiens; identical to SEQ ID NO: 6044

SEQ ID NO: 7018 - DNA, 647 bp, Homo sapiens; identical to SEQ ID NO: 6045
  SITE (29): n equals a,t,g, or c

SEQ ID NO: 7019 - DNA, 640 bp, Homo sapiens; identical to SEQ ID NO: 6046

SEQ ID NO: 7020 - DNA, 640 bp, Homo sapiens; identical to SEQ ID NO: 6047

SEQ ID NO: 7021 - DNA, 571 bp, Homo sapiens; identical to SEQ ID NO: 6048

SEQ ID NO: 7022 - DNA, 640 bp, Homo sapiens; identical to SEQ ID NO: 6036

SEQ ID NO: 7023 - DNA, 639 bp, Homo sapiens; identical to SEQ ID NO: 6050
  SITE (88): n equals a,t,g, or c

SEQ ID NO: 7024 - DNA, 648 bp, Homo sapiens; identical to SEQ ID NO: 6051

SEQ ID NO: 7025 - DNA, 624 bp, Homo sapiens; identical to SEQ ID NO: 6052

SEQ ID NO: 7026 - DNA, 509 bp, Homo sapiens; identical to SEQ ID NO: 6053

SEQ ID NO: 7027 - DNA, 654 bp, Homo sapiens; identical to SEQ ID NO: 6054

SEQ ID NO: 7028 - DNA, 546 bp, Homo sapiens; identical to SEQ ID NO: 6055
  SITE (20): n equals a,t,g, or c

SEQ ID NO: 7029 - DNA, 654 bp, Homo sapiens; identical to SEQ ID NO: 6044

SEQ ID NO: 7030 - DNA, 5505 bp, Homo sapiens
ttttttttttttgagacggagtctttctccattgcccaggctagagtgcagtgacacgatctcggctcactgcaacccctgcctcctggcttcaagtgattcttctgcctcagcctcctgagtagctgggattacaggcgcgtaccaccatgcccagctaatttttgtatttttggtagagacgggctttcaccatattggccaggctgatctcgaacttctgaccttgtgatctacctgcctcggcctcccaaagtgctgggattacaggcatgagccaccgcgcccggccttatcatattatttttaggcctttaggttgattttgattgttactttcacgtataccctctgggccccattttttctctgtttgagacataaaacatattttattttctaattagatcagagtctgtagaaggcttcttatctccaagtcgttgtggcagtcgaaatggagaaaaagactgggagaatgcatcaacaacttcttcagtggcttctggaacagaatatacaggttagtgtctatacatttttagagaaacatttgaatttaacacactcataaatggagggtgtactaaagaaaattttattggctcacctttgggtcttaaacataggcaactaataaacagtgaatgcaggtggtcactttcaggtagttcagtaagtttctaaacaaaattagtgatgctacttatatctcatccctctaaccaatgctggccatttctgtgtgtagtttgggtccgaagaagttttagagaagttctacatagttcctcagtactgagtaaaggctagaatccaccaagtcctctccctaatactgggattccaggtatccagaattgtgcacctttagcaagtattaagaggctctaaaagataagaatgcattgaatctaggaaggtatctagcctcacatatcgccaccaagtcctcttctagcttctaggtaggcatgattggaataaaagcaatgaagaatagaatgtgggttaaggacacttctaaataaatgaagcaggagagaaatcagaagaaatgtcagcagcacgttgagaggtaagataggaaggcatgggagaacatgtatggggaagagcagagggaaaaggagatgcctccatctatccatgatagagtggaagtggaaaccctagaaaggcctaaggaggttagaacttgctagagacccactctgtggcttttaatactacctcctaccgccagtctgacagcctttaaggcctgggatttgacagtatttccatgttactcactctgcttctctatgttagttcagttgaacaatctgaaaaagaaagcttttttttgccttttgaaaagacttaaattactcatggacccattctactctaagctaaccagtaaccgtatagatttaagaaagaaggttaaataggcagtatgacagttatagcaatattttatttttagtactgctctcacagggtactccaaaaggccataggaacatcctccatatctctgggtggataaaacaatgttttggttggattgcagccagtaagaggcctttaagcacagaatttggtcttctattacaatatttcagcagtgtaggaacaattacatcattttaaaatagtagtatttctgacttaggaatgttatttttattattgttgttaaatccctaccataggaccaaagctctacaaagaacccagtgcaaaatccaataagcacataatacaaaatgctttagctcattgctgtttggctggaaaagtaaatgaaggtcagaagaaaaaaatactggaggtaagcatgtttgcatgaaaattaaatttggcaaactgtagaagtcttttatccattcaagagaatgtactctcatgggcctagactttcaacagcatgtaaaaagatctgtagctagatgttttaattatcagatttagtttattttcacattaggttctggaagcctgcagattttattaaagactagcaataggctttaagatttgtcattgaaataatgttataaaatgtgactaagaaacgtaacataattatataaactttattcagcaaaataaagggtttttattcgtgttgttatgttgtttttgttttttattttaaaggaaatggagaaatcagatgccaacaacttcttaatcttgttccgggattcaggatgccagttcagatctttatacacttattgcccagaaactgaagaaatcaataaactgactgggataggccctaaatctatcactaaaaaaatgattgaaggactttacaaatataattctgacaggaaacagtttagccacatacccgctaaaactttatctgccagtgttgatgcaattaccattcatagccatttatggcagaccaaaagaccagtaacacccaaaaaacttttacccactaaggcatagaagttgggaaatacttgcttcagaacattcatggtaaatttgcacttcatctttcctgcctatagaaaatctttctaattgccaacaagacttttattaattaaaactggacattaagctctgttgtcatgaacaactggaatgtaaaccacagtattttggagtgcagaacattctcaattaagtgataagtccaaatgatgaaggaaatgttttaattcacaaatggagatttgtatgtgttatcaggttcacctgcttgatattagatacattaaagcactgaattttcatggatattagttggatttatcattgaaatatggttaagattacaaattatgtgttttatttgttgcttttttttaaccttttaatgtatattcttgtcttcagatggtttgctatttttctctcctgggggtttattctaagatacctttgtattttatttcatgtggagatcatgaaagtaggaaatatacctttagaagtaactcgcacctttcttatgatgttaagagaaacactagtgtttagttttacagtaaccctcatattttaatggtgttacagcatttgcaaaaattattctgctaagtatttacaactctatttattattcactcaagtattaacattctctattaaataagaggaggtgttgtaaagagctgctagtaggttcgctttaaaccacatgagcttaaccaagaatatgttatgagaagttgctgattaaatcagtgctgtttttacaccacttctggccaactcagaataatttagattgttcttttaacaaaaaaggctttctatctcttttaaagtaagtcactttataagttggcagaagtgaatgacactttgagagtagtctttcaatctgaagatgtaagacttcctgaaacaagttctcaagaagtctttacattatatttataactcatataaaaattatatttagaatttttaaacatgtacaaagggctacattttaattttaaaatagcttcacattattttacttatagtgggtttttcttcattttaatccttttcaagtggaatggcttagaataagtatacacttgaaatctcctctacatgatctttgttctttaacagtgtataccagagggttagttggggaaaaacttcattctcaggaaaagacttgaatgattatgtgaccctgttatatttcagtgttgtgacaaatgtgtaaactagcgggggaagacagtattgtatcataaatgagatgcgtagtttgttttctttcatgggaagtagagataaaaatatatacatttctctaattgagttgtttagagaaagaactaatgtctcatatgatgtatttacttattttaaaaaaaagaataggaatgagatgtccctgagctgtacttttctattattataaggcctttaggcatcagtgcatctgggttatcaacattttctcaaatgctgtcaatattttactgtaatttatgttcttatatttatgtatatttgttaaaactgtaaaaaaatttcacagatttttttccaatacctgtgcaagatacatgtgtagctcaaaactatttgtgatctactgtttgcatgtaagagaccaggatatgtaactcttatattttaagtgtatacatattgtgtatataacatatggatattaaaaatggggaattgcacattttaccttttggacagtaatttctatcacagttagaaggaaatgatagtcaaatacacgtttagattaaaactagtttaaaaaattataaatgaatctaatcaaaatgtgaatagtagtcaaaaggataatttaataagcattttacgttactaaatttgttcatttcaatattaactaaatttccctcatcaaagcaatctttgtgatattacttcgctattaaataaagaaaattggatgcaagacaatggagaaactttaaaactaaacaggaccaccctttattcttaaatttgtgtgtgtccaacagttgaattgaatgtctataaggtctaaaggtagaatgtgaatattgccacagagttcattgctctcagtataagattttactttattaatgcagaaggaatatggatatatttctttaagtctgcagatttttttattatggtgcagcttttttttaattatgtttttaaaattatacagttgaaaaatatgccatttcataaagtctgaggattttcgtcaaccttactgaaacacactggtgctttcatcatcagaggtcaaattattatgataactattccattaagtttgccaaacatttgtcgtggttaccagtgcagcctgtcaaattctgctatttgacacagctttggaaagatttagttcttggtttttccgttttgtattagaatgactgttacagttttatttggctgtttaaagccaaattcagctatttaattatggtttcatggacactgttgagcaatgtacagtgtatggtgtgcttacctgtccactctagagcattgcttacaggttttttgttttttaagatgctgtgctgtaaaatactgtcatacttgctatttcctggtacagtgtagtttttcccctttcatttgaataaaagcatggcaccaaatgactccttttctgtttcttgaataaaatgtagtttttggtaaaattatttgaacttgagataactcatacagtttttctatcccctaacctatgtttaaatttaataacttgaatattcataacaggcaacttgaaataattagccttttaaaaatactaacttagggcaatgttaaaaagtcggtaactttctatgcttagcacagacggtctacatagtatgatttataaatgtgcttatcttatgttaatcttgctcatactaattcactatcttttggtgaattgatagttatattgtaccagaactagtgctctatgtctttgaaactgaatggccagtgaactcactgatctggagtagccatgagaagctagttcttgaccattattttgtaagt

SEQ ID NO: 7031 - DNA, 8573 bp, Homo sapiens
ttcttaggatgatcaaaaagcagaaaatgatatggcaatgaaacgggcagctttgttggagaaaagattaagaagggaaaaggaaactcagctccggaaacaacagttggaagcagaaatggagcataagaaggaggaaacaaggtaaaggaaattgctggcccagtgctagatctgaactttaatgatgcatgggcatatttagaaaaagttggtaagtactcaaagaggtggtctctcattaatttttattaacagatttctttcagagaagtttgtagtatagatagacagctggatcaatgctattttttggtgctttgtagaaatcaatttattttcccaaagtattgcctaattttatatttttatcttaagtttaaggcatctcatgggaaagttctctagaaacattaatttaaataattatatgtttaaaaaacattaaaataactttcctgggagatacacacacacacacacacacacacacacacgacctaaattatctcaaatacctttatttttatttatttatttgactcttccttccctcctttatttacttatttatgcttaatcccatgtctcagcagaatcgtcaagtaccttttaaatgaaccatttattcaccaaggtgatgaaatagaattctcctttctcatatcaaatacataactctctcctgtatggtttgtctttggtatgcagaataagaactgtaaccatttgatttcttaggcgtaaaactgaggaagaacgtcagaagaaagaagatgagagagcacgcagagaatttattaggcaagaatatatgaggcggaaacaactgaaactaatggaagatatggatacagtaattaaaccccgtcctcaagtagtaaaacaaaaaaaacagcgaccaaaatctattcacagagatcatattgaatcccccaaaacaccaataaagggtcctccaggtaacatagcttattatgaagagtctgttcataaaaaacaccagcttgattggtttgtcatactaacttggttgtactttgatgtgcaaaattggatacacagtttgagattgtgcatgctcccttttggaaaaccaaaatgagcaaatgaagtttttaataaattaaatgtattatgtgtgcatgcatatattcagtagaacaaatgtgaatgctaaaaatcaaatctaaatattaatctattagggaactgtgccctcagatataatctccttgaactattaactgccctttacatacttataaatttaaataaatgttatatgcatgaaatgtacaagaaacatgttggtataataaggaatgcaagatcaagagttcacaagtccctccttcaagatagaaatggttgaaaatccaaacttataatatctggagttgagagaatatattttctttaaaagtcagtatacatactcattattactattattattttttgaaacggggtctcagtctgttgcccaggctagagtgcagtggtgtgatcatggctcactgcagcctccacctccctgggttcaggtgatcctcccacctcagcctcctgggtagttgggactacaggtgagtgccaccatacccagctaacttttttgtattttttgtacagatggggtttcttcatgttgttcaggctggtctcgaactcttgggctcaagtaatctgcctgccttggcctcccaaagtgttaggattacaggtgtgagtcactgcgcctggccatactcttatttttaaaaaaatcttggggggcagggataaattcgtaaaaataaaagaaatctttattaaaaccaaatgccatggaaattttttagagaattctcatagttatactaaacctgaggaaaaataacataatattgactgtttaaagagaactctgttttcaagcctgtaaaactaattgatataattttctacctagaatttagatattatgaaatttttttttgttatgtttttttctttaggatcacagtatcacgtctcatattaacactttccttttggaacgcaagttagttttatcattgtttcctaaaagtaggttccttgctaattttaaataaattgtgtatatatgcatgcaagcatattatgtgtttaaaagtacagagaaaaggaaaagaaactacagaagctcaatttttatatgctggtgttatctaatgaacagactctttgctagttgctccttttaaatttctgattttgtttttattcaggatcatgaatttatcgtgttttttcagtctctagcctttctttggcatcgctgaacacgggtgataacgagagtgtacattcaggcaagaggacgccaaggtaaatctataacgtatgaatatttttacagaaaagaatatagtacctgcaattatacaaactctaagtaaaaattcttcagtgtttttacattttataatgaccaaatcataatcacaaattttactaagttttgctgacttaggactgttagagtttctgttaaaataaattatgtaaagaggtgtctattcatctttcagtgcttgtcttttagaatttagaattattgacattgataacatactttttataagctatgaaacattaacagtaattatacatcagtaattgctaacatgattattaaatcacagtcagtagaatgagagtaccaacttctctagtctattaccaactaagacaaaggagttttccccattagaataattccaaagtgggttgcctatgacttaggaaggatctcttttgtattttctttctctaggattctttctctagattagaagctaaaagtcagtattttattactttatactataatatcatatcagaaaagaacatttctagtgacagtcatcatcttagagttcttatctttgtattaccatcctttgtgttatttgccagttttcacattgaaaaacattcactctttcaacagatatttatagaatgcttactatgttctaggaacttggatgtgtagctgcgaataagacaaacaatgttatattattttttattattaattttttttttttgagacggagtctttctccattgcccaggctagagtgcagtgacacgatctcggctcactgcaacccctgcctcctggcttcaagtgattcttctgcctcagcctcctgagtagctgggattacaggcgcgtaccaccatgcccagctaatttttgtatttttggtagagacgggctttcaccatattggccaggctgatctcgaacttctgaccttgtgatctacctgcctcggcctcccaaagtgctgggattacaggcatgagccaccgcgcccggccttatcatattatttttaggcctttaggttgattttgattgttactttcacgtataccctctgggccccattttttctctgtttgagacataaaacatattttattttctaattagatcagagtctgtagaaggcttcttatctccaagtcgttgtggcagtcgaaatggagaaaaagactgggagaatgcatcaacaacttcttcagtggcttctggaacagaatatacaggttagtgtctatacatttttagagaaacatttgaatttaacacactcataaatggagggtgtactaaagaaaattttattggctcacctttgggtcttaaacataggcaactaataaacagtgaatgcaggtggtcactttcaggtagttcagtaagtttctaaacaaaattagtgatgctacttatatctcatccctctaaccaatgctggccatttctgtgtgtagtttgggtccgaagaagttttagagaagttctacatagttcctcagtactgagtaaaggctagaatccaccaagtcctctccctaatactgggattccaggtatccagaattgtgcacctttagcaagtattaagaggctctaaaagataagaatgcattgaatctaggaaggtatctagcctcacatatcgccaccaagtcctcttctagcttctaggtaggcatgattggaataaaagcaatgaagaatagaatgtgggttaaggacacttctaaataaatgaagcaggagagaaatcagaagaaatgtcagcagcacgttgagaggtaagataggaaggcatgggagaacatgtatggggaagagcagagggaaaaggagatgcctccatctatccatgatagagtggaagtggaaaccctagaaaggcctaaggaggttagaacttgctagagacccactctgtggcttttaatactacctcctaccgccagtctgacagcctttaaggcctgggatttgacagtatttccatgttactcactctgcttctctatgttagttcagttgaacaatctgaaaaagaaagcttttttttgccttttgaaaagacttaaattactcatggacccattctactctaagctaaccagtaaccgtatagatttaagaaagaaggttaaataggcagtatgacagttatagcaatattttatttttagtactgctctcacagggtactccaaaaggccataggaacatcctccatatctctgggtggataaaacaatgttttggttggattgcagccagtaagaggcctttaagcacagaatttggtcttctattacaatatttcagcagtgtaggaacaattacatcattttaaaatagtagtatttctgacttaggaatgttatttttattattgttgttaaatccctaccataggaccaaagctctacaaagaacccagtgcaaaatccaataagcacataatacaaaatgctttagctcattgctgtttggctggaaaagtaaatgaaggtcagaagaaaaaaatactggaggtaagcatgtttgcatgaaaattaaatttggcaaactgtagaagtcttttatccattcaagagaatgtactctcatgggcctagactttcaacagcatgtaaaaagatctgtagctagatgttttaattatcagatttagtttattttcacattaggttctggaagcctgcagattttattaaagactagcaataggctttaagatttgtcattgaaataatgttataaaatgtgactaagaaacgtaacataattatataaactttattcagcaaaataaagggtttttattcgtgttgttatgttgtttttgttttttattttaaaggaaatggagaaatcagatgccaacaacttcttaatcttgttccgggattcaggatgccagttcagatctttatacacttattgcccagaaactgaagaaatcaataaactgactgggataggccctaaatctatcactaaaaaaatgattgaaggactttacaaatataattctgacaggaaacagtttagccacatacccgctaaaactttatctgccagtgttgatgcaattaccattcatagccatttatggcagaccaaaagaccagtaacacccaaaaaacttttacccactaaggcatagaagttgggaaatacttgcttcagaacattcatggtaaatttgcacttcatctttcctgcctatagaaaatctttctaattgccaacaagacttttattaattaaaactggacattaagctctgttgtcatgaacaactggaatgtaaaccacagtattttggagtgcagaacattctcaattaagtgataagtccaaatgatgaaggaaatgttttaattcacaaatggagatttgtatgtgttatcaggttcacctgcttgatattagatacattaaagcactgaattttcatggatattagttggatttatcattgaaatatggttaagattacaaattatgtgttttatttgttgcttttttttaaccttttaatgtatattcttgtcttcagatggtttgctatttttctctcctgggggtttattctaagatacctttgtattttatttcatgtggagatcatgaaagtaggaaatatacctttagaagtaactcgcacctttcttatgatgttaagagaaacactagtgtttagttttacagtaaccctcatattttaatggtgttacagcatttgcaaaaattattctgctaagtatttacaactctatttattattcactcaagtattaacattctctattaaataagaggaggtgttgtaaagagctgctagtaggttcgctttaaaccacatgagcttaaccaagaatatgttatgagaagttgctgattaaatcagtgctgtttttacaccacttctggccaactcagaataatttagattgttcttttaacaaaaaaggctttctatctcttttaaagtaagtcactttataagttggcagaagtgaatgacactttgagagtagtctttcaatctgaagatgtaagacttcctgaaacaagttctcaagaagtctttacattatatttataactcatataaaaattatatttagaatttttaaacatgtacaaagggctacattttaattttaaaatagcttcacattattttacttatattgggtttttcttcattttaatccttttcaagtggaatggcttagaataagtatacacttgaaatctcctctacatgatctttgttctttaacagtgtataccagagggttagttggggaaaaacttcattctcaggaaaagacttgaatgattatgtgaccctgttatatttcagtgttgtgacaaatgtgtaaactagcgggggaagacagtattgtatcataaatgagatgcgtagtttgttttctttcatgggaagtagagataaaaatatatacatttctctaattgagttgtttagagaaagaactaatgtctcatatgatgtatttacttattttaaaaaaaagaataggaatgagatgtccctgagctgtacttttctattattataaggcctttaggcatcagtgcatctgggttatcaacattttctcaaatgctgtcaatattttactgtaatttatgttcttatatttatgtatatttgttaaaactgtaaaaaaatttcacagatttttttccaatacctgtgcaagatacatgtgtagctcaaaactatttgtgatctactgtttgcatgtaagagaccaggatatgtaactcttatattttaagtgtatacatattgtgtatataacatatggatattaaaaatggggaattgcacattttaccttttggacagtaatttctatcacagttagaaggaaatgatagtcaaatacacgtttagattaaaactagtttaaaaaattataaatgaatctaatcaaaatgtgaatagtagtcaaaaggataatttaataagcattttacgttactaaatttgttcatttcaatattaactaaatttccctcatcaaagcaatctttgtgatattacttcgctattaaataaagaaaattggatgcaagacaatggagaaactttaaaactaaacaggaccaccctttattcttaaatttgtgtgtgtccaacagttgaattgaatgtctataaggtctaaaggtagaatgtgaatattgccacagagttcattgctctcagtataagattttactttattaatgcagaaggaatatggatatatttctttaagtctgcagatttttttattatggtgcagcttttttttaattatgtttttaaaattatacagttgaaaaatatgccatttcataaagtctgaggattttcgtcaaccttactgaaacacactggtgctttcatcatcagaggtcaaattattatgataactattccattaagtttgccaaacatttgtcgtggttaccagtgcagcctgtcaaattctgctatttgacacagctttggaaagatttagttcttggtttttccgttttgtattagaatgactgttacagttttatttggctgtttaaagccaaattcagctatttaattatggtttcatggacactgttgagcaatgtacagtgtatggtgtgcttacctgtccactctagagcattgcttacaggttttttgttttttaagatgctgtgctgtaaaatactgtcatacttgctatttcctggtacagtgtagtttttcccctttcatttgaataaaagcatggcaccaaatgactccttttctgtttcttgaataaaatgtagtttttggtaaaattatttgaacttgagataactcatacagtttttctatcccctaacctatgtttaaatttaataacttgaatattcataacaggcaacttgaaataattagccttttaaaaatactaacttagggcaatgttaaaaagtcggtaactttctatgcttagcacagacggtctacatagtatgatttataaatgtgcttatcttatgttaatcttgctcatactaattcactatcttttggtgaattgatagttatattgtaccagaactagtgctctatgtctttgaaactgaatggccagtgaactcactgatctggagtagccatgagaagctagttcttgaccattattttgtaagt

SEQ ID NO: 7032 - DNA, 8224 bp, Homo sapiens
ttcttaggatgatcaaaaagcagaaaatgatatggcaatgaaacgggcagctttgttggagaaaagattaagaagggaaaaggaaactcagctccggaaacaacagttggaagcagaaatggagcataagaaggaggaaacaaggtaaaggaaattgctggcccagtgctagatctgaactttaatgatgcatgggcatatttagaaaaagttggtaagtactcaaagaggtggtctctcattaatttttattaacagatttctttcagagaagtttgtagtatagatagacagctggatcaatgctattttttggtgctttgtagaaatcaatttattttcccaaagtattgcctaattttatatttttatcttaagtttaaggcatctcatgggaaagttctctagaaacattaatttaaataattatatgtttaaaaaacattaaaataactttcctgggagatacacacacacacacacacacacacacacacgacctaaattatctcaaatacctttatttttatttatttatttgactcttccttccctcctttatttacttatttatgcttaatcccatgtctcagcagaatcgtcaagtaccttttaaatgaaccatttattcaccaaggtgatgaaatagaattctcctttctcatatcaaatacataactctctcctgtatggtttgtctttggtatgcagaataagaactgtaaccatttgatttcttaggcgtaaaactgaggaagaacgtcagaagaaagaagatgagagagcacgcagagaatttattaggcaagaatatatgaggcggaaacaactgaaactaatggaagatatggatacagtaattaaaccccgtcctcaagtagtaaaacaaaaaaaacagcgaccaaaatctattcacagagatcatattgaatcccccaaaacaccaataaagggtcctccaggtaacatagcttattatgaagagtctgttcataaaaaacaccagcttgattggtttgtcatactaacttggttgtactttgatgtgcaaaattggatacacagtttgagattgtgcatgctcccttttggaaaaccaaaatgagcaaatgaagtttttaataaattaaatgtattatgtgtgcatgcatatattcagtagaacaaatgtgaatgctaaaaatcaaatctaaatattaatctattagggaactgtgccctcagatataatctccttgaactattaactgccctttacatacttataaatttaaataaatgttatatgcatgaaatgtacaagaaacatgttggtataataaggaatgcaagatcaagagttcacaagtccctccttcaagatagaaatggttgaaaatccaaacttataatatctggagttgagagaatatattttctttaaaagtcagtatacatactcattattactattattattttttgaaacggggtctcagtctgttgcccaggctagagtgcagtggtgtgatcatggctcactgcagcctccacctccctgggttcaggtgatcctcccacctcagcctcctgggtagttgggactacaggtgagtgccaccatacccagctaacttttttgtattttttgtacagatggggtttcttcatgttgttcaggctggtctcgaactcttgggctcaagtaatctgcctgccttggcctcccaaagtgttaggattacaggtgtgagtcactgcgcctggccatactcttatttttaaaaaaatcttggggggcagggataaattcgtaaaaataaaagaaatctttattaaaaccaaatgccatggaaattttttagagaattctcatagttatactaaacctgaggaaaaataacataatattgactgtttaaagagaactctgttttcaagcctgtaaaactaattgatataattttctacctagaatttagatattatgaaatttttttttgttattgtttttttctttaggatcacagtatcacgtctcatattaacactttccttttggaacgcaagttagttttatcattgtttcctaaaagtaggttccttgctaattttaaataaattgtgtatatatgcatgcaagcatattatgtgtttaaaagtacagagaaaaggaaaagaaactacagaagctcaatttttatatgctggtgttatctaatgaacagactctttgctagttgctccttttaaatttctgattttgtttttattcaggatcatgaatttatcgtgttttttcagtctctagcctttctttggcatcgctgaacacgggtgataacgagagtgtacattcaggcaagaggacgccaaggtaaatctataacgtatgaatatttttacagaaaagaatatagtacctgcaattatacaaactctaagtaaaaattcttcagtgtttttacattttataatgaccaaatcataatcacaaattttactaagttttgctgacttaggactgttagagtttctgttaaaataaattatgtaaagaggtgtctattcatctttcagtgcttgtcttttagaatttagaattattgacattgataacatactttttataagctatgaaacattaacagtaattatacatcagtaattgctaacatgattattaaatcacagtcagtagaatgagagtaccaacttctctagtctattaccaactaagacaaaggagttttccccattagaataattccaaagtgggttgcctatgacttaggaaggatctcttttgtattttctttctctaggattctttctctagattagaagctaaaagtcagtattttattactttatactataatatcatatcagaaaagaacatttctagtgacagtcatcatcttagagttcttatctttgtattaccatcctttgtgttatttgccagttttcacattgaaaaacattcactctttcaacagatatttatagaatgcttactatgttctaggaacttggatgtgtagctgcgaataagacaaacaatgttatattattttttattattaattttttttttttgagacggagtctttctccattgcccaggctagagtgcagtgacacgatctcggctcactgcaacccctgcctcctggcttcaagtgattcttctgcctcagcctcctgagtagctgggattacaggcgcgtaccaccatgcccagctaatttttgtatttttggtagagacgggctttcaccatattggccaggctgatctcgaacttctgaccttgtgatctacctgcctcggcctcccaaagtgctgggattacaggcatgagccaccgcgcccggccttatcatattatttttaggcctttaggttgattttgattgttactttcacgtataccctctgggccccattttttctctgtttgagacataaaacatattttattttctaattagatcagagtctgtagaaggcttcttatctccaagtcgttgtggcagtcgaaatggagaaaaagactgggagaatgcatcaacaacttcttcagtggcttctggaacagaatatacaggttagtgtctatacatttttagagaaacatttgaatttaacacactcataaatggagggtgtactaaagaaaattttattggctcacctttgggtcttaaacataggcaactaataaacagtgaatgcaggtggtcactttcaggtagttcagtaagtttctaaacaaaattagtgatgctacttatatctcatccctctaaccaatgctggccatttctgtgtgtagtttgggtccgaagaagttttagagaagttctacatagttcctcagtactgagtaaaggctagaatccaccaagtcctctccctaatactgggattccaggtatccagaattgtgcacctttagcaagtattaagaggctctaaaagataagaatgcattgaatctaggaaggtatctagcctcacatatcgccaccaagtcctcttctagcttctaggtaggcatgattggaataaaagcaatgaagaatagaatgtgggttaaggacacttctaaataaatgaagcaggagagaaatcagaagaaatgtcagcagcacgttgagaggtaagataggaaggcatgggagaacatgtatggggaagagcagagggaaaaggagatgcctccatctatccatgatagagtggaagtggaaaccctagaaaggcctaaggaggttagaacttgctagagacccactctgtggcttttaatactacctcctaccgccagtctgacagcctttaaggcctgggatttgacagtatttccatgttactcactctgcttctctatgttagttcagttgaacaatctgaaaaagaaagcttttttttgccttttgaaaagacttaaattactcatggacccattctactctaagctaaccagtaaccgtatagatttaagaaagaaggttaaataggcagtatgacagttatagcaatattttatttttagtactgctctcacagggtactccaaaaggccataggaacatcctccatatctctgggtggataaaacaatgttttggttggattgcagccagtaagaggcctttaagcacagaatttggtcttctattacaatatttcagcagtgtaggaacaattacatcattttaaaatagtagtatttctgacttaggaatgttatttttattattgttgttaaatccctaccataggaccaaagctctacaaagaacccagtgcaaaatccaataagcacataatacaaaatgctttagctcattgctgtttggctggaaaagtaaatgaaggtcagaagaaaaaaatactggaggtaagcatgtttgcatgaaaattaaatttggcaaactgtagaagtcttttatccattcaagagaatgtactctcatgggcctagactttcaacagcatgtaaaaagatctgtagctagatgttttaattatcagatttagtttattttcacattaggttctggaagcctgcagattttattaaagactagcaataggctttaagatttgtcattgaaataatgttataaaatgtgactaagaaacgtaacataattatataaactttattcagcaaaataaagggtttttattcgtgttgttatgttgtttttgttttttattttaaaggaaatggagaaatcagatgccaacaacttcttaatcttgttccgggattcaggatgccagttcagatctttatacacttattgcccagaaactgaagaaatcaataaactgactgggataggccctaaatctatcactaaaaaaatgattgaaggactttacaaatataattctgacaggaaacagtttagccacatacccgctaaaactttatctgccagtgttgatgcaattaccattcatagccatttatggcagaccaaaagaccagtaacacccaaaaaacttttacccactaaggcatagaagttgggaaatacttgcttcagaacattcatggtaaatttgcacttcatctttcctgcctatagaaaatctttctaattgccaacaagacttttattaattaaaactggacattaagctctgttgtcatgaacaactggaatgtaaaccacagtattttggagtgcagaacattctcaattaagtgataagtccaaatgatgaaggaaatgttttaattcacaaatggagatttgtatgtgttatcaggttcacctgcttgatattagatacattaaagcactgaattttcatggatattagttggatttatcattgaaatatggttaagattacaaattatgtgttttatttgttgcttttttttaaccttttaatgtatattcttgtcttcagatggtttgctatttttctctcctgggggtttattctaagatacctttgtattttatttcatgtggagatcatgaaagtaggaaatatacctttagaagtaactcgcacctttcttatgatgttaagagaaacactagtgtttagttttacagtaaccctcatattttaatggtgttacagcatttgcaaaaattattctgctaagtatttacaactctatttattattcactcaagtattaacattctctattaaataagaggaggtgttgtaaagagctgctagtaggttcgctttaaaccacatgagcttaaccaagaatatgttatgagaagttgctgattaaatcagtgctgtttttacaccacttctggccaactcagaataatttagattgttcttttaacaaaaaaggctttctatctcttttaaagtaagtcactttataagttggcagaagtgaatgacactttgagagtagtctttcaatctgaagatgtaagacttcctgaaacaagttctcaagaagtctttacattatatttataactcatataaaaattatatttagaatttttaaacatgtacaaagggctacattttaattttaaaatagcttcacattattttacttatattgggtttttcttcattttaatccttttcaagtggaatggcttagaataagtatacacttgaaatctcctctacatgatctttgttctttaacagtgtataccagagggttagttggggaaaaacttcattctcaggaaaagacttgaatgattatgtgaccctgttatatttcagtgttgtgacaaatgtgtaaactagcgggggaagacagtattgtatcataaatgagatgcgtagtttgttttctttcatgggaagtagagataaaaatatatacatttctctaattgagttgtttagagaaagaactaatgtctcatatgatgtatttacttattttaaaaaaaagaataggaatgagatgtccctgagctgtacttttctattattataaggcctttaggcatcagtgcatctgggttatcaacattttctcaaatgctgtcaatattttactgtaatttatgttcttatatttatgtatatttgttaaaactgtaaaaaaatttcacagatttttttccaatacctgtgcaagatacatgtgtagctcaaaactatttgtgatctactgtttgcatgtaagagaccaggatatgtaactcttatattttaagtgtatacatattgtgtatataacatatggatattaaaaatggggaattgcacattttaccttttggacagtaatttctatcacagttagaaggaaatgatagtcaaatacacgtttagattaaaactagtttaaaaaattataaatgaatctaatcaaaatgtgaatagtagtcaaaaggataatttaataagcattttacgttactaaatttgttcatttcaatattaactaaatttccctcatcaaagcaatctttgtgatattacttcgctattaaataaagaaaattggatgcaagacaatggagaaactttaaaactaaacaggaccaccctttattcttaaatttgtgtgtgtccaacagttgaattgaatgtctataaggtctaaaggtagaatgtgaatattgccacagagttcattgctctcagtataagattttactttattaatgcagaaggaatatggatatatttctttaagtctgcagatttttttattatggtgcagcttttttttaattatgtttttaaaattatacagttgaaaaatatgccatttcataaagtctgaggattttcgtcaaccttactgaaacacactggtgctttcatcatcagaggtcaaattattatgataactattccattaagtttgccaaacatttgtcgtggttaccagtgcagcctgtcaaattctgctatttgacacagctttggaaagatttagttcttggtttttccgttttgtattagaatgactgttacagttttatttggctgtttaaagccaaattcagctatttaattatggtttcatggacactgttgagcaatgtacagtgtatggtgtgcttacctgtccactctagagcattgcttacaggttttttgttttttaagatgctgtgctgtaaaatactgtcatacttgctatttcctggtacagtgtagtttttcccctttcatttgaataaaagcatggcaccaaatgactccttttctgtttcttgaataaaatgtagtttttggtaaaattatttga

SEQ ID NO: 7033 - DNA, 3034 bp, Homo sapiens
ccgggcgcggtggctcacgcctgtaatcccagcactttgggaggccgaagtgggcggatcacgaggtcaggggatcgagaccatcctggctaacatggtgaaaccccgtctctactaaaaatacaaaaaaaattagccaggcctggtagcgggcacctgtagtcacagctacttgggaggctgagacaggagaatggcatgaacccgggaggcagagcttgcagtgagccgagattgcaccactgcactccagcctgggcgacagagcgagactccgtctcaaaaaaaaaaaaaaaaaaaaccctaagacccaggcaacattagaaaaatgtacacaatgccaggtatggtggtggctcatgcctataatcccagcacttcgggaggccaaggcaggcagatcacttgaggtcaggagttttgagaccagcctggccaacacggcgaaaccctgtctctactaaaaaataaaaattagccaggcatggtggcatacgcctgtaatcccaggtactcaggaacatgaggcagaaaaattgcttgaacccaggaggcggaggttgctgtgagccaagatcgcacctctgcagtccagcctgggtgacagagtgaggctgtgtctctcaaaaaaaaaaaaaaaaaaaaaaaaagtgtacacaaaccctagagcccccacacaataagaatgtgttgccttatgactgaaattgatacttcttaactagggcagaggaaaatattctgtagtgaataggaacaaacacctttatttcatgatctgtctacacagaaagatgataataaaattcagcaaaggaaatgtagctgtaatgttatgacctaggaattggctattggagaaacacatctataaaatgagtgtgaaattctgtcgtcccttagaagtatatagatgcttaagaaataggtatcttctcaaaagaaacaaatgagatattaatgattttgcctaatttgatgggggtgggggaagtacacagattggtatgtcagagttgctcttcaaataaggagatctagaatctagtttcagtcacttcctttttgcccctgtgggcatgtaggtcttctagcaactcaaggccacatgcttagacaacacagattagttttgtacatgtgtttaaatcactgtggtgatatgtgtcacaacaacagctaaaatcagataactttattccatctacagtggcttatttatgtcaggaaaatagggggcaattattttccatcaaagaggtgaaaagcaaattaagaaatgttttaagacccactaaggtttttttttttttttttttttggggacacattaagcaaagccaccatggtaccttaggctactaatgcatttgattcttcttaaccccaacctgttgttttaggtgattgaacctgtgattcagccttcagtaggtgttagaggcatccaacacaggtggcaagtatcgtctacagcacctctacttcacagttacattcagctgctgtgattcctggccgaccctattattcatacttcagggtttgtgtgtttatatagaaaaggaaatgtggctctcaacccgagatcgcgctgctgcacttcaacctgggtgacagagtgagactcagtctcaaaaaaaaaaaaaattgctttataatttaaaagattctttgctttgctttctcttttaacttactgctgcctgggaggaggtgagcatttacgtctccattctacagatgaggaagatgaggctttaaaaggttagtagctgtcccagggactcaaagctagtaagtgacagcattacaagtggcacctaagccttctggtttcaaatccccttactgtgccatatggtacagtttcccactgcgttgtacatgttgtggaataagaataaggctcacagctgttactagttaataacgtattcaccattggtagaaaactcagaacttgtggttaaagtggattttgttctcttgcccaagactgttaaccatcatcaacacaacagctaaaatcagcctgttacgctcacctgctgtttaatatctagattcataaagatgagagaatggaaaaactgcaaaagtggtgaaaacaaattctgataataggttaatcagaattatctaggaaacagttattagatgaaaggggctaggtaggtcacaaaggtaagttctcttccatcaaggaactcttgaagtggatgccattagacctttacaaacaacggatataccgtgtgctgtattagaggtatggaaccgaaagtaaaggacagatgcgcccttgtcttgtcaacagtaagagcctcttgtccatcaagagaattcatgtactttatagggtactaactctactaaaactaactctataaagaacttaagactgctcttcctggggaacttgtctacaggcactcagaatggtccagcatttgacatactgtcataggctttcctacaatacagcctctaacaaaactacgcgaacccctggtaatagaattgtttacctttataccaagaaggttgggaaagcatcaaaatctgcgtgtggcgtgtgcccaggcagactttgaagggtttgtgctgtaagacctaaagttcttatgaggttgtccaaaacaaagaaacatgtcagcagggcctatgttggttccatgtgtgctaaatgtgtttgtgacaggatcaagcgtgctttccttatcaaggagcagaaaattgttgtgaaagtgttgaaggcacaagcagagtcagaaagctaaataaaaaatgaagcttttttgagtaataaaaatgaaaagacttgctgtatggaaaaaaaaaaagactatcttacgttgtcagccaacaggataccacattaattctttaaatactgaattttgccgggcgcggtggctcacgcctgtaatcccagcactttgggaggctgaggcgggcagatcacgaggtcaggagatcgagaccatcctggttaacacggtgaaaccccgtctctactaaaaatacaaaa

SEQ ID NO: 7034 - DNA, 3032 bp, Homo sapiens
ccgggcgcggtggctcacgcctgtaatcccagcactttgggaggccgaagtgggcggatcacgaggtcaggggatcgagaccatcctggctaacatggtgaaaccccgtctctactaaaaatacaaaaaaaattagccaggcctggtagcgggcacctgtagtcacagctacttgggaggctgagacaggagaatggcatgaacccgggaggcagagcttgcagtgagccgagattgcaccactgcactccagcctgggcgacagagcgagactccgtctcaaaaaaaaaaaaaaaaaaaaccctaagacccaggcaacattagaaaaatgtacccaatgccaggtatggtggtggctcatgcctataatcccagcacttcgggaggccaaggcaggcagatcacttgaggtcaggagttttgagaccagcctggccaacacggcgaaaccctgtctctactaaaaaataaaaattagccaggcatggtggcatacgcctgtaatcccaggtactcaggaacatgaggcagaaaaattgcttgaacccaggaggcggaggttgctgtgagccaagatcgcacctctgcagtccagcctgggtgacagagtgaggctgtgtctcaaaaaaaaaaaaaaaaaaaaaaaaagtgtacacaaaccctagagcccccacacaataagaatgtgttgccttatgactgaaattgatacttcttaactagggcagaggaaaatattctgtagtgaataggaacaaacacctttatttcatgatctgtctacacagaaagatgataataaaattcagcaaaggaaatgtagctgtaatgttatgacctaggaattggctattggagaaacacatctataaaatgagtgtgaaattctgtcgtcccttagaagtatatagatgcttaagaaataggtatcttctcaaaagaaacaaatgagatattaatgattttgcctaatttgatgggggtgggggaagtacacagattggtatgtcagagttgctcttcaaataaggagatctagaatctagtttcagtcacttcctttttgcccctgtgggcatgtaggtcttctagcaactcaaggccacatgcttagacaacacagattagttttgtacatgtgtttaaatcactgtggtgatatgtgtcacaacaacagctaaaatcagataactttattccatctacagtggcttatttatgtcaggaaaatagggggcaattattttccatcaaagaggtgaaaagcaaattaagaaatgttttaagacccactaaggtttttttttttttttttttttggggacacattaagcaaagccaccatggtaccttaggctactaatgcatttgattcttcttaaccccaacctgttgttttaggtgattgaacctgtgattcagccttcagtaggtgttagaggcatccaacacaggtggcaagtatcgtctacagcacctctacttcacagttacattcagctgctgtgattcctggccgaccctattattcatacttcagggtttgtgtgtttatatagaaaaggaaatgtggctctcaacccgagatcgcgctgctgcacttcaacctgggtgacagagtgagactcagtctcaaaaaaaaaaaaaattgctttataatttaaaagattctttgctttgctttctcttttaacttactgctgcctgggaggaggtgagcatttacgtctccattctacagatgaggaagatgaggctttaaaaggttagtagctgtcccagggactcaaagctagtaagtgacagcattacaagtggcacctaagccttctggtttcaaatccccttactgtgccatatggtacagtttcccactgcgttgtacatgttgtggaataagaataaggctcacagctgttactagttaataacgtattcaccattggtagaaaactcagaacttgtggttaaagtggattttgttctcttgcccaagactgttaaccatcatcaacacaacagctaaaatcagcctgttacgctcacctgctgtttaatatctagattcataaagatgagagaatggaaaaactgcaaaagtggtgaaaacaaattctgataataggttaatcagaattatctaggaaacagttattagatgaaaggggctaggtaggtcacaaaggtaagttctcttccatcaaggaactcttgaagtggatgccattagacctttacaaacaacggatataccgtgtgctgtattagaggtatggaaccgaaagtaaaggacagatgcgcccttgtcttgtcaacagtaagagcctcttgtccatcaagagaattcatgtactttatagggtactaactctactaaaactaactctataaagaacttaagactgctcttcctggggaacttgtctacaggcactcagaatggtccagcatttgacatactgtcataggctttcctacaatacagcctctaacaaaactacgcgaacccctggtaatagaattgtttacctttataccaagaaggttgggaaagcatcaaaatctgcgtgtggcgtgtgcccaggcagactttgaagggtttgtgctgtaagacctaaagttcttatgaggttgtccaaaacaaagaaacatgtcagcagggcctatgttggttccatgtgtgctaaatgtgtttgtgacaggatcaagcgtgctttccttatcaaggagcagaaaattgttgtgaaagtgttgaaggcacaagcagagtcagaaagctaaataaaaaatgaagcttttttgagtaataaaaatgaaaagacttgctgtatggaaaaaaaaaaagactatcttacgttgtcagccaacaggataccacattaattctttaaatactgaattttgccgggcgcggtggctcacgcctgtaatcccagcactttgggaggctgaggcgggcagatcacgaggtcaggagatcgagaccatcctggttaacacggtgaaaccccgtctctactaaaaatacaaaa

SEQ ID NO: 7035 - DNA, 3032 bp, Homo sapiens
ccgggcgcggtggctcacgcctgtaatcccagcactttgggaggccgaagtgggcggatcacgaggtcaggggatcgagaccatcctggctaacatggtgaaaccccgtctctactaaaaatacaaaaaaaattagccaggcctggtagcgggcacctgtagtcacagctacttgggaggctgagacaggagaatggcatgaacccgggaggcagagcttgcagtgagccgagattgcaccactgcactccagcctgggcgacagagcgagactccgtctcaaaaaaaaaaaaaaaaaaaaccctaagacccaggcaacattagaaaaatgtacacaatgccaggtatggtggtggctcatgcctataatcccagcacttcgggaggccaaggcaggcagatcacttgaggtcaggagttttgagaccagcctggccaacacggcgaaaccctgtctctactaaaaaataaaaattagccaggcatggtggcatacgcctgtaatcccaggtactcaggaacatgaggcagaaaaattgcttgaacccaggaggcggaggttgctgtgagccaagatcgcacctctgcagtccagcctgggtgacagagtgaggctgtgtctcaaaaaaaaaaaaaaaaaaaaaaaaagtgtacacaaaccctagagcccccacacaataagaatgtgttgccttatgactgaaattgatacttcttaactagggcagaggaaaatattctgtagtgaataggaacaaacacctttatttcatgatctgtctacacagaaagatgataataaaattcagcaaaggaaatgtagctgtaatgttatgacctaggaattggctattggagaaacacatctataaaatgagtgtgaaattctgtcgtcccttagaagtatatagatgcttaagaaataggtatcttctcaaaagaaacaaatgagatattaatgattttgcctaatttgatgggggtgggggaagtacacagattggtatgtcagagttgctcttcaaataaggagatctagaatctagtttcagtcacttcctttttgcccctgtgggcatgtaggtcttctagcaactcaaggccacatgcttagacaacacagattagttttgtacatgtgtttaaatcactgtggtgatatgtgtcacaacaacagctaaaatcagataactttattccatctacagtggcttatttatgtcaggaaaatagggggcaattattttccatcaaagaggtgaaaagcaaattaagaaatgttttaagacccactaaggtttttttttttttttttttttggggacacattaagcaaagccaccatggtaccttaggctactaatgcatttgattcttcttaaccccaacctgttgttttaggtgattgaacctgtgattcagccttcagtaggtgttagaggcatccaacacaggtggcaagtatcgtctacagcacctctacttcacagttacattcagctgctgtgattcctggccgaccctattattcatacttcagggtttgtgtgtttatatagaaaaggaaatgtggctctcaacccgagatcgcgctgctgcacttcaacctgggtgacagagtgagactcagtctcaaaaaaaaaaaaaattgctttataatttaaaagattctttgctttgctttctcttttaacttactgctgcctgggaggaggtgagcatttacgtctccattctacagatgaggaagatgaggctttaaaaggttagtagctgtcccagggactcaaagctagtaagtgacagcattacaagtggcacctaagccttctggtttcaaatccccttactgtgccatatggtacagtttcccactgcgttgtacatgttgtggaataagaataaggctcacagctgttactagttaataacgtattcaccattggtagaaaactcagaacttgtggttaaagtggattttgttctcttgcccaagactgttaaccatcatcaacacaacagctaaaatcagcctgttacgctcacctgctgtttaatatctagattcataaagatgagagaatggaaaaactgcaaaagtggtgaaaacaaattctgataataggttaatcagaattatctaggaaacagttattagatgaaaggggctaggtaggtcacaaaggtaagttctcttccatcaaggaactcttgaagtggatgccattagacctttacaaacaacggatataccgtgtgctgtattagaggtatggaaccgaaagtaaaggacagatgcgcccttgtcttgtcaacagtaagagcctcttgtccatcaagagaattcatgtactttatagggtactaactctactaaaactaactctataaagaacttaagactgctcttcctggggaacttgtctacaggcactcagaatggtccagcatttgacatactgtcataggctttcctacaatacagcctctaacaaaactacgcgaacccctggtaatagaattgtttacctttataccaagaaggttgggaaagcatcaaaatctgcgtgtggcgtgtgcccaggcagactttgaagggtttgtgctgtaagacctaaagttcttatgaggttgtccaaaacaaagaaacatgtcagcagggcctatgttggttccatgtgtgctaaatgtgtttgtgacaggatcaagcgtgctttccttatcaaggagcagaaaattgttgtgaaagtgttgaaggcacaagcagagtcagaaagctaaataaaaaatgaagcttttttgagtaataaaaatgaaaagacttgctgtatggaaaaaaaaaaagactatcttacgttgtcagccaacaggataccacattaattctttaaatactgaattttgccgggcgcggtggctcacgcctgtaatcccagcactttgggaggctgaggcgggcagatcacgaggtcaggagatcgagaccatcctggttaacacggtgaaaccccgtctctactaaaaatacaaaa

SEQ ID NO: 7036 - DNA, 1672 bp, Homo sapiens
cttttctccctccctccttcccctctctcccttccctccctccttcccctctctcccttccctccctcccttcccttctcccctctctcccctccctctctccctccatcatggggctgtcagctgcatcgcaaatctgtgggctctgcctcctctggctctctcctcattttgcctcacagatatgtcccccagtacacatcttgcccacatctaatcctggctcagtgtctgcgtctcagaggacgtggaccaaggcacttgccgtctcaggcttagttgacccttcaacctcctgagaactctgggcccaggcaaccctagagaactgactcctgtccatgttctcctttctctggaaaccacttagctgcctccgtcatgctctgggcaaaggcagggcaggttgggagaaggaatcagtgaggctgaggccccagcctaaaggtcacagggccgcctggcccaggagaaatcccctgcaccaggcatttgcccacatggctacaagtgaacgttgggatacggagtgttcttttttgctatgaaactggagtcatggaggtcctggtcgacattcttccttccaaatacagtggcctggatgggggagggcagtggctatagaggcttcctgcaccgtgtcggggctcttgtccattgcaagctgggaccccaagctacccacgtggtgtttggctcccgtctgatagggaaagactttgaagtccacatccaggcataatggatagccaggctgcctaagtggtttgatagatctcccagaaaattcccagatggactctggacgcacagccatgccacagctttcctcctcttgggaacagactaccagtgagaggctttactctgaagccaggtgcaccagggcccctgtgtcttttcctctaaaatctctgcaggtctgcactaagagaaaaatagaaagttcaacttgctaagagccccttttgcttaggaaacttcttttcatggtttttcacttcataaatggacttgattggaatgaacctttaggcaaatgacactgtcaatgggcatcacggccacactctgccttggaaagagtaacacagaggagggttacgcacttacgtcagaagagtagctctgttgagtctatagagatttggccccaggataagggtagcaccttctcttgtccactgtctatgatcaaggtggccagaccaaccctgggggctagaacatggtagaccctactggtgacatctgaaaatggtttggctttacgtagatgaaggaaaagtatgtgcaaagaccttgcccattctgtctcactttttaagagtcaatatgcaatctggaggcaaagatagacaaaccaactgatgtggtttggctgtgtccccacccaaatctcatcttgaattgtagctcccataattccgtgatgtgggagggacctggtgggagataattgaatcatgggggcagtttccccccatactgttcttgtggtagtgaataagtctcaagaggtctgatggtttagaaggggaaaccattttcacttggttctcattctctctcttgcctgccatcatgaagacgtgccttctgccatgattgtgaagttctagccacgtggaactgtgagtccattaaacctctttttctttataaatta

SEQ ID NO: 7037 - DNA, 30704 bp, Homo sapiens
cagctcctcacaccacagccaggagagaccttttctgcctggagagaaactttcagaccagccccacacaccacagccaggagaggccgttcctgcctggagagaagcttccagaccagcccttcacaccacagccaggagaggcctttcccacctggagagaaacttccagaccagcccctctcaccacagccaggagaggccgttcccacctggagggaaaattgctcctttgatggaggttagggactgtcaccctcagcactgtgaacataccgggcgagatcattcttcaggggaaggagctgcccagagcatcacaggatgttccagtgtccctggtctctgcccaccagatgccagcactcccaccattcgtggcaaccaaggatgtctccagacactgccccgtgtccatggggttatcacccactgtgctgagtcaaagggtgccttgccctggtctaatccaggacatagccgtggatacgtccaaaaatccccagaacctagtgagccctctggctctgggagcccctatctcaggaattttcagggtcatttgtgacttttcatttcttaaaacctgaaatagactctcttagaaacaagtgactccttcccagtggccaaaacttaatcatcagagcgcttccttcagttcctcacccatcagccagtgggctctccaaagttaaccaacagctccctcttgtggttcactaaaaaacttggttattccatggagttgtgcaaagctatggcttccttggtgcaatattcttaaaacctgctttgcatagaaatcacttttgcccaggctggagtgcagtggcgtgatctcggctcatggcaatctccatctcccgggttcaagcgattttcctgcctcagcctccccagtagctgggactacagacgtgtgccaccacgcctggctaaatcttttttgtattttattttagtagagacggggtttcaccatactggccaggctgctctcgaactcctgacctcatcgtccacctgcctcggcctccccaaagtgctgagattaggcgttagccaccgcgcccggccagaaatcacttttatattgtcacatgggccctctgcacagagtccgatggctcctcccggggaagcctgattttgtgacgtgtgtatagtaaatgcaggccctctggcagcaccataattggtcggttaccctgagcccagagctctgaaagcatctgtggaatgatcacgggacccttctcctctgagaaggctcccggctgcctccccgccaccgagcttgtagcctgaatgcctggctgtcgcatggagcattttgcttctggggtgtcttccttagccaaagggaacgtgtcatttgctcgaccctggcccacccttgccgcccagctgttgtgctgggcacagtctggggcacaggcctccatgatgaagacgcgtgggctgtcggtgctttcatccgtcacaaactggcacctgtacctgccagcaggagcatgatggggacttccatgctggaattgctccctgattaaaatgagatatggctatttggaagacactgcattttagccagtgtacctgggcacagactcggggctgccctgaagctgatgaaggcttgaaggacggaagggctgagccacatgaaggcagcactcagggccaggggagagagaagaggatcagcagtgcagccccaggatgcctcgcaggtaccctgcctccattttggttaccatccccacttattatgggctgtgggctgttatggtgatggatggatgtggatttggaaggggaccatgagagatgatgtattatgatgaactcatgatttaattctttggtgaaaatagcaccctctgacctgtacttgagaccgcaggatgaagccagcacggttttttgtactcccccagggtgagtgcactctcccaggaccctcctggccaaccaggggtcacgttctgcaccacattccttctgaggccctggccagggcggtgctgatcttgctgttgccacagaagcctctcctgcccctgccatccgcccatcacatgttctccaacgcaaatctgcctggccttatgggcggcgttccctggctcttaggagaaaaagccagatctttaccatggaccatgaggctcagagaggtctaggctgagcccacccctgcggcctagcagatgcccttccccttcactctgcacctggtccctgtcttctctcatggcctcacatgggccacacccctgccccccactgggcctttgctcatgatgtgcattctttctggaagacccctgcccccctccccagccctctgcccagtggctcctagccactcctcacatggagtcaggactcacatctccagagatccccctctgcccccaaccctgaacaacatcagggccccccttagattctaggtcctgtgttctttgctgctgggactggggtgaggtcggtgggggagcatataaataaccttcctttatttcttgtccaagttcatcactatacacagaggtgtacagtgagacccacataaacaatcccactaaacccaactcaactggcccttacccagatcctccaaatgtcccaggcctccctagtgtcacctgatatgcagtggcatcagcaggaaagggaacagtggtcttaaggattgcagctaaaagatctgactgtggcattgtaaactgtaaggaatgtgtcagtgaacccgtggctaagcccactcccgggtctcggtggggtctgtgcacaggtggcagaagtgtgagctccatgagctttacagtgaatcagctgtggggcacagagggcaagcttttcctccaccctacgaaggctccttgagaaacaattgaccaaaggcagaccaataggaaaaagaaaagcattccaacgtaacgtgcatggcatggggaattgcaggagagtgatgaccccacaaaccagtgaggtccaggtgcttccacaccctcatagggagacgggaaatgggggaaatgtggccgtttagagggtaaagcgtgatttatagggggaacgaatcgatccagaggcaggcactgtcttgggagtgatccttcccagactggccaatcaggtatttctcctcctccccagagaagaataaaagagagagggagaggggccagggaagtcccttgtgctgtcccccagagagtggaagcccctccctctatggaaaccagaggagtgggagatgggattattctcccctaaatgtttcctctatagcccttaacagagtgtgcagttcggtgctttgagtaatcatttgattcgcacctgacgtcccccctggaatgtacaccattgaccggccacatgccacctggcatataacaggcattcatggtcacctggtggaaggaagggagggaggcctgggaatattcctttcctcctgtggcaactggtttggaaggaagggagggaggaacgctgagtatatactttcctcctgtggtgtatggattggaaaggaaggagggagggagggaggccaggaatactattttccccccatggcttatagatttggctgtgtgtcagcattacccaggggctcattaaaaacaacattcttagccccatcccagagattctgagtcagcagattggacaggaggcctggggatctgttttttccccactgggctcccgctgatggacttggtccacttcctgatgcacctcctgcccaccgacatagcctgcagtccagccgctggacttagtctgaggtgagctcttcatccgccttgttctggctgtggtggccatgaacatgtacctcttgggtccccaacggcaaggagcaaaaacgaccaacatccttgggatttcctgccgtgctcagaaatccttccctgcgtgagcatggaggccacacttcctgcagggtgctcccagtgcctgcaagaggcagggatgtggaggcctccttagcccacatgacagggctcctccagaggacagcctgggccccaggacttcttgctctacctgctgagatgtagaactgtgcagcaccagagtcttgcctccctccctcctttctaccctctcttcactcccttcctcccctccctcccttctttccttaccccctctgtccttcttttctccctccctccttcccctctctcccttccctccctccttcccctctctcccttccctccctcccttcccttctcccctctctcccctccctctctccctccatcatggggctgtcagctgcatcgcaaatctgtgggctctgcctcctctggctctctcctcattttgcctcacagatatgtcccccagtacacatcttgcccacatctaatcctggctcagtgtctgcgtctcagaggacgtggaccaaggcacttgccgtctcaggcttagttgacccttcaacctcctgagaactctgggcccaggcaaccctagagaactgactcctgtccatgttctcctttctctggaaaccacttagctgcctccgtcatgctctgggcaaaggcagggcaggttgggagaaggaatcagtgaggctgaggccccagcctaaaggtcacagggccgcctggcccaggagaaatcccctgcaccaggcatttgcccacatggctacaagtgaacgttgggatacggagtgttcttttttgctatgaaactggagtcatggaggtcctggtcgacattcttccttccaaatacagtggcctggatgggggagggcagtggctatagaggcttcctgcaccgtgtcggggctcttgtccattgcaagctgggaccccaagctacccacgtggtgtttggctcccgtctgatagggaaagactttgaagtccacatccaggcataatggatagccaggctgcctaagtggtttgatagatctcccagaaaattcccagatggactctggacgcacagccatgccacagctttcctcctcttgggaacagactaccagtgagaggctttactctgaagccaggtgcaccagggcccctgtgtcttttcctctaaaatctctgcaggtctgcactaagagaaaaatagaaagttcaacttgctaagagccccttttgcttaggaaacttcttttcatggtttttcacttcataaatggacttgattggaatgaacctttaggcaaatgacactgtcaatgggcatcacggccacactctgccttggaaagagtaacacagaggagggttacgcacttacgtcagaagagtagctctgttgagtctatagagatttggccccaggataagggtagcaccttctcttgtccactgtctatgatcaaggtggccagaccaaccctgggggctagaacatggtagaccctactggtgacatctgaaaatggtttggctttacgtagatgaaggaaaagtatgtgcaaagaccttgcccattctgtctcactttttaagagtcaatatgcaatctggaggcaaagatagacaaaccaactgatgtggtttggctgtgtccccacccaaatctcatcttgaattgtagctcccataattccgtgatgtgggagggacctggtgggagataattgaatcatgggggcagtttccccccatactgttcttgtggtagtgaataagtctcaagaggtctgatggtttagaaggggaaaccattttcacttggttctcattctctctcttgcctgccatcatgaagacgtgccttctgccatgattgtgaagttctagccacgtggaactgtgagtccattaaacctctttttctttataaattacccagtcttgggtatgtctttatcagcagagtgagaacagactaatacaccaacaaatgcagaggggccagaaccaccccttcctgggacatcagagccaacagttaagtggtctggattccaaactcatttacttaatgtcgataggttgaaattggccatggcaagagacttatgttgaaacttaatacccaatgtggcagtactgaaaggtggggcctgttagaggtgattgggtcatgagggctctcccttcatgaatggattaattcattcatagattaatgtatcagtgagtcagtggattaatgggttatcatgggagcgggaccagcagctttataagcagaggaagcgagacctgagccaatacactcagccccctcaccatgtgatgccctgcactgccttaggactctgcagagtccccaccagcaagaaggctctcaccaaatgcaccagcaccaccccaaccttggacttctcagtctcaaagtctgtaagaaatgaattccttttctttataaattaccccatctcaggtattcagttacagtgatgccaaatggactaagacagaaaatcggtaacagaagtggggtccacagaactagcaaacactacaaacaagggctttctaccccacccaccttcacccattgttcaacattgatttggcagcacacttctggaccactgaatcagaagggtcaatcacctgacttacaacaaaggccccactgcatcttaatgggggaaagaatagtctttgcaataaatggtgttgggtcaatgggagatcatatgggaaatggagaaccttcagtcctaccttatattgtacataaagattattgagagatggctcagagacctaaatgtgaaagataaaacttctagaaaaaacccagaagactactgtggtaggcagaataacgctccccgtccctgccaacaagatgaccacatcctaatccctgggcctgtgagtatgttatgtcacatggctgggagaattgggttgcagatgaatgaatgagaatagccttcccctaaaactttctgagaaactctctctccctcctcccaaaatctcaagaggtaaaaggaagtcacatgccttaaaaggagtgttgcagctcagtctccaagaactaaggattatctgagctaccaggtctcctgtcccctttaactgtgcctcttggaggcgctggggaacccaaagttcgacatgggctctagattatgctggttggacagtggctcccatgacctgggagtcaggcaagcaccccgtcagagtctgtcttagagaaggtgctagggctgcttctgcttccacttccaccctgacaggactgaggaggccaggcccagagaacaggctggataacttcatcctgccaactttacttttctggaagtttccctttaatagtccaaatgggccaaagccgaacatcaaaaatccttaccatccgttcttggtctttccatccaaaaatccttaccatccattcttggtctttctcagtagttagttaaccttgtttcaaggaagtctataactgaccctgagccaacacttctttcaaccttgacaaaggtatccacacgaagccgaggagcgggggaggagaagggtacatgaaaagccctgcgttgatgtgggaccagagcatccaaagccatctgcctcaaatgcccttggagctcagtaattaggagcaaggagctttggactagggcccaaagtgcctgggtcctggattcaaatcctggttccatcacttcctaagtgtgtgatcctaaacaagttattgatctcactctgagtcagtttcctcatctgtacaatggggataataatccctacctcatagagcacctggcatatagcaactgctatacagctatcagcccatgtatttgttgtcattaccagcaacttcatcactatcaccaacaccaccatcatcatcaccactatcgtcaccatcatcaccatcaccaccatcattactgtcaccaccatcattgtcatcactattactaacaacagctaatggaagcaagcaactttgcctgctgtttttatccgtcctttagtgtatctctagctcatggaaatggaaggaagaaatgtgaagtttaggagattggagcttccagtctgaggctgatccatacaatacaagaagaaagagagccaggaaaggcccaacaggagggaatcaatgcaagatttgagcctattttgtggaagcccgcccatcagccgtcttccctctcttcgcctccttgggtctcaggaactcagccttcagaagtcatgaactgaatctctcctcccacccccacatccaccagtctctaccaagagtgagtcctcaggaagcagccaccaccattcgttatcacgcggggggactgccaagcattcgtacccaatccagacaccaccactgaaatgaaagtgccctagtcaggtcagtgggcagttcattttctttattttttcacaagctttgaattcagaaataagagccacaacaagttggttgttaagtaaaaatgggagtgattacaaaggaaaactttgtacaaaactttaaaaatctgactgccccgtcaactgcctcagagggaccaggactcaggccacgcaggggcagccatcagccccccatcgtcagccccgaatggggatggggagacctctttctgagtgtgaacctggctcggcctgaagcctagagctggcttgaagaacacacacagaccagaagacagcacggtgagttacaagtgccacggagaccagggtttctgacacaggatgtggaggatgcttctctgcaacctagtgcaaggcttcccctgccattccgagaattcacggatctcacaggtggaggtggggcgagcttctttctagtgtggaccagaggtgggggcaatgagtaaacatcttcactgtaagggttttgggactgcccctcagggcttgaggtctcggcatcgtgtctcagtcagtccttggcgatgtcccctcagacgcactcacagacttgcatacgtaatttagtaacatgcatcaactatcctagaacatctacagggtgcaaaggaaccaccactcagagaatcatggagccagtggagttagaagtggaagggacagaacaagacaatgctaaaacctgtggttcactaggaagggggaatgaaaacaccatgctccgaggtggattcagcatgaacacaactgtggggcaaggaatttccaagcaaacacaccacactagtaccacttcttcctaaacagaaaagggaaagagcatccttcgacttccccctccctccatcagcaccaactaaaactgtgggtttcaaaaacactgacaggaaaagggatggacatgattcccagaatccttcaggctagctcctccgcgcatccacgttcaaccgaggctggtgatgttggagcggccaccagggggcgccacgatgcggtggccggtgcgcctgggattgttgtcatctatctgggcacctgaaagagagcgccaatcgctgctggatgggatctgttagcatcagttccacgctgctcctggaggccatgtactctgccatgcactccactggacccaccttcattcagggctcagtccaggaccagccatgggaagcctccctggcctccacagagtccactgctccctcttctgtgcccctcagtccctgggctccccccaccttcagccctgaccaccttgtggtgttcttgtcaaaatccccagtaaaatccgacattcctgagacaggtgatcaaacacttactgagtgcctactgtgtgcaggcgcacatttggtgctttaacatgttactgcatttagggcacacaatcatactatgaagggggtgtttgtactcccaacttacgggtgagcaatttgaggttcaggccacgtgtcttgcgggacacaggtgttgggtggggaagccaggattgaagcccaaactggttggttttcaaagcccatgatcttaggcacactgtcccacactccaaaggtattttacatattgtgtgtgtacacatttgtatatgcatgtgcatatgtgtgtgcatgtgcatgtgaactccgcaagctggatttacttccctcattggcgataggtggatctgaagggggggggggtggtgtgcagaggttcttaattttaatctttcaaaaccaaccatccattctacttttacctattctcttgcataaagatgtaaaattctagcagcaaacccagtgcctggagctcaacaaatatttattaaatgagtaaatcatgaagggtggataatgctgaaaggtgggaaggatagagtccttatcagggaggggaagttgagccggcggaactgaggaaaatcaaaaagagaaagcaaataagctgtaagtctgcctttcttcatggtctacaacacagccttcctgtactcaacttatcaccagatcctcagctaacagaaaaacgtaagtaagttagctcactgcaaccacagcattatcagtactgcacaaagccctcttcggcacacagcacaagcaccatcctataaaatctccagcaagcctttgtttccttgcagtcggctcctttcttgctgacctacccactgtaccctttcatactttttctaatacatctgactttctttaccgacaactgtcttggtgaattttttttactagctgcagaacactggccccaggtagttgtcacctgcaacaggaaggagactcaagtttcagtgctaatcatgccttgaatttgggcaatttggagtaagacaccaccccactcccttggcctcatttccttttctgcacaataagaacagtagactagatgagccccttccaactccaacattacatgatttgtctatgtaagccactaagaatttggttcacagtagtgacttttcttttctcccattgtttcactggtagacaatatgtcttcttgcaatacaagtctcccctaaaggcctggaatcaggcctagcacttagtaactttttccttacaaccatctgtaccttgctggttgcatgtctgtactttgaaaatacctgctggaaaaaaggacactaatatggtttggacttttgtcccccaaaacttcgtgttgaaatttgatcccaaagttggaggtggggcctaatgggaggggtttgggtcatgaaggacagaccactcatgaatggcttggtgtcagccttacagtaatgagtaaattcttgctctattagctctcggaagaactggttgttaaagagcacctctgccttcttcctctgttgccatgtgatctctgcacacgctagctctccttcgccttctgccatgctggaagtagcctgaggccctcaccagaagcagacgctggcaccgtgctgcttgtacagcctgcagagccgtgagccaagtaaacctctttaattacccagcctcaggtaatcctttatagcaatgtaaatggacgaaaacagacactaactcatggtacagctctataacgtaacatacgcagatattaaaaagggcatctgtgaggttgttatgatgttggaaagcatctgtgttgttggtaccaaatgaagtcacctatcaacctgccaagaggctggctgacagcagtggtgctgtgggcctcaggaggactaagagtgaaactgagagaacaagggtgaggaggggcccttccaggtggcttttaacttcattgttattcttgttctaagaacaacggggaggaggattttctgtccatgtttaattgcaattgtgcagtgtttaattgcataactccagaacagtggtccagtttgcaaactccttgagagcttgtgtcttgttgcacccagatagctttttcccaggatgaagccaatccctggtttgctgattgagcatcacatgacttttagcattctatttagggtccattttgtgcaaaaatatgaaacactggaagctcttccatcaaagtcttatggagagtgagatgaatggggaggcctccttgattcatgcctcctcggcataatcactgaatcagacacttcctgaatggataagaggttctgccaccacacaatctgaattcacacgtcatcctctctctctctctctctttgccccttccactctctcttttgctaagcatatcgcctttcctgaccaggaattagcaaacgggtccattgaccaaatccggcccaccgcctgtttctgtacgatccatgacctgagaatagtttgtacattttcaaatggctattgaatataacatcctagatgttgacatcctagatgttgcctcttagcttacaaagcctaaagtatttactatccggccttctaagaaaaaaaatcaccatactcttagtacccagcacggtgtgcaacccatgcaacgcctcaaagagtttgcaggacaaaattccagttcaactttctcaacgtgtgcgtgcctgccctcatgtggccatctcaccaaatcacagatacactgccctgagaccttaagaaagtcaggagggatcaggtcaacatctaattttgttcccacacatttgttgagcaccaagtcctggtattttgacactggatttcttggggcttccgtttcctctttaaataaatagggtataatgttactttatggagtagtgaggataaaataaaatcatgggttatgaaagtgcttagtacactgcagtgggtgaacaggctaaagacttacacagagcacatgccctgcaaatggcagctactcccatctcttgttcatccccaccactccatgtttactttcatgaggaagagtgtgaaagtgtccccaaatgtgtgtaaggatgagcactgggacaattttggtacctctctttgtaaacccacatcaggtaccaccatgttgcccccctaacatggacccccctctgcttggtgaccatgccagcccactctgccccaccagtgagagcaggctcgggtggggcacactcccttccctgcttcttcatctagtgtccaaggccacgtgtccatttcctcagaagcagcaggaaggactcggcctgaactgctgcaattgtggggagcctgggccaccactctttcctacctgataagctgaagttggactggtggaggtttctgatgggtgggggctggtgtttagaaggcgaagatttggctgaaggagcgggagttgcatatttgggtgtagctggtacctcgtacacaggaccgtcatacatgcccctggaaaccccttgcaatccaaaaacctaaacagaggaagggagagtgtgattgatcgacactgtgcatgtgtgcccttctgggcagataaagcagagccctgcgggcgagagagaaacctgaggtcacttcaaatgtgcatgcacacacacacacaacacgcacacacgacaggtgcacttcacacacatgcagccgcacacaggcattcatacacacaagcatgcatacacacacatctacatacccacatgcatacacatacagacgcacacaccacgcacacgcactcacatacatgcagtcatgcacacatatatgcatgcacatgcagtaacaaaacaggcctacacagtagcatacacgcgtgaacacgcacacacacttaaatcacatacagatcttcacaaaggcatactcacatatgtatacacatgcatacatgcccacacacacactcatacaggtatacacacccatatatacacttacacacacgcatactcatacacacaaagcttcatgcaggaggaccccaaatcccttccaaagagaagtcactttgcctgacactaccacctacccacccccggaaaggacccctgagtcccagacaaggcagcagcaacgggcccatcttcatgtatgttcttgtagaagtcaacagcgaggcaaagattcggggggcagatagtttgttgggagatggttccagaaagggggaaggagtggggagctgagacagggagggagaaaactcagtacagagggacaaggagtgggccaggtctatggggggcagggctggggatgctgtggggaggacacctccacaccagcctgcaggaggacgaggaaggagggcaatggagccacagccctagccccactgggaaagggttgtgggggcagagaccctgaaagcagcagggcttccaggcaggaggctgtcagcctgctgggaactgctgacagcagcccaggtgacctcagggatggccaaggttgggagggcacctgctccaggcactggagaacagcatgtgttcagggacctgtacagggtcccagcatgagtcagtggcagtgccctaacccaacacggggcttcatcctccatatcaggtgacagtgccctgaccccaggcctggctccctccttctctgcaggtgatagcaccctgacccccagctctgggctcctgtctctccataggaggaagccttaattttagcaccaagtttaaagacccagcacctgcacatcatgtcaacggccctcccctctgtccctggagccctgctccccgactccctgggcctcactgtatcctgtgcattctctgtggctgtggcattgcttcctgggtgaggccgttcatcactccctgaagctcaggtggccagaggcaggctctgatgcaggtctctccttcacctggtctagctcctgcaggcatgaaggaatccctgtgcaatgggaccccccgatcctattgctcctgcaaattgctgtcttggcatttggggtcagatatctgccctcacggaagctgactgttaaccgcaggcctcagcttcagaccaagaaggaaatgaagccagccaaggggtgtgtctgcctcttcagtgggtgtcccagccagggatttccatgagtccccttgtcctcatatggcctgctgcctgtgcctggccttgtctcggatctgacttgtttccaccccatcccttgtttccccatccagtgcaaagcatctgtgcgacttggtgtctttgacctggtgctacaccttatggaagctggggagagaccaaaaccagatgcagagcctcccagtccgggctggagcctgggaatgcaggaaggtctctggacttctccatctcaattggtcacttaggaagcatacaaagaacaggaccacacaggtacacacatggccacacacacagagctcaccacatgctcgcatacacacacgcgcacacacacacactccaacacacgcacacacatccccatatgcacacatacacacgtgcatgcatgtacacatgcacacatgacacgcatagacatacacacatgtgcgcgtgcacacacacacacacacacacgaagctggcctttctggcaaacatcagctgtctcatggggaaagcagctgccatggggatgggagggcctggctggggaagatgttggccacgggcgggagtctctctcagctgtgagaaagttccctcctctgagttgctctaaagttaggaatagagcctgctccttccctttgacagatgtcctgaggtcagtgctaaggttgttcaaggaaaataaggaacgacagggcagaaacgtcaagggaggaaggaaaggaagaaagggcggatctgaaggaagccctgcctgcaagatgccaggggtaacaccttgctccacagggccagacccgagggtttctgagccgtgactctggctaagcccttcactgctctgggctgcaaaaggaggatcacagcacctcccgtgggtgggcaggattacttaagatgacgcaggacagcgcccagagcagcttggtaagcgtccctcccatgatccacccaccctcacgggtgcacacccctctacagtttgcaaagccctggaacttgcatgtcctcatttgatgctcactcctgtcctcagacaggagcccaggccagcgtctcaacccatttaacagataaggaaacggaggttcccagggcgatgacattattaactctgcacacgtcagatctcgattccccaagagacgctgtcggctctggtcccacgggtgggcccgctcccctgcagacacactcaccttattcctgattttgacgcgctggtacaggtgctccgggaacgccttccgcggaatgaagcggcccatgcccttgttgacgttgatgtttccgtcttcaaagacgatcttgccctggctgatgaccactagtggggagccgtggcactccataccctcgaagatgttgtactccaccgcctgcaccaacagcctcagtgttacttcccaggatttgctctgccccaaacgagctgttcataacagcgattttgcctaacattatatcataagcgtgttccaatgtttttttttctctctaaaaataccttttattgactgtaatattccactgtatggtccacagtgtatataaccaacaactcaccgttgcgcatgtaggctgccggtggctttctataatcaaatcaatattgttctggggcatcacaaagaggaagggggtcccccggggttatgcaatgtggctgctttgactgtactggacataaaaataagtaaaatgttcttcattttacttaaaatgtgtctttaaataaaatttttttctctaggtttctaaaatcaaattactgggtgaaagaatagagctgttttaaagcacgtgtgccatatggccaaattattttcccaagggttcagatcaattgacacgatatcggcacttaccccctccagcattgggtaatgccatttttttctttctctgctaatttgaaagacaaaataacatttcctttaaaacacacattcggccgggcacggtggctcatgcctgtacccccaactactcgggaggctgaggtatgagaactgcttgaatctgggaggtggaggttgcagtgagccgagatcgtgccactgcactccagcctgggggacagagcgagactctgtctccagaaaaaaacaaaacaaaaaactcaccttctttccattattcttcaagtgaatacttgacagttgtgtgtcaactgtcaccagccaactgctttttattattttaaaagtaggtcacatacatggttgaaaacaatcaactggtaaaaaagatattggatagaaaggtaagtctgtgttctacttgagtctgagacatatgccctgaagagtttcttctgtatctctaagtatgtccgaggcatgaataactgtctgacatatacacatctctacacagacatttctcagcttaatttttctttacctcagcaattgttccatatcagcacacatacaaaatacttttacactgctacatttcatcaggaggatgtactaccatttatatgcccagttcccaagaataaacagttgggtcattaccatgcctttgctaaaaactgctgaaacagactttgcatccacagtctgcacacgtgaacatgtttctagatgtggagttgggggccaaagagtaaatggattttcatctttgacagatttgccctccaaaaaagacaacactagtttccattcccaacaaaactccgtgagcttacctgacagcctttggtaaacagtatctatgtatattaaactcctgatctcagttgctggcacaggtgaaaaatactatctctaggtggttatttgcatctgtgactgagactgggtctctttttaaatcaacacatgccatttctatatttatttcttacggtgtcactgtgttttgcacattattctatttctcagggtcttggcattcttcttactgatttctaaaagtacacactcaatgttaaagaatttatcctttgttatgtgtgttgcaaatatgtcctccctccctggtcctctgtctctggaactcaaatgaagtaattgtttttgccacacagattattttgtataatttttgtgtagtcagtggtcaaacagaccattctttaccatttctaagttttgtgtcttgcttagcaagatcctttccccttcaaaattatcattctttcaaaaaatgtgtgttgtattctagtcctttcatagctttattttatcttaatctttgaaccatggtttgatttgtttgatagtaaatagtagggcagaggttaagcctcttgggccaggtgttctaacacaattggatgagtaactatcgtttcctaattctaattgtctcctttattgtaaaccaaattctcatatgcagtcagtctattccttggctctcttttcttgtacccctgccaaactgtttggtttattgcagctttatgacacgttttaataactgggatgactgatacccccgggcccagtcttcccttttttcagaactatttcagctactctcacatttctcatctgggaactctgctttcctagctaaacaattaaattttctgatgggatcacatcaagtttatagattagattagaaagaattgatatgttcactatattggatcttctcagtgtaaaagtccctgaatttatgtaagtctttagttttttatttttgtttgtttgtttggttgttttgagacagggtctcagtctgcagtgcagtggcacgatcatggctcactatagcctccaagtcctgggctcaagcaatcctcctgcctcagcctctcaagtagctaggactacaggcatgcaccaccatgcctagttaatttttttatttttttgtagaggcagggtctcactatgtcacccagtttggtttcaaactcctagcctcaagtccccctacctgagcctcccaaagtgctgggtttacaggcatgaaccaccacgccaggccaagtctttagtttttattgctattacaggattttgatttccattctattttccaaagtgatttttgattcttccatagaaaaactatcaattctttatattggtttgtaatctgatggtgtttgatgatttttaggtgcattcttgggggttccaggcaatcacgtctcctacacacagctgttgacactgtgccagcctcgcaggacccaggcagacagtgcgtttccagtgttagcatttgctaacctaattctccctcaccctaaagtggctccactatggagtgattcataactgtgccgagggacacatggattgtgaatgcggaggggcggtgcaaggaaccagtcacccatctcccagctgaaactggccagcccttggggacctgggctgctgtccctactcctgggtgaggaacgtgctgtgctttggtgagaatctcaagctgcagaggtgtgaggaggccctggtcatatcacaaatgccacaccctgcatttcacaagaacactgaattgtaaacatcaattccttcatttcttaaaggtaacatacaaacaatgtaaaaatttaaacaacacaaaacaccatgatgaaaaaacctcttgccatccatgagccccatttccctggtcccctccagggagaactggtttcttttataccctttaaagagcagccactcaagctcatgtgtgcataaactaaacgtggtccatccctacaagggggtattattcagccatcaaaggaacatggtacccatccatgatatagcacggatgatcctcaaaaatatgatgctaagtagaagccagacataaaaggccacatattggatgattccatttatatgaaatgtccagaataggcaaatccatagaaacagaaagcagattagtggttgctagggaatgggggtgagagagagggactgattgttcatgggtacagggtttcttttctggaggtgatgaaaacattctggaattatgattgtacaaccttctcaatatactaaaagccactgaattgtacacttcaaaatggcaacacttatggtatatgaattatatctcgataagaaacttaaaaacatccagatagtctatgatatacaaacatgtatgcatacccatgatgtggcactttgatgtgaatgttttccacaaagataggaaagaataaaagttgtgttttatagaaaagtagatttaaaatctaatcactggtcaatatataaggaatgatctcttttcattgttaaaagtaacatttttttaaaacatataaaaacaaaacgaacctctaagcatttctcaatccatgttctgaaaaaattgcaattatgtggatggcattgctttggacagagaaaatgaaacagacaaaatcctttggtcaaaccacctcacggaatcctcaactgtcctcttgctgctatgaaaagaattcaaatcttgcctcacacagagaggggatgcttccccaagtttaccctgaagacagttacctcccagatgggtaaccttgggtatattacatattgttatgggttgaatcgtgctcccaaaaaagacgtgttgaaatcctaacccccattacctcagaatgtgaccttatttggaaacagagattttgcaggtataattaggtaagatgaggtcacattggggtgtggtaggcgcaaaatccaatgactggcatccataaaaggagaagacacagcagagagggccacgcaatgacagaggcagatgatgtaagggatgccttacccgccatggaagcaagtactgctggggacgtcagacgctagaagagtggcctggaaggggtctgcccccagagccttcagagagagcatggcctggccaacaccttggtttcaacttctaccttccagaactttttttttttttttttttttttttgagacggagtctcgctctgtcgcccaggctggagtgcagtggtgggatctcggctcaccgcaagctccgcctcccgggttcacgccattctcctgcctcagcctcccgagtagctgggactacaggcgcccgccactacgcccggctaattttttgtatttttagtagagacagggtttcaccgttttagccgggatggtctcgatctcctgacctcgtgatccgcccgcctcggcctcccaaagtgctgggattacaggcgtgagccaccgcgcccggccccagaacttttaagagatgaaatttcttttgtttaaaccacccaacctgtggcactttataacagcgtccagaggaaacttacacatgtgtcctctctctctctccattttctcatttatcaataacaatatacctaacttagaagatcgtgaggattaaatgagatgatgcatggagaatgctaagcacgaagtaactacaaaacagtatttggctggattgtgatgataatcagagtgcccactcctgagcatggaatctggtgtggcctctgatcccacactgaaatagtaagaggctgggtgcggtggctcacacctgtaatcccagcactttgggaggcccacacgggcggatcacgaggtcaggagatcgagaccatcctggctaacatggtgaaacctgtctctactaaaaatacaaaacaaaattagccgggcgtggtggcaggcacctgtagtcccagctactcgggaggctgaggcaggagaatggcgtgaacccgggaggcggagcttgcagtgagccgagattgcgccactgcactccagcctgggcaacagagcaagactccatctcaacaacaacaaaaggaatagtaagacaatcccagctcagtctacttccttctgggtccttgtccgccgacctttgactggctgacacagacattcacgttcctttctagataaggatcaccttgtgaagcaaggggcagctcccacagccagatggcggtaggagtgcacaccctgtgctatggttggaatatcccctcaaaattcaactggacattgacttgccattgcaatggtattaagatgtgagaccattaagagctgattaggtcatgaaggctctgccctcattaatggttaatgctattatcacaggaatgagttagttattgtgagactgggcttgttataaaagcaaattcagcgtcctcttgatacttctttcacacttgtcctgtcttatccttctgccctctgccatgggataactcagcaagaaggcctttgccagatgccggcattttaatactgaaattcccagcctccagaaccgtgagccacataaatttattttcttataaattacccagtctgtggtatctattacagtagcacaaaatggaccaagacaccctctcactggcaagaccctctcagacgctctcccattgcctctcctatgtgcacagaccccaagcagtgtgtacacacgtgaaataattcataataaataatagaattgcaagccctgctggactgtacatgtgcgtggcataaacctttctccatgggaagatgatctcaggcaccccgttccctggagatgggggctgtgggaagcaagtagtgttaccagggagcattgtgtattataagaatgacctggattggtgagccggacaaggtcagtgagcagctaccgagacctctgcttctgcaggccatgtctgtggcagccaatggatactccagggccatggccgtgagctgctacaagtgtttcctgtggctttcttatgaaacttccttgtgcctcatgtcctgtccccacacctgtggtctccttctccagtatgtgagcccatactccttctccagtatgtgagcccatactccttctgcagtatgtgagcccatagcccatggggccatgggaacacccactgcagctccatcacggtgtgcacatgcactacttctggcctgtgtgcttgcacagactccagtgaaccagggaccactgtggcctcttgggtctgtgcgtgtagttgttaatccagacccaaggccactcttggccatgcaggagggtgttaaagcaagcccttcagggaggcacagttgtcttctgccatctctgcatgcaccctctctgtgcacgcatctttggtaggttgctggatgagtggagaaatcaaaggcatataagatacaaagcagagaaggcccataactatgggcatggaatgtgaaaaagtgtgcactttagggccaaccctttcctgtctattagcagccagccacaaaaccgagtgggaggtttccgacataccaaatcaaatcctttccagcttgataattaaattgagaaccttagatctaatactttccctcgctgagccctgaagcttacacattataagcagtgtcagatggctgggaacacatgcatccatgggcaggagcaaagagacagagagagaggagaggaagagagagagagaaagagaaggagaagcagcttagttgagcctgctcagatccctcctcccaatctctccaactggaggagaaatgggaatgactgagtcaggctagatatcagatcacatcctagttggaaaattcataaatcatttttaaccagtctttaaaaatgattacaacgaagaatcacttatctcagcagcacaaataggccaggacttaccgacttgtgacttttggctgttatggtcttcaacttgtcggggtcccagatgaccacgtcggcatccgagcccacggcaatccgccctttccttgggtacaggttaaagatcttggctgcattggtgctggtgacagcgacaaactggttctcatccattttgccagtagcctacaggcaagacccacagatgagaagagcatctcataatggggccaggaggaggggcagctgggcacaaatggaagactgccagctgaggccttgcaaggcttggaattctctcctctcccagctaaaaacgtgccatcatcaagaaccccagaaggcccagcctcatcagagaggacatttaattaaccgcacagaggtatgttgacgcaagagccactatgacatcttgtccatgtcaccaggccccagtttaacagaagattaaaaacctttggtttcaggtcagtgatcagagtgagacccagctcttcctctgcaacaggaattctctctctacccactcaacatcccaactcctaacacgtgtgcacatgcacacacacagcgttacagagccatttccacaggaactaagacgtggttgagaaacaaaacaaaacatttttcaatcttaagatgtaaaggacaagggtgacatccacaaatgcagaggcctctcccggacttgagctactatctctcaagttatgcgttccctcctgcgccctcctagtatatctgcttccgcctccatgtaagaagggaacttttaagaacccagcgtgcataatgcatcggctttcacagggcaggtagagtgtttctagaatgctcctgagaagagatccagccttaccaccgccttgtcccagacgaccgtcatccgctcctctatcccgttgacaccctcggggatcagggtaaagttgtccttgcccaccgccttctgggcagtgctgtagggacagtggccgctgcctgtgacctgcaagtccccactggcaaggacaaaacaaggtagagttcagaccctagttcattttgaaggcaaatcctgacttcagacaggtacatgcagcacagccagtgaatgaatgaatagataaggaagccagtgggtaagagagactctctagcgtgtgcctgcacgtgtcacaagtcagggatgccccatttatgtcactggcctcatgctttgcacgttacaaagtgagtaatgtgtgctgacatttgtcttcttgacataaggcagttggcttaagggctggccagagtgtttgtgctgtgcttgcagaacaaacactattcattggttacagcaaagtggcacaagttcactgggatttacccttttgtcccctggtgttttaaaaacaaatactctttgatatatcaggtgccctgagctgaacacctaagacaataaaatgaatggaccaggctgagtgtggtggctcacacctgtaatcccagcactttgggaggctgtggatcacctgaagtcaggagatcgggaccagcctgaccaacatggcaaaaccttgtctctactaaaaaaaaaaaaaaaaaattagccaggcgtggtggtgggcgcttgtaatcccagctactcaggaggctaaggcaggagaattgcttgaacccaggaggtggaggttgcagtgaaccgagattgcaccattgcactccagcctgggcgacaagagcaaaacgcagtctcaaaaaataaaataaaataaaataataaaataaaataaaataaaataaaataaataaaataaaataaaataaaaaatgaatggaccattattagtggttctaaatgcaaggtgaggaaggtgaggctgtcctccaatccagaggcccaggaaatgttagcaattgcctagatgcagaggagtatatttagaagttttcttcactcatttattcaacaaaattgtgttgcatgcttcctatgtgcccggtacaatttaaggaatggggactgcatctaagatcagaaagagagagcttctgcatgtgtcagctatactgagggatgggggagactggcaataagcagaggcgaatggggcacatgggcgctgttagagtgagtgtcagggattcaaccaaagcaggtggggatgaggcgtgctggggacaggctggagatgccatttccaggaggataatcagaaaattacgtcactgaggagccttctagcaaagatctgaaggaagtcacagagcaaaccatgtggcgtctaagaaagagggaactagccaggggttcccatgagtgtaaaggccccgaggcagggtcctgcctggggttcagggtcagcatgaagctgggactggaccgagggagccaagggcagaggaggcccagggagggaggttggtcagggcgtgtgcaccggattgagttctgccttgttggatgttgcagggacttgggtttcactggcagaggacttactggttccaagcagaggggtgcttgatctaatctaggttctaaatgtctgacagcagactgtgatgggtagggtggggtgggcccgtgtggaaatagaaagtcttggtcggaagccagggatgatggtggcctgagccaggatggccacagcagacaggtgaggcgttgtcagactctagggcctctggtccgtgttcctgacattttcttagatgggcaagactgtgggactagcagctttatgggggaagatctgcagttctttgtaaacgtgagctgcccaccagacattggactgcagatgttgagtaagcccttggctacgctagtcaaaggtttctgtatcatcagggggatggtgatttccacgtgggcgcacaccactgccccctcctccaaggttccttctgccaagaagccccatcttatcctcccctattgggcaaactcctactcatccccaagctttagtcttgatgccccctcctccagaaagccttctgcaagcctcccggtgggttctgagcatgcgtctctgcttccagagcggcctggacacttagcctcgctgtgtggccctgctattgctaagtgctcttccctcctggtggctaacagaagggaaggggctgaggtgctgggctccacagtgtgcgtgcaccacagcaagtgtgctgcaggcagcagcggccacttctggagcactcggttccaggtccttttcctgcactgtcccataggcagctctgccacaggtactgtctgcttccactttgagtaaaacgagggagacagagagatgtcacgggtgacgtgccaggtccggggtgacacagccttgtctccatccctgatcctgagtgcttcccgatacaccatggtgcctgccacagagcaggtgcttaacagtaggttggctcaacaggaggtggtcaattgatgtgaatggaacagtcactggatgccacagatcttcaggtccgtgagggcctgttgtaagccatatgagcgcagtccttgcagagcacggggcagagcctcctctacaatcatgagtccaaaccagcctgcggattcccaccattaactctctgcctccaaaggccccagctgcctcccccagccccacgttctcacaggtctcaccaggccagtagggaggtcaagtagtcgggcgtggtagggtccgggctcaggggaggggaagtcacgaacgccgcagccttggcccagttcttgctccagtaatgggtgccatcggtccccaggctggcggcaatgggctctccaaaaactaggggcccttaggaggggaaaacataagcctggttaaaagcaaatactctcttgaggcagatgtcaaaggcacaaaattggaagactgtggagggagaacggggctggctgaaggccagaacactggccaccgttcttgcaggcatcaccgcctgcaccgcagggaccttgggtgtccgggcccagctccaccacattgtcggcgccccgccacgcgctccatggggcgtacggcagctgactcacccagcaacctgtggatatggctgttgcttttacgatttggacattattatgtccttttatagatttgtaagccaagccatggagacacgatttactctctcagttagggttctgccagaagcagatcttaggaatctagttcaagagtcttatttgggaggtgattccaggaaacactggctggggattgaggaagtgacataaggcagggaaagcagccaataaagggagatttctcatcgaggcacagctgagggccctggcactcagtcctgctcgggaacacgcctcagggtcctcccaccccaggggaaagggagttggatgtgtttctgtcagcccagtgccggagggcggcttcccgagcactaacttcccagaagttcctgcttgtctttcaaggagtcggcctggcgggcttcttccagaaaagcctgcaggcagaggctcgggctccccaggaaagatctttgcattagagaccaagggcaagagatgtggcccgagaccccctgctgccctcgcctgaggccacctgctgcccagtaggagaggcagctgcaagctctgcccggctctagggcagcccatcaagcagcgctttctgcagcgaggggggtgccctgtatcacagctgcccaaccagcaaccaccggccacatgtggctgttaagctggtgtggctggtgccactgagaaactaacttgttcattttacttaacattacttaatttaaatttagatagccacgtgtggttagtggctaccttatggcttcctgtagctccagaacctgcctgcttacccgctcccggctggtaccgcttccagatttctgtaacctctctgagccccggtttccttatcttcaaaatggagctagtttcaggcaagctgtgctgttctagcctctacttgtcagcttgcccttaaaaacactaaaacaacatatttggggtccacagctgctctgtccaataaggcagtcctgagccgcatgtggccaccaataacctgaggctgtggttagtctgaactgagttgtgtacatgtaagatactgaattttgaagagagtacagaaaacatcatgcaaaatattaatgatttttacattgatgacatgctgaattaatatgtggatccattagattaaacataatatattattaaaattctctttaaatggagctgagcttatcgaggtgaatatcctaaggtcattgggaccaaagaattccagccaccatccttgtgtcaggagcatccccgctccacccctccctcctccggctgcctgtctgagttcgggagggagtgaacttgaacctgcaggacacccccttccaggccccagctgcccccagaaggcccagggccggctgcatacctttcttcctggccagagcgatgatgtcggctgcactcttgctcatgaccttggtgatgtacacagggcagttgatccggcccgcaatggtgatggcccggaacaccgcctcggcctccagctgaacacggcacacacagtgtcacaggagggaaggctggtgtaacagctaccacccatctccattttccttaattgaatgtgatcagaagggaaatctgctccattgaatgagaaggacatactgagtccaacagcgcttgacagtgccccctgctctccggggtggagcattggtctcacgctgggatacggcagcaacatccaagcgctatacaagtttatagcactgcctcccagttctgtcctgacctcaccatgggccaggaacatacagctcgtggccatccctgggctgtggagctcatgaagagcactgggtgggatctcaagcccctcaggacacggaacctgtccactcatgtggactcatgtctgtgtcccctgtgtccagcagacaccaggcccagggcatgggcccagaagactcggtaatgacctgatgaggacatcagaaaatgtcctcaacttggccaggcacggtggctcacacctgtaatcccagcactttgggaggccaagacggatggatcacttgaggtcggaagtttcagaccagactggccaccatggtgaaacccagtctctattcacgaggtcaggagatcgagaccatcctggctaacacggtgaaaccctgtctctactgaaaatacaaaaaattagccagtgtggtggcaggtgcctgtagtcccagctacttgggaggctgaggcaggagaatggtgtgaacccgggaggcagagcttgcagtgagccaagatggcgccacttcactccagcctgggcgacagagcgagactctgtctcaaaaacaaacaaaacaaacaaacaaaaaacacaaattagccaggcgtggtggcacaggcctgtgcctagtgctcctagctacttgggaggctgaggcaggagagtcacttgaacccaggaagcggaggctgcagtgaaccgagatcataccactgcactgtagcctgggcaacagagagagactccatctcaaaaaaaaaaaaaaaaaaagaaaagaaagaaagaaagtaaaaagaaggtgtcctcaactcaaaggatggctgccagggtgcccactctattccatgcccgatcagcttgccttcctccttccacactccctgcaggtgcatgcacatgcacccacactcacacactctctcacacacacacacacacactcactcacacacacacacacgcactgtctctctcacacacacacactaacatacacacactcacacacacacatacacacacagccagtccaggggaagtcatcctttttcaaggcttgggaacagggcaggcagtgggagttgtctcctgggtgctgggcttgggcatgcggctccactttcctattatccactatgccatgtcctccatgagaatccgtatccacttgggacactgaagcacccacggggccttggagtgaagttccaggaccctgggagaggcagcacctcttcctgtcttctccagccagcagtccccagggttcccggggaaaacaagatggtttgggatggtctgggagaggacacgggaagaggccgggtcctggctgggctactccagctggaacagcatcaaggtgagtgctcagtggtgagtgtcagagtcatgcccaagttgaggagtccttacctcttcaggtctgctcagggcatggccctcgggacccg

SEQ ID NO: 7038 - DNA, 425 bp, Homo sapiens
ctaagacagaaaatcggtaacagaagtggggtccacagaactagcaaacactacaaacaagggctttctaccccacccaccttcacccattgttcaacattgatttggcagcacacttctggaccactgaatcagaagggtcaatcacctgacttacaacaaaggccccactgcatcttaatgggggaaagaatagtctttgcaataaatggtgttgggtcaatgggagatcatatgggaaatggagaaccttcagtcctaccttatattgtacataaagattattgagagatggctcagagacctaaatgtgaaagataaaacttctagaaaaaacccagaagactactgtggtaggcagaataacgctccccgtccctgccaacaagatgaccacatcctaatccctgggcctgtgagtatgt

SEQ ID NO: 7039 - DNA, 349 bp, Homo sapiens
agtgtgcagttcggtgctttgagtaatcatttgattcgcacctgacgtcccccctggaatgtacaccattgaccggccacatgccacctggcatataacaggcattcatggtcacctggtggaaggaagggagggaggcctgggaatattcctttcctcctgtggcaactggtttggaaggaagggagggaggaacgctgagtatatactttcctcctgtggtgtatggattggaaaggaaggagggagggagggaggccaggaatactattttccccccatggcttatagatttggctgtgtgtcagcattacccaggggctcattaaaaacaacattcttagcccca

SEQ ID NO: 7040 - DNA, 832 bp, Homo sapiens
gcctcatggatctttctccccaaggagggacgtcttgaggggtccgagcctcaggccaaggacccctgatgcagactctggaatccctggcccaaaggcctgtctgggcccatctggggctgaggacacacagatacataatgacacctgcagaaatgtattctctgaggacacttagaatatgaggaagagggtgtggcccaaccctcacttcacctggggaggggcttcttccggacagtagacaccctgcccgtgcagagagatgtcatgggggcacctgctctccctgatagatgctgagagcatccagaaacttccagaccagccctctcaccacacccagaagaggcctttcccatctggagagaagcttccagaccagcccttcacacaccacagccaggaggggcctttcccacctggagagaaacttccagaccagcccctcataccacagccaagaggggcctttctcacctggagagaaatttccagaccatcccctctcaccacagccaggagaggcctttcccaccggtagagaaacttccagaccagcccctcacaccacagccaagagaagcctttccagcctggagagaaacttccagaccagccctctcactacagccaggagaggcctttcccgcctggaaacttccggacaagcctctcacacaccacagccaggagaggcctttcccacctggacagaaacttccagaccagcccctctcaccacagccaggagaggcctttaccacctggagagaagcttccagaccagcccctcacaccacagccaggagaggcctttcccacctggaga

SEQ ID NO: 7041 - DNA, 5230 bp, Homo sapiens
cctctgtctggcattcaagtccttcatgttctgagtttgtaaccagagagggtcttcggccccttagcacaggaccagacttataattagtgacatggatatttgttgaataagtggctgaataaatgaattttacttctctaacctgacctctctcttcacccctctatccagagccacacttatgctcacttttaaatgcatttttgcacacactatccctccttcctagaatgtccacctctctccaggtcatggtgtcacctaaaggaagccctctctgactgcgccatccttctgtgattgtctctcccccgccagcctttccctggcatcaagtacacactaactaccctaacatgggagttgtggttcctgaaaaacagggggcagcctcctctttttgccccccactgtctgcctcaggttgtgcagggccaggtactatctccaccaagcagcaggggcctggagttgggatccctgcctcagtccttctaggagcaagtggtttcacagtggaggcccagcccaggctgccctgagtagtaagacagggtggcctcaggggcaggacacagcttccttcccatgttctcctgcagagaagcagcgggagctggcccggaagggctccctgaagaatggcagcatgggtagccctgtcaaccagcaacccaagaagaacaatgtcatggcccgaacaaggtagaggccctccctaccccacctggaccctgccagccaggacctatttctgctggtcctgagcctccccctcttccctccctcctcaggcccagctcctctctgagaggagacagccttaacaggatccaaggtggggagggagggaagaaagtggtgggacggggcccaacccagtcccttgccaggtttctatgctccactttgccactctaactcccgaaattcttcacctaggctggtcgtccccaataaaggctactcctcacttgaccagagccctgatgagaagccactggtagcccttgacacggacaggtgtgtatgggggcttgggggtagctgggcagcccaaaggaacctgtatagcacaagtgggctgtacaggccacacctgctatattgtcagaattgggatattcttcagccagaatctctccaagggtgaattctccagggatgggaatttttttacaccagggactgggggttgaagagaggtggcagagagaggaaaggggggcctgcgttgtctgctgtcatcctgggacaactgatccaatggttgtccctaattggcctgtgatgttgtctctggacagcagaatatgatgcttaatgccccatcccctcaggaaggagccctactccctggaaaacacctggctagacttggactttgggaatatcctacaagtcagggtgatttgagtctacaaaaaaaaaaaaaaagatgagaagggggtgaaaggagtaactgctatatttagaaggaggttaaggatagcaattgattttaagggtggggctagggaacttgtctttaaaatcctgcatttgcacagcaagcacagttcgtattgagattttgctatttggaactgtaagggaggtataggatgctgcctaatgggaggtgggattgcagagagttttctatgtaatttcttggtatcactttccctctctttcctccatggccagcgatgatgactttgacatgtctagatactcctcctccggctactcctctgctgaggtgagcccctaccccttctcaccctagacaccaccgggcaggatcactgccatcccgggggagggctggggccaatgcccaagtacaaggaaaaagagggctgggcaaggctgggtggtgccctgcacagggtgggcctgggataggatggaagagaagtggttactggcctcaagtgcatggagcccagggttaggagtggggctttagattgcagcaggccatttaaatagaatgggtgtaaaatacaggtgatatcctctagtagccggcctgagataggggcaaaacccgaataggagcaggaccagaggtgtgaagttgaccatagaatggggaggggtgactagaaagagaggccagaggcgaaggagggcgcctaggcaggagcggggcctgggggtacagacagaccccggacagggcggggctgatatccagggcactggctggactggggcgcagacgggcctggagtggccgcagagctgtgggtggtgcctccctgccggtcgggcctgacctccctcccctttgcctacagcagatcaaccaagatttgaacatccagctgctgaaggacggctaccggttagatgagatccccgacgacgaggacatagacctcatcccccccaagtccgtgaaccccacgtgcatgtgctgccaggccacgtcctccaccgcctgccacattcagtagcgggcggggccactgcggtcgccggggcggggccgccaagggccgggtaggacgggcagaggccgaccccttcccagctcgtctgcctgcccccggccccgcgcccctacagccgccaacctcgtataacagtcattgcttcctcctatggtaggacgtgtacctctgtgtgttcatggagctggagtaaccatcactgggtctctctccacccggaaactaaggacgggtgggggccgtttgttcagttacatgggggaacctcacccagcaccgtgccccgcttcccagggctggccaagagagaagactgcacggcagggaggtcaacattaacgagtggggggatcacaaagccaggggcttggccccaccccagcgaagccatgaactcccaagccccggcctcagcctaaccaggaaaggggctcggagggagaaaggcccagggcagtggggacgggtcccagcacctcggagcccccttcacacgccccctaccggcccatgtttctatttgcatttccccctcctcagatgggaagcctggcaaagctgcccaaccgggtagtgcccctcacccatcggatcactgccttcttcctcctcttgccccattcacccgcttccttgcactctgggagtggggcagggtaaggtgggccttacagacaggctgaggtttgggtggtgtgatctgtcctaattggcccctcaccaatgcatctatctgtctgccaccagcctaccccaccctgcccccaccctcacccacgcttctgctcattggtctcaatcccagcctggaagcagggagtaaggctggactccaatggcccattcccctcaccccagcccaagacgtgggaggctgcttcccagtaagaatccaggagcaagctttggtgaatccagtgggctgagtggctctatggatgtggttgtttggatgtggtagggagtgcttagcagaatgtgtgtgtatctctgaggctgtcagggggtgggtgggtgtgtgtctctgttggacctgtctctcctcagtctattcctgtcatatatgtgggtgtccctggtagggaagtgcctgtgtggtctgtttacagtgcagaaggcggctcagcagtgcaatgggctgacagccttggaccgggagtcagaagcctgggttctggttgtagctctggcccctccctgtgatcttcaacaagccacttgctttctctcgtcttcagtttcctcaactagaaaatgaacagcagctgaaattatgttgaagatccttttatacctgaaagagtttcttcatagaaatttctgtggtggggagggggcaatctctgtgtgtctcagtatacctaaaggttggggtggggcggagttgtgtgtctctgtagaaaggcgaaggggcagttcctatcaggactgtgtatgtctgagcacatgtggctctgtttgggattacgtgtttgtctgtgaatgtgtgtgtgtgttggagggttgtctattgtgtgtggctgtatagggtgtctgtagatcaagatgtgtatacagctgcttctgctattgctggtttgggggaggggactggaaagctgagactgaaaatcaagagggaagaggtgaggaaggcccacccctggggctgggcagtgtagacctgccaccgtgtgaagaaaaatgaaagcacagatagcctaagactgcacaggcctgtgcccacataccttatagcacaggcccaggtggatcatctcatgctaacaccccacatgtgctggtggatccactcccatggatccactcacatgctgcaggcatgcagtagactcacccacagcccactctctggacaccaatcctgggaggtgggagctggaatggggagcaatgagaggagggagtgagactgttggcttaggaagggtggtacctctccctgcatcatacccaggaactgccagctccaaaatattggggtacagctcaccaccccccactccgccaacccattcctacctcctctagtgcagggacccaagttagatgatgagaaaatgccaaacaaagggaggcaaggacagagaaggtacctgcaggacccacaaggcccatactggcccccatctgaacccacctctcccacccagatcaacatccccccaacccctgtgcccccatcatctggaccgcagagccagccctcccactaccaccaccaccaccccggggctccttggctcacctttctagaacatgggtacctcctctttttgggggctcatttagactgctgcctttgctgctgacttgcagtgtgactcgggcccattgttcaatctctgtggccctgagacaccagggaaaatctccccccccacaggacatactagttccctggcaggcaagggcttccaactgaggcagtgcatgtgtggcagagagaggcaggaagctggcagtggcagcttctgtgtctagggaggggtgtggctccctccttccctgtctgggaggttggagggaagaatctaggccttagcttgccctcctgccacccttccccttgtagatactgccttaacactccctcctctctcagctgtggctgccacccagccaggtttctccgtgctcactaatttatttccaggaaggtgtgtggaagacatgagccgtgtataatattttttttaacattttcattgcagtattgaccatcatccttggttgtgtatcgtgtaacacaaataatgatattaaaagcatcaaacaagcca

SEQ ID NO: 7042 - DNA, 414 bp, Homo sapiens
cttcccagggatggggctgagccaggtgatatcacaatgggcagtgcccatcctggagggggcatcagtgtggggtgggagcaggaaggctgttggggaaggaagctgagagatcctctgcaggaggggattatagcagctaagggcacctgccaggctggaggtgtggcctgtctaggggaagggtggtcactgatgtccagcaggagcccttgacaggtagagcccaccacggcatctccaagaccacaccatgttcctgttctcccgtaagaccaggacccctatcagtacctacagtgactcctacagggctcccacctccatcaaggaggtctataaggacccacccctgtgtgcctgggaagccaacaagtttctgactccggtaagtgggagattggtggggagggg

SEQ ID NO: 7043 - DNA, 3029 bp, Homo sapiens
agtataaagactgaaccaaaaggagacagaagacaggctgggagatcactcaggcaagaacttaaggcaaaatcaggggcaacagatagagaagggaagaaatttgagattcatttcagaagttgacaggacttggtgattaagctaatccaacagagaaaaggaaaagtcaaagatgcttccatagtttctagtttaggaaatcagtgatgacatcaattgagctaatgcaagaacaggtgaagtgagaagattaacaattcctgtgttgaagataatgaagttcaaatacctctggaggcagggcaagttacccaacaagaagtcaggctttttaagtttgaatttcaacaacagggtcgagaatgggagcacatgaacactattactcataagagagaattttaaacctgtggacacagtcttaccctcgatgcaatttcactccatcttgaggcaactgtcaagagttgaccagtttcatttactctcatagttgtaaaaattccacaaaattgttaaagtctctgtaagcgataactttaaacagtcagagcttttgtcttgttctgagtcatttttcccctttcctctttgtatgccattctttctgtcaaactatctagttaaggaagatatgtgaggtataaggatgcataatataaaaaaatttttgctattcttattaaacattttgtcttaattgtaaaggtaaagaaaagaacattcgactattctaactttaggaaaacctaagttaaataatgatttacctatgtgactctccactaattttctcttgcaaatcatcaccccttaattaactgacatccccaaggcagtcaactcaagctgtagctttaaccacagaggttaaacaattcacagtcctgttgttgctgtcagaaacccaagttacactgtacctttgtctaatcaatggtgccctagtttggtgggagatggagaggaagggacctgttggcaaggaaacagctgcttccttcctgaacaagggaaaaccagtaaggtgacagatgggcagagcagaaaagtagccaaaaattgctgtggctcctgtttggcaataatttctggaactgaggcacaactgaatattttaaagtatatcaacaattgagagagtattgtttacctgagtgcgccaaagttcaacaagccttcccacacgtttcccacatttgaaaaacttttaagtttgcagtagtacaaagagcttagccttagcctatgtatagtgggcaaagactgcaaggcactgtcccatttcactttaggattacacccaagcaaatgcactttccggttaaaaaaaaaaaggaaaaaattttattttctctatagtagttatagttgtatgactgactagaattactattaaaatctcattaaaaatgtttttcttaaaagtttacttttatatacttaatttgaaaagatttgttcaaacttttataatttgttctttaatcattccccctcccatccacttcagtacccagaaaactaaatatccaagaattcctgggtaaaacagacaaccactagatagatataactaacgtatttttttaagctgtatagttcttcatcaaatggaaatcggcaaccactgaaaataacattaaaaattagtgtgggcatgaagtatggaattttaaacatcagtttactatgctgattaagtcaacatttatattttcatcagaacttaataatcccataaataaatagagctctcagttatttaaaaaaatcaagggataacatatgtatttagacatattagcagcgtaaagatgtatgcttcaacacacttattggggaaacgtctgaaaatattactacactgaattcaagggtatccaaaggaacctgacatagaagttctctagaataacatcatttcagggaatttcaaaaaagaaaaggggtcaaataggaaatagcctcaaattaattgacaaagttcagtgtttgccccaactagattattctctctctccactgcaaaaagaaagtctcaggatgagtgaatcacttagacgaaagttcatctagtggaataaatggagaagccgcttgggcaggtgacacaggagagtcggtggtagtgctgactttcgctggtgagttacaagaagatccggcactgctgctgtttccatcaagggtatccgaagatacacacacaccaggatctgacagctgtgcaacgtcagaagaaagcatgttggtgatgccctggaaaaatctctttggctgatattcagtttccatttcacattttcttttcaatggtccaagaacacttggtctaatgcaattgatggggctctggcttctccgggtggtaaatcgggtcgttgggctgggaatagggcttggaggcaatccgttgctacttacaaaactttgcaaggatggcgaaaaacactgcttcccaattccccgagtgggtgacggtgctggtgacacaggaatgaaatcgatgcgcttgggggaggcggatttctccacgtcgttgtcactcaggctgaaactttcctcccaggagtggcttatctgcattgcggtctgcacctcccgttcgtggaccgtctctcggttgatcaagtccatgccctcttcttgtttgatctggtgcaagcggctgctgtgcatgcggacaggggaggccggcagcagcaggccgtggcggctcgggaacgttgtgctgttccgcctggcgctcggcgcctcggcctggaacaccggcgaagtgtcactgaggccgtggatcaggggggcgctgttagacctcctgaggcccccgccgccgccgctgccaccgccctccgccgggctcccgcccgtacccgcaggcagctccaggtctagctccatcttctcctgagccatgtcgggggcagggaggcgggggaggtgctcagtcagggacctaggattcccattccccgcagtccagggccgccgccgctgccgccgccaccgagaatctgtcagcg

SEQ ID NO: 7044 - DNA, 4551 bp, Homo sapiens
tttcctcatttaagtcttgattccttccccaattttattgccaaataaactggtctcttgctacaggtatgtaactggttgaactaataaatgtgaatcactggaaggcaatctgatacaagttattcttgattacaatcaatcttttaagtatgcttaagggtcctaacatccagcagccttggagttaatgatctttaatgatttctcccatttatactgtgtttttaacaagcataataaaggaaaatataccagaggtttattaagtatgacaaactgtactttaaataaatgttgctattgactttaggacttcttgcacaaagtttatagattagcaatactaataccttaaaaatgctttttgaaggataattcttacacgagctaagtaagcccttacagtctacagaataatgatggacgttatgaacaatactatgataacgtaaattgtccacatgcccttagaaccttatctgatttaaaaacttcccatctatatagaagaataagcttacagaaataatgtttccataccttcggggaaaaggatctaaaataggagagaacatgatgtatttaaggaaaagaaaggcaagccagtgagggcgaagcacagaaaacgaggggggaggagggaaggaccaaattcctcagggcctcctagcccagaattaatacattttggcatactcatgagaacaggaagcaaatgaaaagcgttcagctgggagatggaaggatcaggtccgcaattttaaaagaatgactctagttgctgtatggagaatgaatggatagccgaccagagtgagtgtgaggagcacaagtgggagttaggaagttgcttcagaagcctaagagggaaatgctggtagcctggatcagagtggcaatagaggtagaaataaggagatagattctagctgataaaaatcagtaagacttgaggaatgattagatatggggaaaagtaaagaagagaggtgtcaatgacatgttggtttcctgcatttatatacatatatacatggaaatgccagtaacacatcttgtacaatagatatcaagttgttaacagaagttatctgtggaaagggaagatgaattttacataattaaaagcagacttttaaaaccacacagatatgtacaatgtttaaatattttacaatcagcaggtatacattgccttcatacttaaactcacgtgcaatttgcctccctgaaaaggataggaattatcccaaagaacagacacaagaaaagtacatgacatatttaaagaatatcaagtggtctaatgtttgcagaataagaaggaaagatgtatactggaacagagatgaggagaggattgaagctatttcagaatatggccagatcataaaggtccttctatctgaggctaaagaaatcattccttaaagagtaggaaatggggaagcaagtgaagttttcaagcaagagggcgaaaaatatcaagtttaaatttcagaaagattactcaagaggcagtataaagactgaaccaaaaggagacagaagacaggctgggagatcactcaggcaagaacttaaggcaaaatcaggggcaacagatagagaagggaagaaatttgagattcatttcagaagttgacaggacttggtgattaagctaatccaacagagaaaaggaaaagtcaaagatgcttccatagtttctagtttaggaaatcagtgatgacatcaattgagctaatgcaagaacaggtgaagtgagaagattaacaattcctgtgttgaagataatgaagttcaaatacctctggaggcagggcaagttacccaacaagaagtcaggctatttaagtttgaatttcaacaacagggtcgagaatgggagcacatgaacactattactcagaagagagaattttaaacctgtggacacagtcttaccctcgatgcaatttcactccatcttgaggcaactgtcaagagttgaccagttccatttactctcatagttgtaaaaattccacaaaattgttaaagtctctgtaagcgataactttaaacagtcagagcttttgtcttgttctgagtcatttttcccctttcctctttgtatgccattctttctgtcaaactatctagttaaggaagatatgtgaggtataaggatgcataatataaaaaaatttttgctattcttattaaacattttgtcttaattgtaaaggtaaagaaaagaacattcgactattctaactttaggaaaacctaagttaaataatgatttacctatgtgactctccactaattttctcttgcaaatcatcaccccttaattaactgacatccccaaggcagtcaactcaagctgtagctttaaccacagaggttaaacaattcacagtcctgttgttgctgtcagaaacccaagttacactgtacctttgtctaatcaatggtgccctagtttggtgggagatggagaggaagggacctgttggcaaggaaacagctgcttccttcctgaacaagggaaaaccagtaaggtgacagatgggcagagcagaaaagtagccaaaaattgctgtggctcctgtttggcaataatttctggaactgaggcacaactgaatattttaaagtatatcaacaattgagagagtattgtttacctgagtgcgccaaagttcaacaagccttcccacacgtttcccacatttgaaaaacttttaagtttgcagtagtacaaagagcttagccttagcctatgtatagtgggcaaagactgcaaggcactgtcccatttcactttaggattacacccaagcaaatgcactttccggttaaaaaaaaaaaggaaaaaattttattttctctatagtagttatagttgtatgactgactagaattactattaaaatctcattaaaaatgtttttcttaaaagtttacttttatatacttaatttgaaaagatttgttcaaacttttataatttgttctttaatcattccccctcccatccacttcagtacccagaaaactaaatatccaagaattcctgggtaaaacagacaaccactagatagatataactaacgtatttttttaagctgtatagttcttcatcaaatggaaatcggcaaccactgaaaataacattaaaaattagtgtgggcatgaagtatggaattttaaacatcagtttactatgctgattaagtcaacatttatattttcatcagaacttaataatcccataaataaatagagctctcagttatttaaaaaaatcaagggataacatatgtatttagacatattagcagcgtaaagatgtatgcttcaacacacttattggggaaacgtctgaaaatattactacactgaattcaagggtatccaaaggaacctgacatagaagttctctagaataacatcatttcagggaatttcaaaaaagaaaaggggtcaaataggaaatagcctcaaattaattgacaaagttcagtgtttgccccaactagattattctctctctccactgcaaaaagaaagtctcaggatgagtgaatcacttagacgaaagttcatctagtggaataaatggagaagccgcttgggcaggtgacacaggagagtcggtggtagtgctgactttcgctggtgagttacaagaagatccggcactgctgctgtttccatcaagggtatccgaagatacacacacaccaggatctgacagctgtgcaacgtcagaagaaagcatgttggtgatgccctggaaaaatctctttggctgatattcagtttccatttcacattttcttttcaatggtccaagaacacttggtctaatgcaattgatggggctctggcttctccgggtggtaaatcgggtcgttgggctgggaatagggcttggaggcaatccgttgctacttacaaaactttgcaaggatggcgaaaaacactgcttcccaattccccgagtgggtgacggtgctggtgacacaggaatgaaatcgatgcgcttgggggaggcggatttctccacgtcgttgtcactcaggctgaaactttcctcccaggagtggcttatctgcattgcggtctgcacctcccgttcgtggaccgtctctcggttgatcaagtccatgccctcttcttgtttgatctggtgcaagcggctgctgtgcatgcggacaggggaggccggcagcagcaggccgtggcggctcgggaacgttgtgctgttccgcctggcgctcggcgcctcggcctggaacaccggcgaagtgtcactgaggccgtggatcaggggggcgctgttagacctcctgaggcccccgccgccgccgctgccaccgccctccgccgggctcccgcccgtacccggaggcagctccaggtctagctccatcttctcctgagccatgtcgggggcagggaggcgggggaggtgctcagtcagggacctaggattcccattccccgcagtccagggccgccgccgctgccgccgccaccgagaatctgtcagcg

SEQ ID NO: 7045 - DNA, 175 bp, Homo sapiens
gcctgccatccaactgcaacctggcatccatcatagcctaataagccttctacttgtccttaacttactcctttagattctcagaggcaacattaaacctttactgcactcaagcttccaaatgatctcctgtccctatcctcatgtatcttagattcctcaataattggaaaat

SEQ ID NO: 7046 - DNA, 2727 bp, Homo sapiens
ggaaattctatttttaaatacatgctactttaaataaatgttacttcatcatttgcaaatgactattcaatcaacatgtataaaagttgtggatttctttgcttttatgacaaaagtggtattgtatttttaaactgatcactttattaggtcagagagggtatagttcaaagtgtaattatttattgttaaattgtatatttacaaacattttagttttgaaccattagatatttatgtaatttaagtatgaaagtttaaaaatggttcatataataataggcatgtgataaaatgtcatgataaaagacagccaaataaatattatttcatcctacttagaaagaataattttccagaggaactttactcagttttagagagaaatccaagaatagtgttcttctttcatttttcaacatgatataatcagagaatttggaaaactggtaaatataacctatagtaaaatggtcaggaaaaatactcatttccatttatgataactgaagtgacaaaaagactcctagaagttacattttccctttgtggtatattaaagaacaatgaatataccacactttattctaaaaaggactttttttgtgaatgtaaaggataatgatcagatttaagtttctttctacaaccacttctaattctattcacgtgatctatttaaaaattccttacttcaacatatttaaatgtagtagccattttgaaacattttagtccctcaagatacagaaatatacaaaaaacatacaagtttcagatccagaattcagtttctccctaaagggaaattcatcatccaatcttctggcgttctttaaactagacactagacccttttcatctagatattgcatatctcatatatattatacatgcatacatgtatgtgtatgcgtgtatttttaaaatcagtatttgtagtaacatatcaaaaaggaatttctaatattccaaggttctaatgttagaatagaaacatattcacaatagtgtttaccagtttcatatatttagagtagtttcacactaaaatgagtgattaggctaggcacggtggctcatacctgtaatcctcgtactttgggaggccaaagcaggggggcttgcttgagctcaggagttccagaccagcctggggaacatagtgagaccctgtctctacaaaaaacatttttttttttaaattagctcctcacagtgacacgtgcacctataattccagctacaggggaaactgaagtgggagtatgacttgagctgaggagttagaggcttcagtgagccatggtggcaccactgcactctatcctgggtggcagagtgagagcctgttgcaaattaaaataagtgattaggacaaaaaagatatagggccaaataaatagaatgcttacccacctcaaataaaaagaaaataatatttgttaatatgaaggtgatactggataagtgaagtgcctaggacttttttcttaaataatctagtatattttatgtgaataagggactataaagtagggagatcagcaggactgtaaaagtgggtgtgggagaagaaagtttgctagtcaaacttggtttaaattgactgcctttgtaatagcatgtggctgaatgttttgatctatttataatgaatattttaaggatttgctaatttttgaaaattggcaagaaatactcatttttttcctgtcttgaggtatgccaaaaataaaacttgctagaataaaaaaaaatgaaagtgaaggaatgtcttgtgtgtgctaaaacacctccacttaaagagtttgatatccactagaaaatgttgtttctttaaaaaggggacaaagggcatttgatgcttctcacctttcacggttgtgacaattctcttagacatcttaaattctctaagtggagatttcttatattcttcacagtacacctgtttaaaaattgtagtccacagaaatctgaaactacaaaagaaacttttctcaagatgataactcacaaggagtgtaaattacagttacttcatttgtgggagttttcctatcacttttcaattaataagacaccctggttatgggaattttagtctcactgaaaaactcaatttttctatgcaaattaaatttgcgtatgcaagttacaatttgagtttaagcttaggcctacgctgatggagggataacaggcaaactggaatgtggtacttgaccatacttagtcagtgcaggaaaaacaacaaaaaaatcttcagaaactttcttaccattgacaggggctagtgtcgatattccttgtggttttcccttattgactgtatctacgccatcacatagcaaaatgtacacaacagcagaaagtagacattttactcatagtttctgcaaaatctgaataaagataaagtttttctattataaataatgccaaagatgtggtcttatagatgtatgcattctaaggatcagggaaaggctgtgaaataaaactctaagttgaacaaaattcaagtagtttatcttttaacagaaatatctccataaaccatatcgatataaaggtgaacaggggttggacacagtggctgaaagcccataattccagtgttttgggaggccaaaatgggaggatggcttgagaataggagttggagaccagcctgggcaacatagaaagacctcatctctacaaaaaaaaaaaaaaaaaaaa

SEQ ID NO: 7047 - DNA, 2721 bp, Homo sapiens
ctgtctcccagttggttgcacagcaggttactcagcagtttgtgcctcctacacagtcaaagaaagagaaaaaagataaagtagaaaaagaaaaaagtgaaaaggaaacaactagcaaaaagaatagccataagaaaaccaggtaaatgtgaagagtgttttatgacatttttgaaataataaaaccatttaatttttttaaccttgacatactaatatacacaaagtggaagtaaaatatttggtctcctttattataaggtatcaggaaaggttttactgagtttgaaagatacataggaaattaaacacagaagccagaaatacaagcttaaatgtgatgatgcttttttctttttacgagattggaagacatttgtgtctggatttgttttgttttgttttgtttttcccttaagaagagctatttgaaccaggagtggttttcaacataccgaacagataattgcatgggttttaacctatcaaaatggtcatgcgttcagtcataacaatcatgatacccttattagtgtgtgtcagtggagtaacagtcttccttgcatatagctcaaccttagcttttatcaccttcctccatggtgcaactatttcattgttgtctaaaacatctattttaataaaattaataagctgtctgcaaaattatgatacagctatagaagcacaagttctacttctaggctgtcacagttttttggttgcattgaagaatgttcatgaatgattggtttgattaatgttaatgagttgaaacattttatgatgtttttgtggctagttacacataaattgccttaaatacatgtattcattttgttacttttaccacttttattatttattatatgctcagaaatttggtagagggaaaagctagtttaaaatttcatttttttatgtttaggccaagattgaaaaatgtggatcggagtagtgctcagcatttggaagttactgttggagatctgacagtcattattacagactttaaggagaaaacaaagtcaccgcctgcatctagtgctgcttctgcagatcaacacagtcaaagcggctctagctctgataacacagagagaggaatgtccaggtcatcttcacccagaggagaagcctcatcattgaatggagaatctcattaaagtttattttctccaatttcttagtcacttctgtcctaccatgcaaatacacagattatgccaagaggtaccacattttcatgacagatacattcatgcacaatccataatttgagttttacataaaatagaaatttgttagaatttgttagattttattgcaatgatgcctaccaaacatttccagacttaacattttggtctctgcagttaagtgccatgaaaatgtggttgaattattcattatgcagtgttattggtaagtgtattttcacttttagtttagtgaattctaacacataattcttgaattctctactattggcatgtaacgaatttaaattttttataacatagtgcaagctgcctaaatatgtattatttgagaattgtgaaacagatagttatatgtatacaagtcaaagaacaacttaactattgctgcaacaggtttttcttaatggttatcctcttaaatacacctgctggtacttggtgtggttaaataggaaaattgttattaaataaagaatttgtatgaacctttgccaatgtttttgacacgttttactaattattgttcctgaattatgtttctggttttatctattttttgaggtttttttgtttgcttatttttcaaaacattcatttattgtaatgtttactagcggactagtaaacaataaaacattgattatttagctttataattcaggtttagtgctattgtcattgaacactggtattttctgtatcatataaaacattaaaattcaaataattataagcatttggcaaaaacaagagaaaagaaacttgccatattttacaagctgcaattttagaaaagctttaacttaatgatagttttatcattgttttcttgtcccaaacttatccagggccatagaagtatgaatctaattaaaacagaaatgggaattattgcacagaaatgggaaataactaattttaaatcagtcaaattggcttcttattaaatacaataattcttatgaaaatcatagtaccctattttcagacacagctgccagtttacacatttctcagtatcctgaaaggaaaaaagtatagccccacttatactatgtaaaattaccaataaaatatttttatgactacagattttgcatttttgtttacaactatttaaagagttttatgttgtatttagaatttcaacctagaaaccacacagtacttaaattctcctggggtctcctgctttctcttaaccatttgcttaatatatatctacctaaaggagacttctgaattgtaaatgaacttaaaaatagaatgtggatgcaaaatatcacataagacatcatgataacatttgaagaaaaaataaaactgtagaccctaacagttgtgatatttggtggtttcatgtggtaatgtaattttctgtttaattacagtactttttacaggcacagtggtactgtcttttttgtaagatgctagttgtgaaatacaattaattgcatacagtaaaagtctgtgattaaaacatttatatacctca

SEQ ID NO: 7048 - DNA, 1728 bp, Homo sapiens
  SITE (1591): n equals a,t,g, or c
  SITE (1608): n equals a,t,g, or c
ggaaacctcgacctgtctcccagttggttgcacagcaggttactcagcagtttgtgcctcctacacagtcaaagaaagagaaaaaagataaagtagaaaaagaaaaaagtgaaaaggaaacaactagcaaaaagaatagccataagaaaaccaggtaaatgtgaagagtgttttatgacatttttgaaataataaaaccatttaatttttttaaccttgacatactaatatacacaaagtggaagtaaaatatttggtctcctttattataaggtatcaggaaaggttttactgagtttgaaagatacataggaaattaaacacagaagccagaaatacaagcttaaatgtgatgatgcttttttctttttacgagattggaagacatttgtgtctggatttgttttgttttgttttgtttttcccttaagaagagctatttgaaccaggagtggttttcaacataccgaacagataattgcatgggttttaacctatcaaaatggtcatgcgttcagtcataacaatcatgatacccttattagtgtgtgtcagtggagtaacagtcttccttgcatatagctcaaccttagcttttatcaccttcctccatggtgcaactatttcattgttgtctaaaacatctattttaataaaattaataagctgtctgcaaaattatgatacagctatagaagcacaagttctacttctaggctgtcacagttttttggttgcattgaagaatgttcatgaatgattggtttgattaatgttaatgagttgaaacattttatgatgtttttgtggctagttacacataaattgccttaaatacatgtattcattttgttacttttaccacttttattatttattatatgctcagaaatttggtagagggaaaagctagtttaaaatttcatttttttatgtttaggccaagattgaaaaatgtggatcggagtagtgctcagcatttggaagttactgttggagatctgacagtcattattacagactttaaggagaaaacaaagtcaccgcctgcatctagtgctgcttctgcagatcaacacagtcaaagcggctctagctctgataacacagagagaggaatgtccaggtcatcttcacccagaggagaagcctcatcattgaatggagaatctcattaaagtttattttctccaatttcttagtcacttctgtcctaccatgcaaatacacagattatgccaagaggtaccacattttcatgacagatacattcatgcacaatccataatttgagttttacataaaatagaaatttgttagaatttgttagattttattgcaatgatgcctaccaaacatttccagacttaacattttggtctctgcagttaagtgccatgaaaatgtggttgaattattcattatgcagtgttattggtaagtgtattttcacttttagtttagtgaattctaacacataattcttgaattctctactattggcatgtaacgaatttaaattttttataacatagtgcaagctgcctaaatatgtattatttgagcattgtgaaacagatagttatatgtntgcacgtcaaagatcancttaactattgctgcaacaggtttttcttaatggttatcctcttaaatacacctgctggtacttggtgtggttaaataggaaaattgttattaaataaagaatttgtatgaacctttgcc

SEQ ID NO: 7049 - DNA, 2733 bp, Homo sapiens
ggaaacctcgacctgtctcccagttggttgcacagcaggttactcagcagtttgtgcctcctacacagtcaaagaaagagaaaaaagataaagtagaaaaagaaaaaagtgaaaaggaaacaactagcaaaaagaatagccataagaaaaccaggtaaatgtgaagagtgttttatgacatttttgaaataataaaaccatttaatttttttaaccttgacatactaatatacacaaagtggaagtaaaatatttggtctcctttattataaggtatcaggaaaggttttactgagtttgaaagatacataggaaattaaacacagaagccagaaatacaagcttaaatgtgatgatgcttttttctttttacgagattggaagacatttgtgtctggatttgttttgttttgttttgtttttcccttaagaagagctatttgaaccaggagtggttttcaacataccgaacagataattgcatgggttttaacctatcaaaatggtcatgcgttcagtcataacaatcatgatacccttattagtgtgtgtcagtggagtaacagtcttccttgcatatagctcaaccttagcttttatcaccttcctccatggtgcaactatttcattgttgtctaaaacatctattttaataaaattaataagctgtctgcaaaattatgatacagctatagaagcacaagttctacttctaggctgtcacagttttttggttgcattgaagaatgttcatgaatgattggtttgattaatgttaatgagttgaaacattttatgatgtttttgtggctagttacacataaattgccttaaatacatgtattcattttgttacttttaccacttttattatttattatatgctcagaaatttggtagagggaaaagctagtttaaaatttcatttttttatgtttaggccaagattgaaaaatgtggatcggagtagtgctcagcatttggaagttactgttggagatctgacagtcattattacagactttaaggagaaaacaaagtcaccgcctgcatctagtgctgcttctgcagatcaacacagtcaaagcggctctagctctgataacacagagagaggaatgtccaggtcatcttcacccagaggagaagcctcatcattgaatggagaatctcattaaagtttattttctccaatttcttagtcacttctgtcctaccatgcaaatacacagattatgccaagaggtaccacattttcatgacagatacattcatgcacaatccataatttgagttttacataaaatagaaatttgttagaatttgttagattttattgcaatgatgcctaccaaacatttccagacttaacattttggtctctgcagttaagtgccatgaaaatgtggttgaattattcattatgcagtgttattggtaagtgtattttcacttttagtttagtgaattctaacacataattcttgaattctctactattggcatgtaacgaatttaaattttttataacatagtgcaagctgcctaaatatgtattatttgagaattgtgaaacagatagttatatgtatacaagtcaaagaacaacttaactattgctgcaacaggtttttcttaatggttatcctcttaaatacacctgctggtacttggtgtggttaaataggaaaattgttattaaataaagaatttgtatgaacctttgccaatgtttttgacacgttttactaattattgttcctgaattatgtttctggttttatctattttttgaggtttttttgtttgcttatttttcaaaacattcatttattgtaatgtttactagcggactagtaaacaataaaacattgattatttagctttataattcaggtttagtgctattgtcattgaacactggtattttctgtatcatataaaacattaaaattcaaataattataagcatttggcaaaaacaagagaaaagaaacttgccatattttacaagctgcaattttagaaaagctttaacttaatgatagttttatcattgttttcttgtcccaaacttatccagggccatagaagtatgaatctaattaaaacagaaatgggaattattgcacagaaatgggaaataactaattttaaatcagtcaaattggcttcttattaaatacaataattcttatgaaaatcatagtaccctattttcagacacagctgccagtttacacatttctcagtatcctgaaaggaaaaaagtatagccccacttatactatgtaaaattaccaataaaatatttttatgactacagattttgcatttttgtttacaactatttaaagagttttatgttgtatttagaatttcaacctagaaaccacacagtacttaaattctcctggggtctcctgctttctcttaaccatttgcttaatatatatctacctaaaggagacttctgaattgtaaatgaacttaaaaatagaatgtggatgcaaaatatcacataagacatcatgataacatttgaagaaaaaataaaactgtagaccctaacagttgtgatatttggtggtttcatgtggtaatgtaattttctgtttaattacagtactttttacaggcacagtggtactgtcttttttgtaagatgctagttgtgaaatacaattaattgcatacagtaaaagtctgtgattaaaacatttatatacctca

SEQ ID NO: 7050 - DNA, 2125 bp, Homo sapiens
tactcatctttctacatagacgggaacacggtgtagcatggagattaagcgtgctaactgacacctcatgtttgaatcctgttgtagaatggaaatgagcttaaattacccaagcttactttccatctataaaacagggctaataatggtaatcacatctaatttatagggtttttgggaggattaagtcaatccgtgtaaaattcttaattatctgacacatactggtcactcagtaaatgtgagcttttaccattgttataggtaaaatcccattacaaaaatacaaaaatattttttgtaacagttattttcctgccctcttggatgacctaaagtaatagtgttttatagatttcactaaattttcagtgtaatatcagatgttttctctggatgcagaaagaccatctttccataattaaagaacctggtgggtgtgcactatgagattggagaaatgaattaagttgacttgaaattattttacttttattaatcacaggtatctcaacctgcctttgtttcaccctacttcaagtacacttccacaccaggaaaacagacccaaattccataaacagaactgacgttaaaatatgcgaaagattcagaacctaggtttagggtacatgtttttctctgtttcatgaacttacagtgtggtttgagcactgggttcttttagccaaattccatacaaaaagaatttggatgttttccagcatttattaccttactttgctataagtaagagtgaagataggccgggtgtgatggctcatgccagtaatcccagcactttgggctgaagcaggcagatattttgagcccaggaccagcctgggcaacatggtgaaagctcatctctatgaaaaaatttgaatatacatatatatatatatgtatatttaaaaagtgaatataatttgaggcacagaagaatattcttaaaaccttttgtattatacaatagaaataaaggttttatttttattaaatgctttcctaaaatgatagtggataatagacaaagtgaaaacatttaaaaaggaagagaaacttcagcctttctaagttgatagcatgtttattaacttttagataaagatccttatagactgaaagaatgtagcctctgcattaatggtaaatggtctagaagttttcgtttccactgaggcttccgccactcgcttttttaaacttcctgctatggtttggatatggtttgtcctcaccaaaactcatgctgaggcctgagtccccagtttgattgtgttggtaggtggtgcctttaagaggtgattaggtcattgagatggattaaaggctttctcatgaggctcagttagttctggaatggattcgctcttgcaggaatggatgaattctcacaagagtgggttgttatgaagtgaggatgcttcttgtgttctgttctctttgccctcctcagttcaccatctgctttccaccatgagttgaagcagcatgaggccctcatcagatgggctccctgatcttggactcctcagcctttggactcataagccaaaataaatctgttttctttataaattgcccagtctcaggtattctgttatagcaaaaaaaaaaaagtggattgagatacttttttgctctgctacttacctcttttccagaatcttttaaggacttgatgtaggaactgagctatttagtaagtcattggtagaagtttccgcactgtactttgaaaattaagtgaaagcagaaaagtgagtgcgtatgtaaggaaaataatagtaaaagaacgctttgacttcttagcactcgccctctcctgtatatccccaggcaccttcagttgtctggaacaaagaatgtaggaaaaactgaagaaattcagaacagttaccaatgacaaaaatcactgatcagaataaaaagacaaggttacagaatatacgttgttactgatcatttttcagaagcagaaggaaaagaatgccctccctggccattgagggtgataaaaagtaagccccactcctatcacaggcaatgaaggacagggatggaaaaaaaaagtgaagaagaaggggaaaaagcaaaagttatgaaaaaaattagaaaaggg

SEQ ID NO: 7051 - DNA, 2123 bp, Homo sapiens
tactcatctttctacatagacgggaacacggtgtagcatggagattaagcgtgctaactgacacctcatgtttgaatcctgttgtagaatggaaatgagcttaaattacccaagcttactttccatctataaaacagggctaataatggtaatcacatctaatttatagggtttttgggaggattaagtcaatccgggtaaaattcttaattatctgacacatactggtcactcagtaaagggagcttttaccattggtataggtaaaatcccattacaaaaatacaaaaatatttttgtaacagttattttcctgccctcttggatgacctaaagtaatagtgttttatagatttcactaaattttcagtgtaatatcagatgttttctctggatgcagaaagaccatctttccataattaaagaacctggtgggtgtgcactatgagattggagaaatgaattaagttgacttgaaattattttacttttattaatcacaggtatctcaacctgcctttgtttcaccctacttcaagtacacttccacaccaggaaaacagacccaaattccataaacagaactgacgttaaaatatgcgaaagattcagaacctaggtttagggtacatgtttttctctgtttcatgaacttacagtgtggtttgagcactgggttcttttagccaaattccatacaaaaagaatttggatgttttccagcatttattaccttactttgctataagtaagagtgaagataggccgggtgtgatggctcatgccagtaatcccagcactttgggctgaagcaggcagatattttgagcccaggaccagcctgggcaacatggtgaaagctcatctctatgaaaaaatttgaatatacatatatatatatatgtatatttaaaaagtgaatataatttgaggcacagaagaatattcttaaaaccttttgtattatacaatagaaataaaggttttatttttattaaatgctttcctaaaatgatagtggataatagacaaagtgaaaacatttaaaaaggaagagaaacttcagcctttctaagttgatagcatgtttattaacttttagataaagatccttatagactgaaagaatgtagcctctgcattaatggtaaatggtctagaagttttcgtttccactgaggcttccgccactcgcttttttaaacttcctgctatggtttggatatggtttgtcctcaccaaaactcatgctgaggcctgagtccccagtttgattgtgttggtaggtggtgcctttaagaggtgattaggtcattgagatggattaaaggctttctcatgaggctcagttagttctggaatggattcgctcttgcaggaatggatgaattctcacaagagtgggttgttatgaagtgaggatgcttcttgtgttctgttctctttgccctcctcagttcaccatctgctttccaccatgagttgaagcagcatgaggccctcatcagatgggctccctgatcttggactcctcagcctttggactcataagccaaaataaatctgttttctttataaattgcccagtctcaggtattctgttatagcaaaaaaaaaaaagtggattgagatacttttttgctctgctacttacctcttttccagaatcttttaaggacttgatgtaggaactgagctatttagtaagtcattggtagaagtttccgcactgtactttgaaaattaagtgaaagcagaaaagtgagtgcgtatgtaaggaaaataatagtaaaagaacgctttgacttcttagcactcgccctctcctgtatatccccaggcaccttcagttgtctggaacaaagaatgtaggaaaaactgaagaaattcagaacagttaccaatgacaaaaatcactgatcagaataaaaagacaaggttacagaatatacgttgttactgatcatttttcagaagcagaaggaaaagaatgccctccctggccattgagggtgataaaaagtaagccccactcctatcacaggcaatgaaggacagggatggaaaaaaaaagtgaagaagaaggggaaaaagcaaaagttatgaaaaaaattagaaaaggg

SEQ ID NO: 7052 - DNA, 13608 bp, Homo sapiens
acttccggcgcactgatcccgcctggggccggctgagtggcacttaagcgggccatgccatgcaaccttgggcgctgccaaccgtgggcgagctctgggtgtgcgggcggcctggcgcggcgctccggtaaggcgtgtgtgcggcagggcggggacagaaccgtcctctcgggctctgggcgtgtccgagaccgcgctccccgccgaaatcaagctccgagtcatccgtgtggggcattcgtcccccctggcacagttggcctctttccagaagcccgttttgtttgttttacgtctaaattcgcgtcggttcttatttctctccctggcaaggtctgaagacgggtaggagaataacgtatgtagaggcgcgtaatgccaggcactgtgtgccaaacgttttatgatgcttttagaactctcgtaacattcaggtgctgagggagtttgggggtagcggtgagctggtaaaaagcctgttggcaacgaagactgatactttgaaaatgctcgtttttatttttcccgtcttttagaatcctctttgccaagagtaaacattcgtctcccctctccctcacgcccctgcgatgtattgttttgatgcggatgtatgaacagttaatgtcaggggacgtactttaaaaaaaagtctaattgcaagttagatgtggttaaatgccctcaaaaaccacacatactggtagtttgaactttgttttatagaattaaatgcagccgggatcacaacactaaaaacctactatttgacacagtttgatccaatcttttttgaaaagtatagagattaacattatgctaatttttaaatacttgatttctagaccaggatgtaatcaataaaaacggatattaatatttagcaccaattatttaattatgctagttattttacattgactgcaagccacgtaaaacagttaggccgggcgcgctggctcacgcctgtaatcccagcactttgggaggccgaggcggacggatcaaaaggtcaggagtttgagaccagcctggccaatatggtgaagcccgtctctactaaaaatagaaaaattagccgggcgtggtagcaggctcctgtagtcccagccacttgggaggcagatgcaggagaatcgtttgaaccctggaggcggaggttgcagtgagctgagatcgggtccctaaactctagcctgggtgacagagcgagactccgtctcaaaaaaaagaaaacaccaaaaaaaaagaaaaacaatttgttattttttggaattaggtatgtacaaagtacttagaacagctggcatctaacaaagactaggtaagtactaaccaccattattgtgatgatgataatgatgaattttaaaaatgccatcccagagaaaaactagtcctttttttatgttgcccttatgcccttattgaaatactgaatttttttttttttttttttttttttttttttttttttttttttttagatggagtctagttctgtcgcccaggctggagcccagtggtgtgatctcagctcactgcaatctccacctcctggcttcaagcgattcttctgcttcagcctcccgagtaggtgggactacaggcacccaccaccatgcccggctaatttttgtatttctagtagagacagggtttccccatattggccaggctggtctcgaactcctgaccttgtgatccatctgccttggcctcccaaagtgctaggattacaggtgtgagccactgcgcctggtcagttttgtcttttttaaagatatgtttttgaatttagaatttaaaaaccctgactaaaatatatttacccattttgatcatatagctttgttactttatggaggaaaagtggacaaattaaaaaaaaaattttctttttttttttttgactcagggtctcattctgtcgcccaggctggagtgcagtggtgcagtctcggctcactgtaacctccgtctcccaggctcaagctattctcgtgcctcagccttccaaatagctgggattacaggtgtgtgccactgcacctggctaatttttgtagttttagtagaaatggggtttcaccatgttggccaagctggtctcgaattcctgacctcaggtaacccacccacctcagcctcccaaagttctgggattacaggcgtgagctatcacgcccggcctattaatacaaatggtcttaatttaaatgttatgatttttcaaacttacccactgtctcttaaactagtgacataatagccatgatttcattactgctgtctgctttgaatattttgaacaagaagccaggttgttattccatttttttctttctttctttaaaattttttgtaagatattataccatattccgtttcttaaggttggtacagaagtaattaggaaaatgaaatcactactttcagtgcttgggatgggacagagaggtgggcgcttctggaggcactagtatagccaggcctgtatccaaatttacaaggggcccggcacagtggcctgtaatcccagcactttggaaggctgagttgggcagaacacttgaggtcagaagttcgagaccagcctggccaacgtggtaaaaccccatctctactaaaaatgcaaaaattagccaggcgtggtggcacacgcctgtaatcccagctactcaggaggctgaggcaggaggattgcttgaacccaggaggcagaggcagcagtgaatggagattgcgccactgcactccatcctggacagcaaagtgagactatcgcaaagaaaaaaaaaaaaactgagttcaagaccagcccggccaccatggtgaaaaccagttcgttacttaaaaaatacaaaaattaactaggcatggtggtgcatggctataatcccaactactcgggaggctgaggcaggagaatcgtttgaacctgggaggcggtggttgtagtgagctgagatcaacccactgcactctagcctgtgtgacaaagcaagacaccgtctccaaaaaatacaaacaaacaacaacaacaaaaaaaccccacaaatttacggcaagaaactttacagatcttttgcattaaaaggttgatctctatcaaggggaaataggcaaaatgctgatgtgagtgtattccattctctgccctcttctccctccctgtcaaacaagagaatcatttgagtatatgctcctcttgctttttcttaagagcgggagcaggggacaggcaatgctgtggtgtcaggtggacctagatttaagtccccattattctacctagtctctatgtgactttggaaaaattaaaagtcagggaatcttggtggcaaaataaactggaatgtgattcttggtgagtgtcttcactgtcattctacaaggacagaccagactagatatttaatacatagtgagaatcttttcactgtgtcagaggcatatctggttttccatatgcatatgcctctgacacaatgaaaatttagcagtgaagtgtaaattgcccattgctagtctgacatggcagcccagaactccagtgcacagcatctaataatcctgaactcattggctataatgcaccattgtcatctacagacaataacgggttttttgtttttaaactgtagctgtgtcagcgtgttatgatgccgtcccgtaccaacctggctactggaatccccagtagtaaagtgaaatattcaaggctctccagcacagacgatggctacattgaccttcaggtaaatgcagaagagaactgacaagactgactggctgtgtttctgttaagttagcaggaagaccttccagatggagattttgctaactgtccttggggattagaaggagcaacaagaagaaaactcagctctgagaccctttcagccataatcgcagaagagggccgtggcagggtagtttcaaaccaattccagtattgtccatttctaagaatttttagttgtaatgcgagagccttgtagttacaggttttatttactttattcagaaactaatcagattgtgttttgttaagtggagttttttgttgttgtttctttttttaaggaactttaaaatttttgttaggtggaattttttttatcactgtttatttacactttagtcaaagcccgttcaccttttaagggagaaacttattactaaagccagcagattgtgggaatcttccttctttcctgatgtcatgagatccaatttattaaaggtattctttgtgataaatagtaagtaaaacacagtatttattaagtttgtatcctaccctaaccatttataaactagtcaatactacagcatctccttttgcacacttccccttacaatagaatgttctacgtggaactagggccaacgaggaagtagcaggaaaccatcctttataaataaataaattactctttggacccacatttgaaggagagataaaaatagatctggaaagatctgggaagcttccagccacttaggtcagatacaacgatgagccaaaccttggaaaatttgtctctgaatcttaaccttgaattgaatttgttcataaggcaggtttacttgctatgtggaacaaacaactaatcatttggaataagctgaaattgccttcttttccttttttttttttttttttggagacggagttttagtcttgtttcccaggctggagtgcagtggcacaacctcggctcactgcaacctctgcctcccaggttcaagcgattctcctgcctcagcctcccaagtagctgggattacgggcatgcgccaccacgcccagctaattttgtatttttagtagagacagtgtttctccatgttggtcaggctggtcttgaactcctgacctcaggtgatcatcctgcctcggcctcgcaaagtgctgggattataggcgtgagccaccttgcccagcctcttgttttgttttgttttgtttttaagatgtagtcttgctctgttgcccaggctggactgcagtggtgcaatcctggctcactgcaacctccccctcctggttcaagtgattcttgtacctcagcctccctagtagctgggggattacaggcatgcaccaccatgcctggccaattttcgtatttttagtatagatggggtttcgccatgttggccaggctggtctcgaactcttaacctccagtgattcacccacttcggcctcccaaagcgctggaattacaggcgtgagtcaccgcgcccagccttttttttttttttttgagacagggtcttgctcttttgcccaggcttgggtacagtggcacaatcaagactcactgtaaccttgaccttctgggctcaagtagtcttttcacctcagcctcctgaatagctgggaccacaagcatgtgccaccacacccagctaattttaaaattttttgtagagacaggatctcttaaatccccataagttagtacagccatctatgtgccaggcagttaataaatatatatctaacaaatgaatgactgtaaagtcatttctgtttttgttttaaagaaaagtttcttatgatacaatgaatgatttatggaatgagattcgaactagagtgaatgacattcctctgagattcctttgagtaactgtgagagcaataactagagcttcatctcttgccagtcccttttatttctcagagctgcactgggtggtaggacatacttaagacacataaagtatctagtttggttcttaattaccctcctgtttttgctgttgttgtatttgaaacaggctctggctctgtcacccaggctggagtgcagtggtgcaatctcagctcgctgcctcttcacctcctgggctcaagccatcctcccagcttagcgtcccaagtagccgggactgcaggcacatgccaccacgcccggctaatttttgtattttttgtagagacgaggtttcaccatgttgctcaggctggtctcaaactcctgaactcaagtgatccgcctgcctcagcctcccacattgctgggattacaggtgcgagctctcctccctgttttaaagtgtttgagactgggcttgatggcttatacctgtaatcccagcactttgggaggcagaggtggaaggactcccttgagcccaggagttggagaccaccctgggcaacatagtgagacctcgtctctacagaaaaatttaaaaattagctgggcatggtgacgtatacttgtagtcccagctacttgagaggatgaggcaagagaattgcttgagcccaggagttcgaggctgcaatgagctgtaattgcaccactgcactccagcctgggtgatagagcaagactccgtctctaaaatcataaaaattaggccgggcgcggtggctcacgcctgtaatgccagcactttgggaggccgaggcgggcggatcacctgaggtcaggagttcaagcccagccaggtcaacaaggtgaaaccctgtctctactaaaaataccaaaaaaattagctgggtgtagtggcgggcacctgtaaccccagctgctcaggaggctgagacaggagaatcacttgaatccaggaggcagaggttgcagtgagccaagatcacgccattgctctctagcctgggcaacaagaacgaaactccatctcaaaacaaacaaacaaaaacataaaaattacaaataattaattaaatgtttgaacccaggtatttgcattaatgttcttcgttgtctttttcatctctatttctcttccagtttaagaaaacccctcctaagatcccttataaggccatcgcacttgccactgtgctgtttttgattggcgcctttctcattattataggctccctcctgctgtcaggctacatcagcaaaggggtaagctgacgggcatgtgggaataagttgtgagatttttaaaatgttagccaaggctctagtgtgcgtgtgtgtgtgtgtgtgtgtgtgtgtgtgtgtgtgtgtgtgtttgtccgtcccagtggtctgttttttttgagacagggtcttgctctgtcatccaagctagagtgcagtggcacaacctttacctccctgggctcaagcgatcctctcacctcagcctcccgagtagctgggactacacgtgtgtgccaccacacccagctaattttattttttatttacttatttttgtttgttttattttgtgtagagacagggtttcactatgttgcccaggctgatctctaactcctgaggtcaagcagtctgcctgcctcagccttccaaagtgctgggattgcaggtgtgaaccattgcccctggccaattttttttccaatttttatgggtacatagtaggtgtatatacttaggggatacatgaggtattttgatacagccatgcattcataataatcacatcaggctaaatggggtatccatcccctcaagcattcatcatttgtattacattccaattatacttttatttatttatttattttgagacagagtcaggctggagtgcagtggcataatatcggctaactgcaacctccgcctcccaggttcatgctattcttgtgcctcagcctcccgagtagctggaattacagacgtgcgccaccgcacccggctaatgttggtatttttagtagagatggggtttcgccatgttgcccaggctggcctcccaaagtgttgggattacaggcatgaaccactgtgcctggcctatttttagttatatatatacatatacacatacatacatacatacatatatatatattttggagacagagtcttgttctgtcacccaggctggagtgcagtggcaggatctcagctcactgcaaactccggctcgtgggttcaagtgattctcctgcctcagcctcctgagttagctgggactatggtggcaagccagcacacttggcttatttttgtatttttagtagagatgggtttttgccatgttggccaggctggtcatgaactcctgacctcaagcggcctgcccgcgtgggcctcctaaagtgctgggattacaggcgtgagctaccacgtccagccttagttattatatttttaaatgtacaataaattattctctagtcactttgtgctatcaaatactagagcttattcattctatgtaactatattttgtacccgttaaccttccccattcccccctacctttcccagcctttggtaaccatcattctacaatatccatgagttcaattgttttaatttttagttcccgcaaatgagtgagaacatggaaagtgtgtctttctgtgcctggcttaatttcacttaacataacgttctccagtttcatccatgttgttgcaagtgacaggatctcattctttttagtggctgaatagtactccattgcatatatgtaccatattttctttattcacttgtctgttgaagaacactttggttgcttccagatcttggctgttgtgaatagtgctgtcataaatatggaagtgcagatacctctttgataaactgatttcctttcttttgggtatatacctagctgtgattgctggatcatatggtagttctatttcatactgttctccatagtggctatactaatttacattcccatcaacattgtacgagggttcccttttctccacgtcctcgctagcattcgttattgccgttttttttggataaaagccattttggctgggtgcagtggctcacgcctgtagtcccagcacttttggaggccgaggcaggaggatcacttgagcccaggagttcgagaccagcctgcgcaacatagcgagaccttgtgtctatattttttaaaaagccattttaactaggatgagatgatatctcattgtagtcttgatttgcatttctttgatcaatgatgttaagcaccttttcatatacctatttgccatttgtatgtcttcttttgagaaatgcccatttttgattggattattagattttttttcctacagagtttgagctccttatatattctggttattaattccttgtcagatggatactttgcatatattttttcccattctgtgggttgtctcttcctttgctgtacagaagctttttaaccggatgtgatctcatttatctgtttttgttttggttgcttgtgcttttgggggcattactcaagaaatctttgcccagtccagcatcctggagagtttcccccatgttttcttatagtagtttcatagttttaggtcttacatttaagtgtttaatccattctcatttgatttttgtatatgtcaagagatttgaggggtctagtttcattcttcagcatatggatatccagttttcctaataccatttattgaaaagactggttctttccccagtgtatgtttttttgttttttggtttttttgtttgtttttttttttttgagacagaatctcactgtgtcatccaggctggagtgcagtggcaccatctcggctcactgcaacctcagcctcccaaataactgggaccacaggcatgtgccaccacacttggttaatttttttttcattttttgtatagatgaggttttgccgtgttgcccaggctgatctcgaactcctagactcaagcagtccaggagtacagtggtgtgatcacagctctctgcaacctcaatcttcagggctcagtcgatcctcccacctcagcttcccaagtagctggagttacaggtgtgagtcaccatacctagctaatttttttgtttgtttggtagagatgagatctcattatgttgcccaggctggtcttaaactcctaggctcaagcaatcctcctgcctcagcctcccaaagtgctggaattacaggctttagccactgcacccctctgactatgtttcccgttgtgtgttaattatggtcagtgtgaggcccaccctagcctcccaaagtactgggattacaggcgtgagccaccacacccggtggatgtagaattttatcaaatgcttttctagcatcgattgaaataatcatatggtttttgtccttcattctgctgatacgattttatcacattgattggtttgtataagttgaaccatccttgcctctctgggataaatcccacttggtcctgatgaatgatctttttaatgtattgttgaattcagtttgctagtattatcctccttattgaggatttttgcatcaatgttcatcagggatattggcctatttttgttttttcgatgtgtctttgcctagttttggtatcagggtaaaactggcctagtagaatcagtttggaagtattctctccatgtctgttcagaatagtttcagtaggattagtattctttttttttttttttttttttgagacagggtctcatctgtcatgcaggtgtagtgcagtggtgcgatctcagctcactgcaacctttgcctccccggcttatgtgatcctgccacctcagcctcactagcaactgggaccacaggcatataccaccatgcccatctaatttttgtattttttgtcaagacaggattttaccatgttgaccaggctggtcttgaaatcctgagctcaagcgatctgcctgccttggcctcccaaagtgctgggattacaggagtgaaccaccatgcccagccaagtattaattctttaactggtataattcagcagcgaaaccatctagtcccaggcttctctctgctaagagactttttattatggccttaatctcattactctttgtctattcaggttttagatttttttcattgttcaatctttgtttttatattcatgtctggtacagcagattccagcagaaaaaccaaaaagattttcttttacattttgttctctgttggcaaaacatgtttttcttcctttgagcaacagtaaacttccatagttcctataggggaggtggtggcaggtaggcaaacttggcctctgagatattagacagtttgccctgtcatagtttggaacaacatggctgagcctggcatacaggagtcctgattggtaaagggctgtagctggagcagcatgctgtcattgtagctgtgcagtgccatggacatactgtcagtatttggagagaaatagcaattctgttatatgtgtggggtcactgtgcctcgtaagtcagttccttcttacagtaggtttggttggagttcctgttgagcttcaatatgaaaccttagaaacctaaagtagttggtggttctttctcatgggctgtccccacatacacagtgtccaagttgtcttgaaccaattctgactataattaacacacaacagggaacacagccagccaggtgcagtggctcaagcctataattctagcattttgggaggctgaggcaggaggattgcttgagccccagagttcgagaccagcctgggcaacatagcgagacctcatctctaccaaacaaacaaatgtacaaaatgagccaggtatggtgactgacacctgtaactccagctacttggaggctgaggtgggaggatcacttgagcctgggaagtcgaggttgcagtgagctgtaatcacaccactgtactccagcccgagcaacagagcaagactcttacctcaaaaaaaaagaaaaaagagaaagaaaagaaaacctgaaaggctgagaaaaacacagagtttattgtagtggtatctgtacaattacaaaaggtgaaaaacaaccaaagtgtccagcagctgtatgtggggcagttaggtaaaactgtagtatgtccatttcggtggaatgttacacatccttacagtttaaatgtatgaaaaggttttaataatattggccacaggacacagagtatggtgtgttcacaactaagagctttaaaaaaaggaaaagaagccaaaatatctggatgagaatgggtcatttttttctttataattgttaatattttgtagtttgtcttcaatttataatcaggaggaaaccttttcccttggtggtatacaactcaaagaaaaagtactgaagagtataaaatactgatctaaggattaggtctgtgacgttttattttaaaatgtgtaactcttacggtactaatgtgtttgcctccttctgccaccagggggcagaccgggccgttccagtgctgatcattggcattctggtgttcctacccggattttaccacctgcgcatcgcttactatgcatccaaaggctaccgtggttactcctatgatgacattccagactttgatgactagcacccaccccatagctgaggaggagtcacagtggaactgtcccagctttaagatatctagcagaaactatagctgaggactaaggaattctgcagcttgcagatgtttaagaaaataatggccagattttttgggtccttcccaaagatgttaagtgaacctacagttagctaattaggacaagctctatttttcatccctgggccctgacaagtttttccacaggaatatgtatcatggaagaatagaggttattctgtaatggaaaagtgttgcctgccaccaccctctgtagagctgagcatttcttttaaatagtcttcattgccaatttgttcttgtagcaaatggaacaatgtggtatggctaatttcttattattaagtaatttattttaaaaatatctgagtatattatcctgtacacttatccctaccttcatgttccagtggaagaccttagtaaaatcaaagatcagtgagttcatctgtaatattttttttacttgctttcttactgacagcaaccaggaatttttttatcctgcagagcaagttttcaaaatgtaaatacttcctctgtttaacagtccttggaccattctgatccagttcaccagtaggttggacagcatataatttgcatcattttgtcccttgtaaatcaagatgttctgcagattattcctttaacggccggacttttggctgtttcctaatgaaacatgtagtggttattatttagagtttatagccgtattgctagcaccttgtagtatgtcatcattctgctcatgattccaaggatcagcctggatgcctagaggactagatcaccttagtttgattctattttttagcttgcaaaaagtgacttatattccaaagaaattaaaatgttgaaatccaaatcctagaaataaaatgagttaacttcaaacatttcagaaaacattttaatgattttatgatatctttaatcccagtacctagatctaccttagtttctaggtagctggcattgtgggtcacactcaactttccctaactctgaggttatggacttgggcaactggaagcctggacatgccatcagctgagttgcaaggctgtgggaagagcaagttttagatgtctactcaatatccaagtggagctgttgaggaggcagttgcgatgcatgtgtgtgtctagagtttaagagtgggtcttggatggaaatagaaatttgggagtcagcatttggacagtatcttaaaagctagagggctgtttgagatcaccagtagagtgagtatagttggagg

SEQ ID NO: 7053 - DNA, 244 bp, Homo sapiens
ttacttggactgagttctagttactggacatgagaattaaccatgtccagtagtaagttcattttcctacagtgtgcctgtgagtggagaaggaaataggctgcaaaagagcccgatggaactttggggtgatggatatatttccatctagattggtgatggttctaggaccgtatgtattttcagagctcatctatttgtacttgtgtataaatacttcaataaacctaactttttaaaaagc

SEQ ID NO: 7054 - DNA, 945 bp, Homo sapiens
cagctggcattgttacagaagtatcatttatgaagccaaaatcagactccctgcaacttctgtgttttgaccatagttgtattatttggtgttttatagaaaagacctaaacctctacggccatactaccctgaatgctcccgacctcatctgatcttggaagctaatccgggtcaggcctggttagtactcggacgggagaaaagatctaaacctccataataatgttgaacatttcttgacccctttgccagatattctgccaaatactttcattacatatctcattttaatccttagaaaaatcctgagttagccgggcacagtggctcatgcctgtaatccccgcactttgggagcccgaggcgggcggatcacctgagtttgggagtttgaccgtcctgaccaacatggagaaaccccatctctactaaaaatacaaaattagttgggcgtggtgacacatgcctgtaatcccagctacttgggaggctaaggcaggagaattgcttgaacccggcaggctaaggttgcggtgagccaagatcgcaccactgcactccagcctgggcaacaaagccagactccgtctcaaaaaaaaaaaaaaaaaaaaaaaaaatcctgagttagataagattcttaggtaggaagtaggtgagatatttgggattaaagcctgggcctggtacggtggctcacgcctgtaatcccagcacttgggaggccgaggtgggtggatcacttgaggtcaggagttcaagatcagcctggcctaaaaatacaaaaattagctgggtgtggtggcgggcacctatatcccagctactcaggaggctgaggcaggagaatcacttgaacccgggaggtggaggttgcaatgagcctagatcacaccactgcactccagatggtgacagagtgagactccgtctcaaaaaaataata

SEQ ID NO: 7055 - DNA, 4997 bp, Homo sapiens
agcaggcaggagaaaataaccagaggaatgtggattgcttgcagctaaccgggacctgttcatctggttagtttcttttctcccatgctcttgaggaaaggtattactcttggattccagttggccaagaggaaggttcaagctttttttttttttttttttgagatggagttttgctcttgttgcccaggctgccgtgcagtggctcaaaccagcgaaggctcactacaacctccgcctcacaggttcaagcgattctcctgcctcctgagtagctgggattacaggtgcacaccaccatgcccggctaatttttttgtatttttaatagagacggggtttcaccatgttggctaggctggtctcgaactcctgacctcaggtgatctgctcgccttggcctctcaaagtgctgggattacagacgtgagccaccgtgcctggccgaaggttcaagcttttaaatccaaatagaatctagtgattagattgatgcagaaatttaaactgtacttgggcatcacttgcttccattggctcaccagtgattgtagctgatacagttatgtgacaaaagattcattcatttagcaaacaaatcagaggtgcttattgtgtgtcaggcaccagacattgatttttctttttagacattgattttatattaactattagtttccatgttactttaccttgaattgggtcagtagatgagaaattttcctggggagacacactcttcagaaaaggtctaatttagggaggtgttttgaataagattaatttcccaaatttcaacaaaactttgtccaagaacatcatacaaagtgtctaccctacgcttttattccaatcatcaaatcctttagagagattccaaggattatgtttcactgagactgattttatttgctaatgccaattttgggattcaatcagtttaaattagaaatctggaagggcccttcaggattggagactagattggtttctagctagacactcccacctttgcagtttcagggtaaactttctttcccaagaaataaaagcatgtattaagaatgctgcttctgccaagactctgtgtagacccagccaccattgccagatagtctgaaaaagtataaaaaaattagccgcccctcagtgtgtggtcatgaagcagggccaggggcactctttaggtatacagcataaagtatgtcatagatagtaaatactggagtttagaatccatttgtaaagaactgtcagcttgagtgtattaaggcacaaaagcaacttctgaaacacaggcttgatatttgttgctggggctctgaatcattttggagtaccaggacacttagcaataggtgggattattttttcagggaaaataatggtgttccattcttagggtcatagatgactagaaaaagaaaggtccaaggcttagaagaaagatcagctatagattggaaataagctgaaagccagatatccctctcacagattggcacagctccatgtagaaggtctgcccagtgtgttgaggtggggcgagaagttggcattgctgacattgcgcttctccttgctgtaatttcagacccggatgcagagtctacagcctgacccagctgcccgctatcgcaatgtgttggaggccctctggaggattataagaacggagggcctatggaggcccatgagggggctgaacgtcacagcaacaggcgcagggcctgcccacgccctttattttgcctgctacgaaaagttaaaaaagacattgagtgatgtaatccaccctgggggcaatagccatattgccaatggtattgagccttcctgtgctggttcccccactttcccaactctttgggctttgctgctgtcagtgctttccagtctcagcatggtttggagctgaagctttgggctgggataggccagattataagggagggacttccaaacctgatgttctcagacaacgggccgcttcaaccctgccttttcctttggggcacctcaacaaagggttacagtatcctcccttacctaccagcttgacttgttcctctcatctccctggcatcaacttctaatgccctggtaatgtggagacacactgaactacccccagtctatgtttgacagttgggtggtgtcctgctccttagggcaggattggaggcgacccagccagccacccaaggaagatactaatgaagcccctgctttttgcctcaccttttcaggatcccaactcaccagaggcagtttgtgttgagaacatgacaaagcctcatgacaaaatgaatgggggtggggccaaggaactgcatgaagaaaccagaaggttgtgtggaagtaagagaaaggatagcagcctagggctttaggaccggctggaaaccaagttgagtgtggagaggatgaggggtagagtagttcaggacctgaacgaaagatctttgtagacaaatgttaggctctgcaaatgggttctgcggcaggactgaggtgggattctgtggtgaggttctgtgagatctgaccacctggcccccgtatctccctccactggtggcaggtgatgtgctggcatccctaggcagcagtgtatctgcttcctgtctggggtgtgagctgcatttattctcagaatgatctttattgataagacttgagctggccttcctatcatggatgtggaatacattagtgaccttacaaagttggtgggaacagatactttaccttcttaaacaggagtttaggagcagtgggtccccatcttttggactagctcttaacgttacttttccccgctgtagtgtagcacagccactccccttcactgggggacctcaatgagttggtcagctctcttggccttacatgtggcagttgttttcttgtttgcaggtgcggccgggtgtgtggcaacattacttcatgatgcagccatgaaccctgcggaaggtaatgattcctcaacctatcactctgtgggcagctgcacctgtatttctttacagtttgcagaagaaagcacatcagttttggtgggaaattctgttaccttgttttaccactagagggtgctccctccatgtttttggtacctaacgaggcaccctcttggacaggaagcagattcactgggattttactaatccctggggcttccctagaaaaagatgtctccatgtggcctgtttttgggctttcctgggagcctcctttgtcgtagatttgatctgtcctgaaagtttagcagattcatttttcttcaaagaggtgaagatggattctgactttttttttcccccttatgatttgcaggaattgacacttaaatatattgcctttcttattggaatgaagctagttgggataggaatgaaaggttaaatcatagaactcagtccctgcatttctgctgggatcttggcttttcagtcggaggaaaattctccaaaaacattctccatgtgaggatgagcaaatatgaagggatagcattgttgccacgttcattttctgtctgggcaaggccatggggtggaaagagccaaagctaagctgaagctccacagagctcacaccatgttatctacttgagggagtgggaggtgtttgaagactaaagccaactctttttggctaagaatcttttctttggtagaacttctgtctcctcccctctaggaggatcaccatctcacattttaaaagttaggtgctctttgtatgcgaggattgggattgttaggggcctgtgttcgtgatgatcactatcatggagtcatttcttgttgggaattgttagagggtaagatcagagataggtacttagttcaagaagactctctgaagctcccaaactgtagatatgtcctgtgtgcgaactggctggctttacagaagtcctgatggaagtgggtttattgttttttgactcgttaccaaccctctgcttactccttcccctcaaaaaagggaagctgacttctcaggttagccagcagctcactcatacttttttctctctctattccattggctgatctgctgacttggggctctgaatctggatactctccatcaccggttggctgctgtcaccatttccttcctcgttgatggcactactagtggtcaagcagaggatgcagatgtacaactcaccataccaccgggtgacagactgtgtacgggcagtgtggcaaaatgaaggggccggggccttttaccgcagctacaccacccagctgaccatgaacgttcctttccaagccattcacttcatgacctatgaattcctgcaggagcactttaacccccagagacggtacaacccaagctcccacgtcctctctggagcttgcgcaggagctgtagctgccgcagccacaaccccactggacgtttgcaaaacactgctcaacacccaggagtccttggctttgaactcacacattacaggacatatcacaggcatggctagtgccttcaggacggtatatcaagtaggtggggtgaccgcctatttccgaggggtgcaggccagagtaatttaccagatcccctccacagccatcgcatggtctgtgtatgagttcttcaaatacctaatcactaaaaggcaagaagagtggagggctggcaagtgaagtagcactgaacgaagccaggggttcagatgacactgctgcatcctggtcacattctctgtctcctggaatgctcccacctcaagtggagttagaaggaaggtagaggggctctcccccaggattttggtgttttgactaacaccagttcctgccaacctctgttgccaccacctttccttccaggccctaagcacgtgcagcaaagcacaccacagcacctttgataacctctctccatcctgggcctgatgacctgctctagactgttatagagggataagcagctcattcccctggttcctaataaaaagcctttaaattaaa

SEQ ID NO: 7056 - DNA, 1170 bp, Homo sapiens
ctcccagagtgctgggattacaggtgtgagccactgcacctggccacataatttttactatatgcaagttacttttctcagtaatttataatttttagctcttaattcccacagaagtcctttgagacactattattatccccagtttacatgtgaggaaactgaggttctgagaagttaaataacttgcctgaaatccaagtaactagcaaatgatggagccaggatttgaccttagtcattcctgctttggagtctgtcctcttaatacattatatggcgtctctaatttgtgagtgagtgaataagtgttttgagattttaagtatttataccacttgtactccacttttgctggagggtggattctaggcaggagtctgggatgcattgaggatgttaatgaatttagcaaatactcactgagcacctgctttatgtcagggatatgaaagtgcttgacagacaaggttcctgccttcaaagagcatatgttccaggggggaatctgacagtaaacaagtaaacaaacagacatggtaatttcagattatcagtgctatggagaaagttaactgttacagtacattgcagagatgggttctgtaggcagtgtgtcacacaatgtttaatgtcatatagctttcatgatgttggatattatctccccctttttttttcttttcctttttttttttttttagacaggctctggctctgtcaaccaggctggagtgcagtggtgcaacctcagcttactacaaactctgcctctctggctcaaggtatccacttcagactccctagtagctgggactgcaggcacacaccaccacacctggttaatttttttccatattttgtagagacagggtctcactttgttgtccaggctggtcttgaattcctgagctcaagcaatctgcccaccttggcttcccaaagtgctggaattacaggtgtgagccactgtgcttggctcccaattttttttctaattaaccccacatctgctgaattaaaggagagtgttaaatacaaaaatgaatttattatgcaaatctgcagttatcgtgtatgttcttttggacttgtaataagggagtatgttctagtattgaagaaatagaaccagagaggaatactgctgtaaaaattaaaaaaaaaaaa

SEQ ID NO: 7057 - DNA, 88 bp, Homo sapiens
ttttttttttttttgagacagagccttactctgtcacccaggctggagtgcagtggcgtgatcttggctcactgtaacctccgcctcc

SEQ ID NO: 7058 - DNA, 1203 bp, Homo sapiens
aacattctagcaggggtaagtgaccatagctgaattcttttcttatcaatcaggaaaatgaaaatccttccttaatcaatttctccaaagtctctgacacataacaacaactccaaaaatgcacctctctttccatcaaactccactgatatgaaaaatgggcaacctgtttttccttgccctgttagtgaacttgtgggtgtacccagtggccactctaaggatctctataatcaacaagacacagtaacaagtgttggcaagcaagtggagaaatcagaacactcacacattgccagtggggatgtaaagtggaaaacagtttggaagttcctcgaaaagttaaacatggaattaacatacaactcagtaattccacttactcctaggtaatatccaaaagaactgaaaacgtatgttaacacaaaaacctgtacacaaatgttcacagggcattattcataatagccaaaaagtggaagcaacccaaatgtccaccatctgatgaataaatgagttatatctatataatactattcagccacaaaaatgaaattctgatacatgctacaatgcaaatgaagctttaaaatattatgttttgaggttgggcatggtggctcatgcctgtaatcccagcactttgggaggctgaggcaggcagatcacttgaggtcacaagtttgagaccagtgtggccaacatggcaaaaccctgtctctgctaaaaacacaaaaattagtcaggtgtggtggcgcacacctgtagtaccagctactcgtgaagctgaggcaggagcattgcttgaacagggaaggtggaggttgcagtgagccaagatcttaccactccactccagcctgggcaccacagtgagactccatccccgccccctacccaaaaaaaagtatatgtgtatatatgttttgaagttagatgtgatttaaaaattagaaaaacaaaatatgtatattaagtgaaaaaagctggcaaaaaccacatattgtatgattccttttataatgaaatgtccacaatccacagagacacaaagtaaaatggtgcttggtaagggctggagggaacaaggaaaggagagtgactactaacaggtatggattttgtgctggttttctgaagggatggaaatgttctaaaactagaaatggacaacgtctggggatattgcgatgactactggaa

SEQ ID NO: 7059 - DNA, 1252 bp, Homo sapiens
aacattctagcaggggtaagtgaccatagctgaattcttttcttatcaatcaggaaaatgaaaatccttccttaatcaatttctccaaagtctctgacacataacaacaactccaaaaatgcacctctctttccatcaaactccactgatatgaaaaatgggcaacctgtttttccttgccctgttagtgaacttgtgggtgtacccagtggccactctaaggatctctataatcaacaagacacagtaacaagtgttggcaagcaagtggagaaatcagaacactcacacattgccagtggggatgtaaagtggaaaatagtttggaagttcctcgaaaagttaaacatggaattaacatacaactcagtaattccacttactcctaggtaatatccaaaagaactgaaaacgtatgttaacacaaaaacctgtacacaaatgttcacagggcattattcataatagccaaaaagtggaagcaacccaaatgtccaccatctgatgaataaatgagttatatctatataatactattcagccacaaaaatgaaattctgatacatgctacaatgcaaatgaagctttaaaatattatgttttgaggttgggcatggtggctcatgcctgtaatcccagcactttgggaggctgaggcaggcagatcacttgaggtcacaagtttgagaccagtgtggccaacatggcaaaaccctgtctctgctaaaaatacaaaaattagtcaggtgtggtggcgcacacctgtagtaccagctactcgtgaagctgaggcaggagcattgcttgaacagggaaggtggaggttgcagtgagccaagatcttaccactccactccagcctgggcaccacagtgagactccatccccgccccctacccaaaaaaaagtatatgtgtatatatgttttgaagttagatgtgatttaaaaattagaaaaacaaaatatgtatattaagtgaaaaaagctggcaaaaaccacatattgtatgattccttttataatgaaatgtccagaatccacagagacagaaagtaggatggtgcttggtaagggctggagggaagagggaaaggagagtgactactaacaggtatggatttgtgctgtttttctgaggtgatgaaatgttctagaactagaattgcacaactctgtggatattccaataactactgaaaggggggactttaaggcatgtcaattatacttcaataaatatgttaagttcaa

SEQ ID NO: 7060 - DNA, 99 bp, Homo sapiens
agagacggggtttcaccatgttggccaggctggtctcgaactcctgacctcaggtgatccacctgccttggcctcccaaagtgctgagattacaggtgt

SEQ ID NO: 7061 - DNA, 414 bp, Homo sapiens
tgagtatgtcaatacaaatttatcatactgaccaagttttattaatggtgggcaaatggcatcaatcctatataggagaaataattgtataccttcacagacaaaaataatttccaaggagtgtggagataagaggaatactttctcttttcactcaatttctttgagccttggtttccttatcttgaaaatacaaaaaacaacctcctaaagttgcaacctttgcaatcacaagagcccatgagaggtggccaccccagagtgattcccagctctgtggtcagtgggccagtgaagggaggatgatctacacaagtgcctagaacagtcaatgaaatgtattttcatttaatagtcataaataatcctgtaactgtgtagttcatggtagtaggtaacttactacatgccttc

SEQ ID NO: 7062 - DNA, 99 bp, Homo sapiens; identical to SEQ ID NO: 7060

SEQ ID NO: 7063 - DNA, 34910 bp, Homo sapiens
gcagacggcggagagcagagagggagcgcgccttggctcgctggccttggcggcggctcctcaggagagctggggcgcccacgagaggatccctcacccggtgagtggttggccatccttgccgcaaaggatgtgcaaaaggaagacggcatccgcttctgggatgggctctgtcctcctggacatgccgagagcctgcctgatcctgggtcctgctgctggaggcggccacttcgcctggtccccgagcgtccgcaacaaaatttgtcagaaagaaaatcttgaggcacatttccctggggggaagtcagggctcctctctggagggtccagtccttaagggtgggctgggtggtagggacttcagttcagaggagcgggaggaatcagatggaactcctcttggattcgggtatacggcagtcactggggggcgaaccccggatttcctgtattagaagccgcctctagaatcgcgttaatagtgggagatatggcggcgatgccttctgcgtgccccatgaattagggggggaagcacccgaatagaagggtctcccgggcatatttgcctcgccagctgttggccaggtttttggtggatcgtgggcgggaggagtggaggttcctcttcgcgaggttttccgaatccaaatacacaggtttagtgcagtgtggaccccaggcaaaatgtggagtaaaatttctacccgatatcatctggttctgccctgatcagccactttcacagtggagagagatggcgcccaagtgcaaacctgccagtagccccctaggatcagtccttgccgaaggggggtcgtgggattgggggcactgggagaatagatgcagggggtgggttggggaggagagaaggccgtgtccttgggtctgggaagagggaggagagaaatgcagaaaaaggggtgtgttgctggggtctggacgctgggagctggggatggggtgccacgggggtcttcagagcgttgcgtggaggtcgctcgaaaatcctgacatgttgcagtcttggacttttggtcaaatcgccttttgccatttcctttgtcagagtcaagcccccccaggccgccccctcccaccctgggccggcgggcctggtgggggcgcaggcgggtggctacgtggcaggtttctggaaggtttcctggctggccgcgagagggcgctggcggcactgcggaattttggggggcggggtggggaggggaggtggcctttgttctcctgatggagggggtcgggcgcgggatctactggaggatcctggattcgtttacccaagagggaacagttttgagaccccccggattcactgcggagtggccgcagaggccggggtcggcctttgcgccgtggcttcgggtgttgtggaggcgcacagaggcacgttagttgatttccagtggtttttggtttcgggggtcttaggaaggtgtggctcatttgagcaggatggagagagaggctgtgacaaggtcagtgaggggccatcgtgcgggggctagaaattgttgttgtggcgaaggagggaggcacgactttggaggcgtgatgttgatgcctgggggcgaaggcggggagcggcgtggtggccccctttgcgttactttccagcgatgtcacaggttctgtctctcgttccgagaccacccacatgcgtgacagcggtgcctggaggactgggtctttctgactttagtgaacgtgtgtttaattggattgacgaaggtgggagtcgggatttctgcttttccctgtagcaggcggagcggcgctccagaggggcctggcgcaggtccgctgggtggcccaccttcctctggggctggggcccggtggctgggggcgcaggaggcgcctggtgcgggcgggaggcgctgcgccgcagccacaggtgggctctggctggtggtggctggagaggcgtccagggggcgtacgacctggcgcggtggcctggggtgggctgtggagcccttcctagcctgagacctgttgggcaccccctgtccatccaggcccgccgggcgcgggccgggggcgccgcaggtggctgctgcactcctgggttacgggtgcgggccgcgcgccccctagcggtgtgtgccagccccgctaccttgggttttgagttgcgcacacgcacacagctaacacttgtgacctgtcagtcaaatcatccttaccccctcccactcctctcctccacctcccatttctcctctccctccaccctttctcatttcctcgtccctcctccccctcctatttttcttctccctcctccctctttcctcttccctcctccctcttcccccctcattttcctcatctctcttttcccctccccttctctcctcccctctccctgcccccctccttcctccctccatacccctccctcttccctcccagcccctccctactgccttcctcagtcctcccctttgccactcctccctgcctttccctctgcctgcccccttttgctctctgctgttccggtgctggccgttagaggtcacgaagatggtttctaacctgcccccctcccatgccatagggtctctcctcagggatgacatcatccgtccacctccttgtcttcaaggaccacctcctctccatgctgagctgctgccaaggggcctgctgcccatctacacctcacggtacttcaaccctcctgctatcatttcataaccaacgtggcgggcagaatctcccaaccccaccaccatccttgcaccacccccagacccactagcaattaaaagacaattttaaattttaactaatcagctttaattgtaattaatgaacttaaactgtaattatgatctaggcttgggcttttaagcaggttctctaacctttgatcaattgcagagggcactaggagcacggtttcctggatcccaccaacatacaaagcagccactcactgacccccaggaccaggatggcaaaggatgaagaggaccggaactgaccagccagctgtccctcttacctaaagacttaaaccaatgccctagtgagggggcattgggcattaagccctgacctttgctatgctcatactttgactctatgagtactttcctataagtctttgcttgtgttcacctgctagcaaactggagtgtttccctccccaagggggtgtcagtctttgtcgactgactctgtcatcacccttatgatgtcctgaatggaaggatccctttgggaaattctcaggagggggacctgggccaagggcttggccagcatcctgctggcaactccaaggccctgggtgggcttctggaatgagcatgctactgaatcaccaaaggcacgcccgacctctctgaagatcttcctatccttttctgggggaatggggtcgatgagagcaacctcctagggttgttgtgagaattaaatgagataaaagaggcctcaggcaggatctggcatagaggaggtgatcagcaaatgtttgttgaaaaggtttgacaggtcagtcccttcccacccctcttgcttgtcttacttgtcttatttattctccaacagcactccaggcagcccttgtccacgggctctccttgcatcaggtaggggctttgcagagaccatcgacgggctgacttgagtaagaacacgaattatgcatgtggccatttccagagcactttctatgtgatatgaacatgtgatttttatgtaatatgtgtatgtaaacgaggcagcctcatttccaggtgaggatgcatttggtagtgttgatttttgtaatttaaagaagctgaaagggagagaggacccgtgaggactgaactctctgtcccatggggtagggcttacatttacattaaagaaacagaaacttgctgggaggtgtaagtatttggtcacattgctggcaacagaaggggttggagttggacccagggtgccacgctagctgccctcaccccttcttcccctctggcccagagttatactaagagtccttttatttcaaaccaaatgtttgacaatgggacagtctgtttgaaatcccagctgcctggggtggtcttgggggtctgggtggccccagtgctggtaccatgtgctggcttcaccttttaataacagtgtgaccttaaacaagtcgcttaactactctaagtttcagtttctttcatggtctaaatggagattaaaacacacacacacacacacacacacacacacacacacacaccccctcgtgtatctaccccacagggcgcttttgaagaccaaatgctgttactactatgaaagtgctttgtaaattgctgtggaaagtgtgagctactcaagcacccgaggctgtccctccttgctcacatgtccagcccaattctcccttagtgagaacagcactcagtaggtgctgtgtgtgtttgtgttcaattaagaaattccagaataaataaaaatgaattaattcaacaaacattttctggggcaccgacaatctgcccagtgcaccaggctaggtatctgatacaaagataatgaaaacagtctcttggaacctaattggggtcctcatttgaccaggaatttctttcgtcccgttttaagccaaccagttttgtccggacaagacaaaaacaacttgggctgctttagagaagcccagctcagtgtagacaatagctgcccagcctctgaaaggggctgattggattatgtggcaaatggaggtgcaaggatgacttggacggtgacaaatgaagtgggcggagacctgctttgagttaatccaggctattaggaggggaccttttgtcttccagagactggcaggagcttttaccagtggtttttacatccttaatgttcaggacgaataatttatggtcagtgaaaatccaggccccagtgagattcgagtgggctgtaaaatcgagagtcctgctcccagtgagtaatggtagtgaatgtttctgtcactttttgcaaccgtccattcatttgatcctcacaactccctgtcctgagccaggaccggccactgccactcccagggaaacagaggctgtcaagaggctccacagattgggccccactggatcattgaacccctgttccctgagttctagaggaagaattgtacctgtctcagtcccggccacctccagaaggcctccctctgcatttctgactttgctgtgccggcagcctggagcctcccaggtccctgctgtcatcttttctagccactacagtctctgtctttcctttcacagccaagcttcttgaaaggcctgtctacacttgctgtcttccttcctcacctccaatttcctcttcaacccactgcttcctgactcgctctactccgtggaagcacgctcacaaaggtaaagacttttctgtggcttaatccttgtcatgttttcggctcatggacacaaggacacattttcatgccttctctcacagggctctgcgtctccggttcacttctgtgtctttacactcccttcacagagacacttgctcccccttctctcgttcttagcatcccctaggaacttgcacacccaggtctctcgacttctggacctgcttcttaccatgccgtcttaagcagtcaggagtcgctgcctgggttcgagtcctagttaaattacttagtgctgagaccttggggtaggtaaacttttccaagccaggtttatctcagtttcaaaatagggttaatcgtctttatctggcaggtcaggtgggatgtctcacaggtaagcaccagatgccatttgaaaggcttgaagcaaagtcaataaagcattcatgggaaaatacaactggaggcaccactagattttcgtatacattaggttcccacggggaggaccgaagagagaagaaagaagtggaaagggaggagcgtgcaggagagacaggagaagagaataactaaacaaagacattaaagacaaaaaaaaagtaggaaagggagacttagaaaatattaaaagccaccaaaaacacatccaaagacggtttccccttacgttagttgggctaaaagaaagcaaatgggaagaaggttttaaattgattatcccagtgacaaatcccaggaagctttcacatcaaatcaccctattctgggtttttaactccttccatcgagtttaacctctttacctcccacatcctggtaaaccctgccccctccctaccgccccctttgctggtgattaaatcctgaaggtacacgaagtatttcagtgaatgaatggctaacagaaaagggcctcccctcccccttaccctggcggtgtttttcagttttattccactttccgcccttttcccttaatgaacacagggctaatctcgggccttgtcgaaggaagaggctgcagacgttaatgaggttagctgctggattccagtattcgtcgcataaggatccttctttgtctgcgaaggaaaaacacactgattatcataatgaggtgaactggccaccgccgggccggggcgatgtggcttcttaagccacacttctaattttggtgatggagccgacatttctttggcttctcatttaagtctttgcctctgtcccagtgcgaagtccattcagcggggttgaaagttgcaggcagctttgggaaggggggcgtcggacagggttgcattgtagaaagtggctttgttcgatccttcgcacagatgcaaatggccagagcattcattccctttcttcaagagctgaggactgggggggccactggtgatcagttcccaactctagctctcctctgactcatctcaggacccattgaggacatccaaaactcactcaagatcaccaagtggtaggaaagtactaactcctgggcatagccctaggggagtgactacaatgtgaatactcatggaatgcctagccaggtgaagaagtgaatgcatgttggcatcccagagggaccccccttaagagggcatagtttggggttcagatttgactccagcatactgttgaaattgggcacagggggctagtgattagtcaggatcaatcagtggagaggagattaaaactcacatctgggagtccggaatcagaacttgtagttcttttttttgaaatggagtctcgctctgtcgcccaggctggagtgcagtggcgtgatctcggctcactgcaacctctgccttccgggttcaagcaattctcccacctcagcctcctgagtagctgggattacaggcgcccaccaccacagccggctactttttgtatttttaggagagacggggtttcaccatgttggtcaggctggtcttgaactcctgacctcatgatccacctgccttagcctcccaaagtgctgggattacaggcgtgagccaccatgcccagccctatagtagttcttcttttgccccttaatatcttcacccacatgtcctgtaccctgcctgaaccctcctcctctttttgttctgatctttgagctccctagagcccataattctttagagcaggtatgtcccgagtctgaaacatgcccttatttgtcccaagctctggacatttctcaccccaaggcggatcaatcatgattaaatcactccaattaaactttaggctccagtcagaccttcagccaaatggaaaaaaaaactaggggataagggaggtagttggagcaagaaaatgttattagttgaaaccttacgggaccttcctcccttagtgagtctgttggctaaaggttctctggcttcgtgaattagaatcggatactgtttccaagttagcaaaaccaactctaccccagcaccccacgaggaagaatgtggaaggatctcccattggccggttggggcaaaagcctgaggcaatctttcatccccttttgccaaggcgagactttcccagtgacggtgatgtagttggccactctgactatgggtggactcgggtgtagacctctgaagctgagatcacacgaaaacctggcctccccgccatgtagctgttggagagtagaaaaatagagcacgcctgatgtttctaaatgagaagactttcaatagtaatgaagaatccatggcactctcctcaccctcaaacacatggcagtcattcacatacaggccccaaagccactgttagtgctgcagtagctcctgtggacattggaaagcccggagagggcgtggaagaaatcagctggcccccggcaggttctctggggttttgtgcccaaggctcctggagccctaaaaactttcaaaagttaactccccacgtccccatcctgcttgggtttctggacttttctgaggcaccggcagaggggtctcgttgctcccttgagtgtaggggcagccctttaacctggctccttgagtccctgctttttctgcttctgttgccttcttcctcgtcttcctctctctcaatatctccctctctttgtccctccccagttcctgacctggccatcccggggtgcccttgaccagccccgtgtctcctcagggtgtcccagcaccagcctggcacagagtggggctcagttagagtatgtgggatgttggtttcgccaggtgagtgaatgaaaggactcgaccaccacagctgagccactagctgggccatgcgaagagttctaggtgcaaaggctggagggtggaattcatttttgagaggtgtgtgagcagcttccgacccctgccccatttgaacgggggccttgctggtcgcgtccctgcattcacccgcgcggccatcccgtcatccaacagttgatcctaactgagcacgcccacggccctggtctggcctgggcaccggccaccgtagcccatcccttgatggcctctgtgtccccaggagggcgggccggggggttgcccaggggctggagcagtggactgtggctccatagaggtaggccggagggtgtgagggcagattcaagctatccccagggctctgctctggtcggagccagccccttctccctctctgccttccccgccccattcctgatgctgaactgttctggacccctggccctgagtctctcaggaccaaagtgggcacgggaacagctgtagtgtgtgcccccccgggctttggccacaggtctccctctcgaggtgtggttgtgactgcgacccttcccttgccgtgatgccttcctcccccggggcttggtccagctccttcactctctagcagctgctggggcccacctcccatgccgaggaccagcaggggaaacctccagggagcatctgcaggctctgcttctgcccggctgctggcttgctctccctggtggctctccagcggccagcttcctcacccacccggcactccgctttgctctgtctcctgaggtgggcctgaccaacctccccttctctgcctcagtccctgggctccagggctcagctccacagccctctgcctagcaggctggttctccctgccaagcccatacctgtggtcacctggccctcctgtggtctgagtaccactcccctgccccaggagccactcccactccagctgcctgtttccagcaggttcccagtgcccccgacaagcccctgctggtgtctccatctcctgccaagcatcctccagtgcctcctcctgtgggcctggcctcagggctatggacagactcctgtcccatcccagagacccctcgtgatcgtgccctggtgggtgttgcccccgcctgcctttgcctccgccgtggccctgagagtcctgggctctgccccgcccggtcccttgctccccactcagttctggatttggggctgcccctaacccagcccgttgctgctttgcaccttttcctgtcattgggcatcccccagtagtcaccccactccaccgaaaagtaaactgcaggtgaggccgtgccccgagtctttcttcggtgtgtttggcttttccggggcgcttgccttgccatgattctaactctctgcccttccccaaggcacgtgggccgtggcccggctgggtcggctgaagaactgcggatggaagctgcggaagaggccctgatggggcccaccatcccggacccaagtcttcttcctggcgggcctctcgtctccttcctggtttggggtgagtttcttgctttcttgagacccaggattttattagggtcagctcatgtctctcctctctgatcaacaagagtgtcaacatttaatttggggaggaggcaccctgccaaggtgaattctcttcacatcagccccaggggtctgggggccggagagctgcctggagtggagacccttgctatacccagcaagcatgtgtgggggtccaccctggctgatggcatgctgtgggccggcgacggtaggtggggagtgtccacctccactctagacccccgagagcggctcgggccaggcactcaggagccctcagtacggctttgctgaacacattgcaaaagggatccagggggcacttgccctgcccacacccggcccagggaccccttcggagaggaggaaatgggaatgcttgcctgctcctcagctaggaagacatttctttccaccagccatggtagcgtcaccccctgtgagaaccgtggtttctcacacatgaggctttgataatgtcctttaatcaaatagtggtttttgagcaagttcttctctttcctcctttcctcacccctgaaattgcaatgagacgggaatgtttttgtttgtttaaataaaacagcaatggtagagaagaagaaagcgggattggagccacacaattcactcgaggacccatcatttgtttatttgtgttttactaattcaagatgcagccgggagccgtccagggctcgggcctggggttgttctggggcgcctaaggctgggctttgcactaaggaccagagggtctacttgggtgccgtggagcacccatgcagcaaggtggcttgcacagcagccaggcgaggtgtcgtcgagggcgggggctcagggtggcatgctggacggccatgccaggctgaagtttgggctggcaggaagagaggaggctcagctgaggccactttcctttctgggggtcccagggactgagtctgtggctcactcagggcgatggggtgtttttagagccactgccctgggaggcagtgtcaggatcctggcacccctcatatatgacgcccctggggtggccattgtggtgaatgagtgcagttagacttcccagagaagctgggtgggcgctgagaaaggtctgaaccgtggggtgaggctggctccattcccccagacatttatggaggcttgagggggccctagcactgtccttggcccagatgccaatactcccctctggacgcccacgaatggggtctctgagaaggaagtggatgaacacagctgcacgctgggtggggcccagcctctagtcctcagccatgtgcacgcatcagcccttgtgcaggcctccgccctccgccaccccccacccccggagtgtctctggtttccgacgcagcctcgtaatgctctttaatcaaacagaggatttggagacagctctcctgcagccctgcacttctcccctgaaattgaaatgggatggggatattatttttaaacaaaatctggcagcgtaggcagagggggcagaggcgctctaacctggggctgttgcctttgtctgcttgtttctgctctctggagagccccagagcctggagagacggggaggggagtgtgtgcccagggctaaacccagggagggggcccaggaaggctctgccccgtgacatttactccaaggctagcatttgctgagccacctgcaaacacagtgatgtggagaagaggcccgggaggggaggtttgcacaggggcaggctgctggggtcctggggggatcctgtcccaagcttactagaatgcattcgagtaactggtctgagccagatgccctcagctcttggactggtttctcacggacatctcaggactttcccaaggtggactaagcccagggacaaagtcaaagtgaaggccaggggcacacaggagaggcccagataggaccaagctttggcagcccctggctctcaggggttgaaatggaaccctctttgcactgagttgtatttcaggtactcatgagtgtttcggtctcaggcaaacacatatttggggttttgtgtgtcattaggtataaaataggtaaaatatgccacgttctcaatgaaagaagttgaaacgtgacttactacgtcagccttgctggtgatcttctcgggaactgccgaaaggccactagtaagtgctgaaagacatgatcattttcaggaaaattctattttgatggattggccaatgcctgagccatagcgggtggagatgagaccctgactgactaggcagtgagccacagaggaccctgtcacatcagcggagggcggtgaggggtctctggccatttgtcatcgtgctgattcctagggggctgcctctagtgggactcttctgggtgggtgcaagtgtcagggtaaagacggcggtctggtctggaaactggctctcctctcgcacctgcccgccctgggtggttgggaaaggaaaccaagagggtagctcaggcctgagctcgtggaaaggaagaacatgacccctcattcgctcactcgcccccacattctctcacctgcgagttgctcattgctgctttcagggcccctgacctcatgcctcctgagttgtgattcaaaccccaaatgaatttccaagtacatttctccaaataatgtcaaaacctggcaagacttaagggcaacaggatgcatgtgtttcttattcattcatttacataaaataacttaagtgtgttttttatgagcaatctgacttccaaaaagaatgaaaaggaaaatctacccatctttaatgaacttgctaatgaatttttccttgcaaagaggaagggagcttcctacagaagggggtgtggagggagacagattcaggtcccaaagggttaaagggcagtggacaatgcggaagccagcattgtgagctgcagtggaaaagccctgggtcgctgggagtggcttctttttaggagactggaattaatgagttgtgaagtgtcccaaggactggttccccctccctgctgtttctctgagccctgtcccctcttccaaaggaggaataaggaggtctagcttcgtctcccatccccgatttgagcagatggaagagtctagaaaagaggtgtaccttttgaaacgaggcctcagatgtggggttcctggtctggaaaggggaaggatgaatctggggtaggagagggtctcgtatggagccccattcagacagggcagtcccacacctgggctgcccacaggttcttgggggagtctaaggaaaggggagccacagaacaggcttgcctccttggcatggattgggtcagtgtttcagagccaggaaaggtgggagtgtggggggccctcggggctgatgagggcgtgcagaccctcccctcccacctcctgtcccaggagccctgcagacactgcagcaggagggcactctgccagaagaggggttccagctccagccggatccagcagacatggagagaccccttatctttgccaagacgagctctgcggtgcctgagaggcccgtaggtctggaattctagggccttctgggtttgagtcaggtcctgaggccagggcctgggccctgatcctcaccatggaaaactggtcactttactcaggataaactgtgatgaggacttgggacatatctctgtctgtcctctcagctcgcgtcacccctgagcccttggcgatcgtgggcggcccgtgtacagagcaggtgctgggtcactggggccgccgtgggcctcccaacatgagggactgtgtgtgagagaggagttcattaagggagaggatggtggtgaagggtgtagccatgactttcttaactgctctccaatttctttgagcttaaaaataaatccagatggagagttcttaagtcccctatcctgggagaaaggaaggctgcccaccaccttcggcttgcctcgactctgagcagtgaatagggtctttggcaggggcttaaggaggagactcttagcctgggagctcccagggctgtttcagatggaaacaaaggctcaggccgagaggaatgtgggggagccccccgtggggaacagccacctggggataattgggagggctgagcgcagatgagttttcccaggttctgtgaatgcgccctttcaatggaaggtgcctttttttccagatgaaaagaagaaaacgtcaattaccttcccctgaaacggagtgtgtgtgtgttccctcccaggggttgtgtggggccccttgcccttgtgtgtgtgtcgggagctccaaggctgcacaatgacgcacttaaccagccactgggttcgcgcgaccctgggatgctcacgctcttagattctagggcttgattttgaaagtttcttagcaaaggggaatcagagtgattgagcctgtaaacaaaaatttgatcaacctgggcctgatgcctgaaatatagccaaagagacagaatggggctgcggggagagaggtccaggatggaaagttggggaaggaggacagtcgggggccaaaggctgaccgcatgtctgcgccggcctccgcgctcacagctgggctgctccttctgccaccccagccctttctctgggccttcctggcagtggacatagagtgattccctactcaggaagttggcggtagggggctcagaaatccacagggctgttgtttcacagttagccaggagaggagggggtcatggtggcccgcagggatggtgggcagctgcgagagaggggacgcttcaggttagagcgaagctgtttgcaccaccactgccccagactgccgtaagggtagggccactccagaggcaccagggacaaagtccctgccgtgacaggaggggggcacaggtctcagtcttggctggtcactgactttgctgctgctggcttctgagcctcagagaggtcagcagtcttccagagacctggttagagcctgtgctcagccctgactatgggtgtgaccttggcccctgtctccagccccttaggcctcagttttcccgtctacgaaatgggcgagtgcaggcccatggtcgtccgagtggctcggggtttcttcaggcctccctggaggtcatctgtcgtttgtttgctgggtctttggagttgttgggactttgggggtcactggtccgctgccccctctgctttagaggtggggaaaccagcgatcccagaggcccggagccttgcccgaggttgcacggtgagccggcagcaggccctggaggtgaagcccctgccagttgccagctcctgtgtgacctgtgtggtcggggggggtcacagtcaccggtcattagtgtgggtcagagctcttgcccaaagaaggttccaaggggctgccccatgagctgggatgcagggatcgtgttttatggggcattattccaaacaggcaggctgctggtctggtctggaacacctttttggtctgtagagtgactcttgtttaatgagactggacttgtggcttcagaaccaggagatgttcgttcccccaacccccgtggctcaccttgtgccttttgggtcctgagaccctcgccagcgcctctgttggcacggtggcccagtcggctgagaacttcctgaaaaagccaacaggatgacaacttctggaaaagtgatcatcacccgcctgcactggctgcccatcttagactcagctttgccaacattcccagctatctctgtgtgctgcagtgtgtagtaatgaacagctcacaaaacctccggctgggcctgcacctggttattaccgtggtgggctgcagcttttgttttgtgaccttggttgctacaatacctgcgagctgaaatgaggaatcgaaaaattgccagcttcaattagacgggcagactgctttcccaaggctgcctccgccactccatccattaacggtaaacaggcaccaaataggccctaattctctctaattgcccactcctgaagcaaagaggtgaaattccaggaagaggcgtatgtaaacatcctctgtaacctgaccaagtaaaattagagggctgatgggggcctgcgagagagaggggacatgatttcaaaagatgtcccaattacctctcctattttcataaatgggtctgtaatgtccagggccccggcctcacaaaggtacaggaaattagctctgcaaagagcttgcatttgtcaggggaagttgtaagggggtggtgtttactcaacaggtaggaagtacgagatctgaggcaagactgattatttgtgtaacgacgggctctatttcttgagatcaacattttaataaaagtcatccttttaggtccttttgtgtttgaaacagccataagttgtttataccaaagacatgccagatcagttaggtgctgtttgcctccagaaaagaggaacttttaaaatcctaagatgcagagctagagttttctaatcccattaagctgtggaagatgtttttggagtgttcaccaatgctttctgcgtgggtcatgagctcactgcacgcacttatgaggtcttccatcaaatgcttgtgacaattactcctctggactctataaggaggcctcgtgtttttctttggttccagacagtgactcatctctgcagcttttctgacatttgttaagattctagcccagcactgcgttattaacacatcacagcaagcccagagctggcacacgcagcttttaaaccaaggcacgaatttgctggggcttctctgtagcagagcagcctgcggtctgcacacaagagttaattaaggacggtcagggactctgaggtttcatggggtccctggagcagaagcaggaaaaaacccagatgctccttcctgcttctgatttctccgctcctattaaaaacacaaaaaagaacaaaacaaaaacagccaaacaaagcacccgcctctgattcctgcgggaaatggcagtgcctttggtcgcgctgtgtgttcttggcctgagtctcgttgccaccttaggacgtggcgatggtgagaggccaccccagccacgcacagtctcggagggagggtgggaaacggtctcgagtggtggtcagtagataatgggtggtctggcagcctttaggtaaccgaagtcggcccctcagtcacccatgcactgatcattgcttcactaacacttattttaagacttgttgtttcttggttatcaaattaaccagttatggcagaacagggtttatgaagggcaaggccagggaaggagattttaggaagatttggaggcaagaagtgtccccagtgccctggccgggtcttggacatcctggctggagacatgactaggaatagagaggcagaggcagcaggggtggcccagatggcaggggtgggttggagagatccctgagaggcctgaggacaggcggcagtcttgggagcccctgaagacctgcagtggggcaggcagctggagtcaggtgtctcccgggacctgttttttttttttttttttttttttgagacagagtcttgttctgttgtccaggctggagggtagtggcgcaatcttggctcactgtaatctctgcctcccacgttcaagcgattctcctgtctcagcctcccgagtagctgagaccataggcacataccaccacgctgagctagtttttagtagagacggggtttcatcatgttggtcaggctggtctcgaactcctgacctcaggcgatccacctgcctcagcctcccaaagcgctgggatgacaggcatgagccacccccctggggctggtacctgtggtctgtggcttctgcctgccctggtgcccccacatctctctcatggcctttctgtttcctgggtggctttgtgggggtgtcccatggtctccccctggcttcctgtctccacctgtgcctaatccaggaaacggtccccagagatggtgttttcaaacagaccttggccctgtcctcctggcccagcccctggctgccctatcacctagcttgctgcgttggtgggacctcagctgtcacaggctacctttctatgacgcctcctcaccttaagtagactctgaacagattttaaaagccattcattcaacacattttttaaatgaataaactttttttctgtgtagttttcagtttacagaaacattggtgggaaagtacagagaattcccagatcccgtccccaccatctcccctgtcattcacacgttgcctccgtgtggtgtggtctgtttgttccgatcgatggaacgactctgatacatgattaactagaggccttggttcacatcattagggctcactctttgtggcgcacatcctgtgggtcttgacaaatgtgtcatgatacgtgtctgacattgctgaagtcaccttttcttaaagcttaacattttgggagtattctgaactatgtttggcccagcctgctgcccgatttttataaaaaagaaaaaacaaaacaaaacaaaaaaacaagttaaaacgtaaggcagatcttgacactgaagactcgatgtgcctggccatggtgcttcccggggcctactgcactgtgaacaaaattgccacagtggagttgtctgtccaggcacacaacgtgtgtgccatggttttgggaaacgctgcccattaatagccctgcagccctctgtgggctgccctcccggccacaccccgcttccctggtctcctccagggccagccatcctgctcgccgacctgggcaccttgcttctgccagagcacaggttcatgccctgtcttcagggcctgggccacccccgtttctcatctatgcagggtcctaagcctttgggtcccacagagcacgacttcgctccgtgaacagcaccaacccaagtctgttccatgtctccacacctgccccttccgctccataggcagctggtgggtgagtggagtcaggagagaaatgcgtggcttctccaattccacacttgctggaggttggggagtctctgctccaggccacccctgcccgccccccagagctgttgtcctcatccgccctcctcctcctcgccggcctgagtgaggttctactctgtgacctagtgccttcttgttacagcggaagccatcacctggatgcctacgtgggaagggacctcgaatgtgggaccccagcccctctccagctcgaaatcgtaagtggctggagtgtaaagaacacacatgtggccttgctgctgagggtggggccagctgcccggagcacaccgccaggcggacctcgtggaggggctggcgggcactggccgggggtctgtgcaccgggaggtgggtgcccatcgagtcaagccaagtgcagacctgggggctcctgttttctaagacaggagccccctgcctccttgtgttgtctctgtggcaaaagaattctataggcgggcttcaaatgtcggaccccaaaagaatttcttctttttcactcttctaaatgaatggctctttcattattgagtctccctttggctcttgtgccgcagggcagactaggatggaagtgccctgtgagctggggggcccttcaaagggccaaggagaaaacgcaggccgagggaccagccttccaaatgggcttcaagctccaatgacctccgctcgccccctcgaaatgtctggaaaacataatgggcagattttctgtcttcaaagtttccggctaaacctcttcaagttctttattgtttgggactgagacactcagccatgttaatgggtagtttcttttgtatttgccttgaaaggccaaaatatttttatattgccacagacaaagccacctatttaaaaatgaactccatgtccgtcgtttcccaccaggagactatgtaccatgtgtgtgtctctatgtattctggggtcttgaaacaggtttctcatggggatggtcattcaccacggtccagaggggcagaacaggcggcgcttgccttgcccagggggcctggggaacgtgggccctcatctcagatctgcccccagtatgtttaggacgcgagccccagaaggatctgggagtaaacttaacattcactgtgtctctgctctgcatccgccatttgtgtgtgtttctggactgtgggctgtgtgtaccttggttggtgactcagtgagaagaagcaggaatgccaaagatactgtgaatgttctgagttttgttgctgttgttgttgagaggttgtttcactggtatctattgcattgtataataaatgaccagatgaatgaatgagtgaagcaagagagaatgaataaacaagtaaataggtaaagaagtaagcaagccaggatgagagtgtgtgtacacaagaccatggttcatccgctttgatggctaggcaatcaatatataaatagaaaaaaaccagtgaatcactaagtaatagggcaacacacaaagcgatatcaggtgattatggactaaggggtatgtgtaactcaaatatatgcctctgacatttgacaatgaaaaagaacctaaatgaaagaaagaatggatgtatgagtagtgaagtgcagaatgagacatagattttgaggcccgtcaaaatgaaaagatgcaagttagggaacaagtgatcaaaagggagaagggaaaggttttttttaaaaaaccaaaacaacaaagaaaggttaaaaaaaaaaacagactagaggatgagtaatgagtaactctgtaaggaggaccatgtcagactattgtaagctaagcattaggactgatacaaataatatatgctcctggcatagaaaaataaaccacagagaacgagttcaaagaatagcaaagaaagaaagaggacccagtgggcgaaagatgagagtgtacttttaccaaaagttatctaagcctgagcacttgaagtctgcacataaataaataaatgacaaaagaaagaaaaaaaggccaaaaagtctacattgcgtgtgtggatggatgaatgagcagtgggagtgcagcgccaggtgacaagatgttgtgaggggttttgagtcatccagtcctgggcactgaggtctgttagatgaaaggatatgagaaaggtaatattggtaaataaagaaataggaaacaatgtaacaaatgttaagtacagaaatacattaatgggtggtaaataaagatgtaaaagaaggcaatgcgatcgatggtggcaaaagatcatcacagattaagggctatggctggtccacttctagaaaaccacaggctgtccattaaataatgaacatctaagtgaacaagtcagtgagtacctaaatagacaaggatgaggtgaatgagaagacatggccccatgggtcctcctgatgagggtgttggggtcccccctgggcaccccagctgcatgaaaatgaaggacaggaggtatggaaagctatgacagaagagagaaaggaacggtaaaaagaaataacaaccaaatggataaatgggtagatccacgagaagagttaggctaggacttgtcataagggcacctgactccactaatagaggaataaatgcctaataaaaagagagcaagcaggaaggaaggatgctatgaatgcaggaaggaagtaatgagtgagacgtggaaccgcacggccaaggatggacgtttgcgggtggctttttgatgcgtacagccaagccactccatggcaatgagctccgaagacaaagtgcaagagagaatgagtgagagagtgagagagagagaaacaataaaaaatgggaagaaatgtaaaaaggaagaaaggaagagaggtaatatattaaggaataaatacatgcatgcagatttaagacagagccatgctagaacaggaatgaaaggctgtgtgaaccaagcagaccgcttaattggcaccagtgctgctggtatggtcaatcacctactcaactaaggaacggctcaaagcatacacatgggagggaggagtggggccacagagagagggcccattagttgcagattacgatgtatccagttaggtgcacctgccttcgagaagtgtaaaaataagtatttacatagaaagaaagactgaatggatgcacggtgaatgcatgaatgattgaacgacagaaaagatttgcattgaccgatgaggagggcattgtagacagggatgagggtcattgatcctgggtgcagatctccaaaagaatgacagaaagaaagagggagtggtggaaagaaacaataggatgggaaaaaatgaaaatagaaaaaaggaagtgaaagagataataaataattagatcaaataagttgatgaaaggggactggtttagcacaagccatccacattaattcaaacctgtggctctgaagtttgttttttaaatgaccacaagtgtaagactgaatgaaagaataaatgcgtgcattccataggatgcaagaaaaggagtgaggaatgggaaaattggaagaacgagagagggagagatgtaagaaaagaaaggaaaagtgaagtaggcatatgaaagaaaaggcacttcttggacaagcactgaaatataatgagacagttttacccattaaatataataaacagtaaacgttgaggttcatcaataaaagcacagatacctgaatagaggagtgacctgaatagaattcgttcagccgaacgaatgagaatggatgattttcactatcctgtgcactcaaggcccaaaagagaaagcaagagaggagagaatatggaaacgtatgacaggatgtatataagcaatacaaacatattgaatgaataaataaagacataaatatgtgggagagtggaccacgcaaggacaaaaagaggagagaaggcagcaagaattatgactaattcaaaactgggttcctgagatagttaaataaatcctgcaccaaatccccagggggagaaattaacaaacaaaagacagccccacacggaccagtgtgcagaaggctccaggaaccgcagattatggttaatccaattctgtgcacctgaggtccataaataaaagaataagtattgaaatgaaagaatgacagaaagaatgaatggacacatgaacgactgaattagaaatggaaatgcctggcacagccaggaaggagctgcccatgggattgtcattcatctcactctgggcacctgaggtccataagcgtgaaaagaggcaggaagagaagtgtcagggagtcaaagatagagctaaggaaaggcaaaaatgaaactaaatgaaagcgaaagggaaaataaagaaaaaccaataaaaaagagaacgaatacgtgggtgtatctgtaagagtaggatctgttaggattagtcataagactgtcagtaatcctgaagatggatgagataatccaggcccaggttcccagggggagggaaaatggagaaaatataaaaagatgtgaaaaaggaaaaaggaaaggtaataaacaaacaaccaaagtgataaatggatagttaagggaggttgtctgaacagggattataattagtttacatacatactccttaaacagataaatacattacacctttcaaagaataaatgaaaaatagagagacatacctggctccaaaacaaggctgtatcttctgccactgtaataaaatagatgcaattgaggttcataaataaaagaataaatacttaaacgtgaaaggtgactaaatgcggggaagaaagattgcaaataaatacatgggccaaagatgtttggtttgcccatggagttttaattaaaaaaattaataaggaaaacaaatacccaaaataaggaagactgacaaatgagtgagtggatgagagagtgaatggtgcttgacgtaggagcagtagtgctttagggaccagcatgaaggtggtgaccgggagccctgattcatgggattctgtccacctgactttataagaaccaagaatggctgggaatggtggctcacgcctgtaatcccagcactttgggaggccgaggtgggcggatcatgaggtcaggagtttgagaccagccagtttgagatcagcctggccaacatggtgaaattccatctctactaaaaaaatacaaaaattatgggcgtggtggcacctgtctgtaatcctagctactcgggaggctgagagaggagaattgcttgaacccgggaggtggaggttgtagtgagccaagattgcaccactgcactccagcctgggctacagagcaagacactatcttagatcaaaaaagaaaaaaaaaaaaagaaggagaaagaaccagagaaacataaggaagagtgagaggaagaaagaaagatgcaatttgggaagaaatgaaaaagaaatgaataaagaataaaataatgtaacggtcaataaataggacttgtgaatggaggcctttaggccaaaggctatgattaatttcaagctatgttactgaagtccataaacaaaggactcagatctaaatggatgaacgaatgactggaagaaagggtggtaggaaggtaggaagaaaggaaggagggaaaaagggaagagaggaaggaaccttctttccagtcctgtgttctagacagtggaatgaagtggtccccagggagggtggctgtaggcatgtcatgtgcttgtcacatgcacttgccctggcagggaggagctggctcaggaagaccctggtcttggggtgctgttgccctatcttggctgtgtgggccatttcactgcatctgtctcttcctcagtttccccatctgtaaacctggagtggcaccagctgcctactagagttgatcttatgtgtctctgttgatggtaccccatctatggcctggataggcaggaagggcttggaccctgagccccgcagaaggttgcatgaacgagtggtgtgaagcctgttgggtagcttggccactcccgcggcatgggtcacctgcacaggaggttttgcccaccagggggcagcagagggtcagggagcaataggccctgggtggagcatgggccccgcctgctgtgtgccaccctgggtgtggcacctactcacatccaggggttggtgcagggaaaggccagaaggtggccaggcgcacctgagaagggggacccagaagccccgggacccaggagccctgggcaagccaccagaaaccttgttcttgcaactctctgcagtgtgcccaggccaccctctggcctggtcttccatggggcagggcgcccacccttctcaactcaggtttccctgggcagcaggtgcacctcagcacccctggggttgcagaagtggtccggggaccctggcttccttgacatgccatccccagagcctggttcaaggcctctctgtcttctcggctgtttcacgacgtgttttgtaacttggcgggattgcgtttcgctgtgtcgaggttgtctcttctctgactcgccctccgggggactgccggggtaaatctggagagttgctcgtgctgacagtcctcccccagggcctccccggttctgttgagtctcctttctctgtagtggaggaaatgtgtgtagttttgtgttgtgtgcctgtgtttgtctgtaaaagcaaggaccaaagtctcccttgttgacctctcaattcctatttgggacatataaaaacactggattcttaacaagcgcccggagcagtaggagcacagcttggatggactcaggacttgtggcagggagcacgtgggaggcaggggagtggggtggggccaggccatctggagtgggaggcgtcatgctcagagtgactctgtagacgctgggtgggatggggagtgcgggcgcaggcatggatggggctgttagctagtgtgatgcttgaggtctgagctgatggcagcaaagtggggtgctcaggaatcaaagctatggggttatagacaggatatgaaggagggagggaggcaagaagaagggggtggttcccacgcttctagctccggccgagtggatggcaacagcatttggaaggcggaggacatggaattcatgtgtcaggagccaccttccgagcctccagtaccacgtgtcagggccacatgagctgggcctcgtgggcctgatgtggtgctggggcctcaggggtctgctcttcttctctttcagaatctggggctccaggctatgccttggctggactgaggtctgggggtgcacttattatccctggggacacctgctgaagcttctccctgacaagctgtgtcactgttggatgaggatggggcgggaggggttcagggcagaagaagaccgggagggtctttcaaaagaactcatgtacggctgttaaaaaaagtcagcagaggctcaggaagacttaaagtgtgcagaaggcggggaagggagggcccattgcatgcaccaagaggaaattggaaggaacaagcgacgttggctgctaggagagcctgctcccaacatctaggggctgtcctgacgggtcacagtgggtcgaactgagccaatgagagcagctctggggagacccactggtgccctggaggctgggtgggtttgggttggatgaattctgtgtgtccttttggaaatgtggaggccatgaggggggatcagggctcttagggttttgacccttaagagttttgtatctgtaattcaaaggttctttagttctgggatgctgagattcgggatagggttcctaatggcacaaaagccagagataaaacatccttcacgtgctccctacccggttctttctgtaccagacccacaaggtccgagttgggatcctagtgctcctgtctggtcagggcctatctttatgtgttcgttaaacttttaacaatgagaattaattctgtctcttgacattgtcatttgcatgctccccacacacaaatcctttcctggtgacaccaggagctacaactctccttggcctcctcttgtgactcccaactccctccttgggaagcttggcctcaggacctctgggatagacaggccacgaatcctgctgtgtcccgttgtgttcctaatataaatggtgtggatggcacttgacctagagcagtgggaaatgcatgcaccactcaacattctgacatgtcacccattttacattcttacaggcatactttttttaaaaaaagagtgtctattctttaatgagcatcccttctttaaaaaaacctaattgccattattcaccacatacacttttttttttttgtatcctgcctcttctatttaattttctgtcatcaacattttcccttgttccatgaatcttcataacctcacttgctgcgttgtgccttgttgagtggctatggcatcattcacagaaccattctgttattcttatgtataaccaccttttaaaaatattatgaataatgccacaactaactgcttaaaacaccctttttttcattcttaagaattatgttcttccacccagaaattatcattgcttcactacagatcagtttcccctgctagactgtgagccccataagggcaaggagcttattgaattggcctttgtatctctgatgcccaacatgttgtagactataaataaatgatgaatgagtggatggaagaatggaggaaggagcgagtgagtgagtgtttggctgatggataagagggtggaaggataggcggaaggatggattggtgaatgaatgaatgaatttcctttggttaagtctcttgaaagaaaggctatggatctttgtatggatgttgaataatttcagtaagcttacagcattttacaatgttcagcaatgtatgaccacttaattaagatatggctagtttgtctctgttataaagtacttttgcattactttaacttgcattgctttaattactaatgatgggtgaacactttgacctatgtttgttaacaaattgtattttatcttctgtgaactgtttgtccaagtcctttgggtcatggctttctgaagagactggtcccagatgtccttgggatgtagggagcccatagctcactggaggcattcaaggaaccagccaggcagccctcagagaaagtagtgtttaggagattctcatggtgtggggttggcctaggtggcctttcaggtctgtttgatgttaggatttgcttctccctgggaagtgggtgatggggaaaaagacaccttccattggcaggtgtagacactgcaggctggacctcctgggtgtgcttgtggactccgatcttgcccttgataaaacccctgtgggacaggaatagctctttgaacctccaaggtccagacagccacatcctagcaccctgtacaatcagttagtggccttcccaccagcgcagtcactcattcctattagatcccgatgaagccaggccctggggtttccattttcccacctcttaggggaattgggttccccgcgtcctgtgatatgtcagcaaatgtcctcagccctggcctgcacatgtggcctcagtggtggtctttggggtttaactgacgaatggaacattttggatcaggactgatgggagaatctcctttcatttttcttcacctggggcaattacattctaaggagcggaataaagggcatgttctgcccaaagcatcagggctcacaggtcagtcacagccatttagggagggcatgtcacccaaggagggctcgcccttctttccagagcatcctccgctctcagcagagctgcttctgcccacccatccctctactatagcactgagcactgtttgcccgtgtcagaatccctcacccacatgtttagcttggtatccgagtttgggaggccggcaatgactttcaacatgaattgctccatctacccatccatgcatttggcctacttatcttgaccccgtgcttttggccttttcttctcctgaaagcaaaccctttcattttgggtgggctgtgtagcgccatgggctgtggttatgaagcaaacaccctttcttgtagctgcctcctccggggttactgccctgagcacgtcccagctggatctcgtctgccactgtcacccatagcttcttccccatggtgctttccatgtgtcacacaccacgactgtgacccagggtcggggtcaagagtagcctggggccaagccctcccacccatgagcggagaagtcctccccaggcctcaccttgcctggcgcatggtccctcccatgagctttgctttcagcctttcagcttcctccacagggtggcagtggttgtaactcatccattcatcccttcatcccttcattcattcactcacagccaacagacgtttttaaaaaattagccagtgctatactagagctggctcccaaggacccgctgccgcattgccttttgaaacaaaacaatgaacacgttggtaaaggggccgtgcttgtgtgtcggtgacaaggcgagatccctgagtcaggtcaggcttgtagattcgagttctgttgcgagtttgattgcccctctgactttgtcccctgtacaactaggttgattaggaatcagccaactgtgttccctgggtgctcagaaatcacagcccatatcctcgagaggccaaaatgagagccagggggttccaagatgagtggctgcttctggccgggagcaggttttcaagtcattagaacactctggcctttcctggaggtgatcttggagccattcctgcccctttcaagaggagttaatgcccagctctgtttagagaaaattgggggagatgattgctcatgtgggtgataagaatcacctcccgtgcaggggtctgcatagaacactccataggcaaacctgggtgtccaaggcacgtggcattttgcaaactctgggtgcagctccgagctgtcctgcaggtcccagaccaggtgagaactccctgagttcctgctgcctgggtcgggggtgaggcataggtcttgggggttcaacctggaattctgaatgtcattcattgcattggagaggaaggagagtaggcaaagccaagaccctggaactggacaaactcgtgtggtttaaagtcactgtgagagctggagttgagtctgcctacgggggaggactgcggcacctacctcgcagggctgttgtgaggagcaatgtaaccgtgattttgaactgtgattctggaagggcggtgtgcgtgtccccggggtgtgccaggggagtgaggagaaaaggccagggagacagcctcactcaggcagctgagtgggagagcatttatctctaaacctggaggggtatatggtgggacaggaggaatttgggcaggaactgtcatgctaggggtttgggggactcgctggacaatgcccctggaccccccgggggtacgcgttcacgctcacctctgagaggctggaaacgcctggctgtgctttctgaatgctgtgtgcttcctgcctctgtgcctggcctgtgtgcagcacctacttgtgtccgccttcaaaaggcccttctgggtggcgtccttttccccaaaatattaggcaccagccatcaaagatactgcattgttgcctcccccacccctccccccgactgacaacatttgggctcaaatgcagcaggctgggtgcccaacacagtgcctggcgagtggtagcgcttacgtttcttttctgttgaatggatggatagctaatgaaattgtaaccaatgacaagccttgatgtttataacctttactaagagattattattttgctcttcatggacctgttaacaaccaccatattgtatcttacggacgtttgtatgccacgtttgaagagcaggagccttgtttcggcgtcatgttgatggaacttgagctgtctgatgcgaatctgtgttttatgttagaaagcgcgtagccttaggatctggcagacccaggggccacttaattaaccctttgcctctttgaccctcaatctccttttctctaagccataggtcacctgaaagcctacctcacagggctgttgtgagggccgagggtgggtgtgtttcaacagtgtgcagatgctggctttccctgggaatgggcatatgttgggatttgtcttgaaagcatgagtgatggctttactagtcctaagtgaataaaaagtcagccctgaccttacgctgggattgcatttcccacagtcagtggcatgtgcagaccactggcagagcagcctgcaggtgcttagcgatgtgggcccagagtaaatatttgtttgattgatgagtgatggctttttccttcctcagagtttgccctgccccccattccaacgtgggctgctgcttctccccagcgggttgtagctggcagggccgttgtgctttggggtttgctgtacctgtcgctgccgtgaggggacgatctgtctgcccggaggggtttctgcaaacattcatgtatgcccctgctttcgtttgttagggagaaggagtggggtgacctagagagaggatgaggaaggggttctgggtggcatccttggggtaccaaccctgcttccatcctgcgctctgaatttcctcacagcccttttctgtctctggtagaaggtgcagaaggtaggctttgccaccttccctgggcctggcaccaagctcgggggtcttgtacacactttcccttctctaactggggtgtgggcccatttcctagatgagcttgctgagaatcaggacagctggtatcagagccaggacttcccagtcttgcacaaacaacctgtgcatttttgagtccaccaaataaggcctcctgcctggtccggctcacccctgccagcccccagcaaatgcagcctggtgcgtccccacccctgccaagagcccaggagtgctctggcagagaagtgcagggatgaggaaggaggctgtgccctccaggggactcagctgcgttagaggaggtgctgctgcagtggcaggggtctccagacatcccacgcaggggtcctttcagatcaggcatctcttcaccagaccaccgtattcctttttcagccctcgtctcttgcacgtgggggtgcagtgtttggctctcacatccccacattccagctggtgggggtttgagctgggtgttccttctgctccccactccccactcacggcccccaccccacgcaagcctcccttgcccccactctttgtctccagctttcacagccttggcgggcaggctgctgcgcctgttgctgccccggctctcttccacccgcctcttctttctcagcctgagctttaccgtgaggtctgggcgccacaccttggcccctgccatgcctgctcccagaagcacccacgtgggtcccctgattctctcctcccctgggctttgctaaggagccctttcattgtggcctttggtgtctgcctcatgcccatcccctgttcttgagaacttggaagcagagggggcccctcctattgctcccaagaggctccacagtagggagcccctcccaggagattctgagtctgtgtttaggtgtcgattcctgggtgggccttggggtcccctcaggccaggcctgtgtgtgacctaaggctggggggctctgtcaggcacctagtgtcccttggaggtgggcggggctgggtcctggtctcctgaggacgggtggggagacaggctcagggagatttccacgaagctgcccttgaacccctcctctgaggcccacactgccctggccctttacaccctgcctcctgcactagtaggcacataatagatgctcgccacctgtggagggcagggtttaaatggctggaaagagctgagtgggctgtttggctagcgtacgcgcatttgtttaaaaggaaagggtgtgtttcttggcaaagactcttcggaggaaacgctgaactggggatgggtctctacctgttctggggcctcactgcccttcctgccggggacaggcagtcactggtgggtttccccccagtggaaacacaatattttggaaatatttgtatctaggataaaacttcatctggaccaacatgtctttgttggtgttgtggcccaggtgattttgagaatgtagaatacatttggcaatttccaaacggagtgatgacctgctcctccgccccccatgccctccctgaggctggaggcttcagaagcccctgccttgggaggaggctgttctacctgagaagtctttgtccccaccgttggtgacaatcagcattgacctgtgaggcacctgccaggttcgggacgcagctttagacatccagaaaaccgggggtggaggggtggggtgggggcttaagaccccagagcttgattccttttaactgtctcatccccaaagaatggtacatgggtaccaggtaggttacttgaatcaccctgagcctcgattttcccacccgttagaaacagggtaattcatgacagtgtccgcttgggagacggctgtgacccctgagaattctcgctgcatgccgtgggctggctcgtgagactcaaggtctgggttcgaggcccccgcaaccccttctgactgtgtggcctgggcgagtttgttgtttgtaacctggaaagcgtcacacctgcctggcacggttattgtgggcttcaatgagattgtttgtgtgaaataaacgctttgtgactggcacacaggcgctctcatcccggctctcctggtgggcccggaccgctgggtgctggctgcggaggccctgtgctccctggaactgtctgcgctggtcccagggactcttgggcagagtggagggcaagggggaaagcaccagcctgctctggggagacagtggcagagggaagtgtttgcttttaaatacactcagcaggttcagacaggagaggatccgaggggaaatgtttagagccctcaggaggaggaagagaccgagttttaggaaaaacatcaaagctggataggttgggcagaagagctggggatagcatttagagaggctgagagtcctgggttctgggttatcaaggtgagagaaaccagaggttgccagttgtaggtgggcgtcaggactagagtgatgcttccagaagtttctgcaagtgggccgagtctaaggtagggcagggtacgccagaagttgaggggcactaggtagacaggccgagctggtggctgggtgctcccctcaccctccatgctgctaggagcccgtgagcagggacttgctctcctctccctccctcctggggcctgcctgtctgtctgtgaactcttgtcggccagcgaggccgggagcaggtggccttcatctgcaactgtgtctctctcagcctccacagccacggggacaccctgcacctattcccacgggacaggctggacccagagactctggacccggggcctccccttgagtagagacccgccctctgactgatggacgccgctgacctggggtcagacccgtgggctggacccctgcccaccccgcaggaaccctgaggcctaggggagctgttgagccttcagtgtctgcatgtgggaagtgggctccttcacctacctcacagggctgttgtgaggggcgctgtgatgcggttccaaagcacagggcttggcgcaccccactgtgctctcaataaatgtgtttcctgtcttaacaaaaact

SEQ ID NO: 7064 - DNA, 441 bp, Homo sapiens
tgctccctatggggaaggagagaccgactgcttttgctgccacagccaccacggccatcacagctaccacggccgccactgccactgccactaccaccaccatcacaaccatggccgccactgccactgccacctcctccctcttctccttgctctcctcctcctcctcttcttcctcctcttcctccctcttttccttccgtctcctcctccctcctcttcctcctcctcttcctcctcctcttcctcccaccttctcttcttcctcttcctcctcctccttcttcctcctcttccttcctcttcttctttctccttcctccttctccctccccctctttctccctcttcgccttcctttcctgccttcttctcctcttccttttcctccttcctttttcctttccttctccctcctcctcctctttctccctcttcttc

SEQ ID NO: 7065 - DNA, 1610 bp, Homo sapiens
gagcggactgacattacctcatcatagaagcccacgggaaaagaagacacatcccccagacctcacctaagtgggagtccagagagcctccttgatttaagtggctgtggctttcaaaaagtgttaaggaattcaaaaaaaggagagatctcttagaactgtagagggaaaaacagggggaagtatatttttgtggaaggatttagagatgaggtgacactgtggcagggcctcagagaatggggagcatttgaacttgggaaagtcggggaaggaaaagcatgaactaaaggaagtctgaaggaaaatgtcaattatggggtattgcaacaaaaattagtttagttgctggactagttcaggagggagaagtggtaaaaataacaaacttttattgagcctttacaatgttccagggacaatggtgagcactttatatgaataatttcattaatcttcaaaacaatcctatgagacaggttctcttgtttcctccattttatacatgaggaaacaggaagcttagaaaggttaagcaatttgttcaaggtcacaagaggcagaatcaggtatttaacccagaatcaatgctcatcaccacaacactatcctaggattagattatgaggaaaactgtgctggagtgaaggcctgagactatcttcttcaagtagaagggagccactgaaggactttgaacaatgagaatgacataatcaatgtcattctttaggagggtcaaggtaataatacaatgatcaaggatcaagcatccaaaatacatgcaagaaagacccccaccaagacttcttacaaaagtttaaaaatataaaataaaagtgcagctttcaagcaccaaggtaatttccctgcttcagctaccattaaagaactgaggcagttaataagagaaagacagtcttcatctttccccacctgtatttcatgaattgcttcaggacgtcaggctatggggcaccagtacagaggaggctagagagacaaatgaagcaaatccccaatggtggctgttggaaggtgcaacacaaaagtttcttcatctttaaaacctgcatggaagtaaagatcaattacccatagaagtatggggactacctgtgacaaaatgattaatcccagtgggtggccctactgccaccttgctccttttctgcctgcagtggtatgagacccttagctctttggatataaagagatggatataaagtggatgatgcgctttttatagcaatgtaacacaacaaaatgtgacaagatatggagcagaaaaaacagatataaaaattacttcaagggtgcagtgctcactcttgtaatcccagctgcttgggagactgaggcagaggaatacttaagtacaggagtttgataccagcctgggcaacatagcgagctcccatctctaaaaaaattatttttaacttagctgggtgtggttgcatgcacctgtagtcccagctacctagaaggctgagacaggaggatcccttaagcccaggagttcaaggctgcagtgagctatgatcatgccactgcactccagcctgagcgacagagccagactttgtcacaaaaaaagaaaaaaaaaa

SEQ ID NO: 7066 - DNA, 1610 bp, Homo sapiens; identical to SEQ ID NO: 7065

SEQ ID NO: 7067 - DNA, 1610 bp, Homo sapiens; identical to SEQ ID NO: 7065

SEQ ID NO: 7068 - DNA, 514 bp, Homo sapiens
aacaccctgcctagatcaattgggctgagcaaaaccacaggcagcaatcctcaagcccatttctattcttctggataaaaaagacattttttttttttttcaaaatataggggatgtcatctttttcccagccatcttgtgagggaagaagatagcaagacagaaataactccttataatcttttcaaataccaaagcattccacttcccatgcaatcattttgaacctctaacacgagcaaaaactatagctgttatggagaaaagaactcttagtttgaaaagatcgagtactagcatatagaatcccccaaaccactttaaattaatgagtcatacaatatatctgacatgttaccaaatcctccccagacccaaggctcaacagtttttgaaatctcaacacacattttctgaggaattgcagtttggaatgaaactagggcttctggtggagtgatctgtacagtagtcacaggatggtcctttcactgaataaatactttttgagcaa

SEQ ID NO: 7069 - DNA, 514 bp, Homo sapiens; identical to SEQ ID NO: 7068

SEQ ID NO: 7070 - DNA, 514 bp, Homo sapiens; identical to SEQ ID NO: 7068

SEQ ID NO: 7071 - DNA, 3845 bp, Homo sapiens
ttatttatttttatgaaaattgtggacacataaccaagataaagaagtcaggtattccatagccattccttatctcctttctgcttagttgactttctagctgagtggtgcacagtgcatggaagattccacttagccggaccaggaagcttggtctcatctgtggtgcacaccaacagcaaacattgatgtaattctctacaacttaatctttggcacatagaggatttgggggtctccatgttcagggcacaatggctttaataagtgctggaaaatcactgaagctaaaccaagagcaccagatcctctttacctaaataaccagtctttaacatgagctagtccctgtaccatagtattgtttcagctgtagttggttgtcatgttaataagacagctgcacgtctaccttcttttcttttgatttccattgtcttggtaagttattgttagggttatttttaatgtgccttccagccagaaaaatcagctgtctaaagaagcattgcaattgtaatggggactcttacctcttagaatgcaagattttccctcctccctccctcttctccatctctttccctcatgatttgagaactgtaataatcctccactggtggcattacctacctagaaaacctgctgattcttagcatggaactttgcttcagtttgcaggacaaagtctgcttccttccggtcttcatttactttttatacaagggatgcagtcagctctccatgtataagatacctagatgatggatacatatttcataaatgaaatttatgtcattaatgaatatccccttgcccacaaccagctcaggctttcaaaattcgagaatggtcatgccacacagcattctaatctagatggattaattctgttgttcaaaacattctcatacctgcctttatattgaaaacaaattctagatacaactggggttattctggaaaagcacattctcaccttttttttttttttgagacggagtctcgcactgtcgcagggctggagtgcattgtcgtgatctctgctcactgcaacctctgcctcctgggttcaagcgattctcctgcctcagtctcctgagtagctgggattacaggtgcccaccaccacgcccagctaatttttgtatttttagtagagatgaggtttcaccatgttggccaggctggtctctaactcctgacctcgtgattcacccgccttggtctcccaaagtagtgggattacaggcgtgagccgctgcgcctggcccattctcatcttattcaaattactggcacatgggcaagagagacaatgacatggatagaagcttttctgcctttctctgcacacacatacagtgaaggaaccacaggcagattttttgatcagtttggtgaatacattgctcgttgtcactgttccaaccacattggtaaaaaaaatagttaccttttgtcctttggatgtcatgtctaaactttggaaaatataagtcattgcccttttagagaatgtttgtgtagtccaaagattgtgagctccatatagtatgaaaatcaagtacttttgcatgagcaatagcagtttcaaagtgaaatattataatttaatctttttcaagtagatcaaaaattcttaactgattaataaaatattttatcaatatatcatccccctttcagagagaagtccccagaagagacagcacacttagcaattgccctcattattaaaggcctaggtgagtggcataaagggccatatgcgattatgtttcaaggtaaacattacctaaccttgtgtgggttaaaaacagtgaagtgtccttgtatcctgataaaatttttttttaaataacatggtgggttgacatttttgcatctgctataagttttctcacatgtcgttcttcctggtgagagcgggctgcatcattctggcacttaatttgggtgttcgattttgctatagagttctttgcagtacagcatagcctcttcttggccttgggaacagtgaactcttcttttgatggtgtggattgcatgcatatctggagagaggagggctcaggactgtgttcactttatttggtcagatgtattttatttgaaaaccatttgagcccaaaatacaagtgtacccttcccacttctggctcaagcacccgtgagccgactagacgtaatattaaaacttactgatgctgggtgcggtggctcatgcctataatcccagcactttgggaggccaaggcaggcagatcacctgaggtcaggagttggagaccagactggccaacatgacgaaatgctctcgctactaaaaatagaaaaattagccaggcgtggtggcacacccctgtaatcctagctactcgggaggctgagacaggaaaattgcatgaacctgggaggcagaggttgcagtgagcagagattacaccactgcaacgagactcgggcccagacgagatctgcctgggcgacacagtgagactctgtctcaaaataaataaataagtaaatagaacctcctgagctaccctggcttataaggattcagattactttaggaaattaggcattagcactaggaggggggaagatggctggcaaaacttctagctagcaacctatgtctagcacatgggtaactaaccatagcgagatcctgaacacatatcctctaggtgcaggtggagggaacgatgtccaatacctgaagcagaatctcacatggacggaacgtctgtatttccctctcctgcacgaatcactcatcattcttggagggcttctctgcattcctccttttcttctctcccctcccctgccttttgtcttttctaaagagtctgaactccgatttccatgctctcctgctacattaataagcaaaacctgcttgtgtgtacggttctttactggaaacatgactttttgtttctgtattggttttactgtcatccagttttctagtttaatatctagcaaaactaaatctgaatgtactcgctttttccgttaagtatgccaagcacctcggttgaaaggcttgactcaaaccagaagtcttgctggaattcgtctctgaacacttgaaaaacagaaaccctgagccgcaacaaacatgcctctgtgtgtcgggattgcctttgtctctgcttccatgtggcttttccttttgtagctatgcttagtgacataatcttccctcttctagccttctcctttcaagcctgtctgttaattaaccatgtcagtattggcaagcatttatcttcccccaccctaacatgcaatcttctaagaattttgcaaaattctaaacaaatatagagatggtatatagaattcatatctagaaaactttgattttaatgtgagcttatcaaatttgttctggcttttttggcactaaggcaaaaacatgttaaccagaaataatttattcttcatgtatgtaaaatatttgagaatgtttagccttttattagaattttatttggaaaatatttatctttctacacattttacacttatgttcctttgcttataacccaatttcttaacttttttgttacttaagcaaatatcaattatgttttattatctaataaagtgtaagattcttactatctaaaatatttaattctgtgtgactaatatacttttctgatcattcaaattgaatatgaaaagctagaataactgtattgcaactgttaattccagccaattgtataatgataacactggtgaatttctaagtaaatctaatacttgaaaatttgggtatacatagaaaataaattttaatataatgtacaaagtaa

SEQ ID NO: 7072 - DNA, 3844 bp, Homo sapiens
ttatttatttttatgaaaattgtggacacataaccaagataaagaagtcaggtattccatagccattccttatctcctttctgcttagttgactttctagctgagtggtgcacagtgcatggaagattccacttagccggaccaggaagcttggtctcatctgtggtgcacaccaacagcaaacattgatgtaattctctacaacttaatctttggcacatagaggatttgggggtctccatgttcagggcacaatggctttaataagtgctggaaaatcactgaagctaaaccaagagcaccagatcctctttacctaaataaccagtctttaacatgagctagtccctgtaccatagtattgtttcagctgtagttggttgtcatgttaataagacagctgcacgtctaccttcttttcttttgatttccattgtcttggtaagttattgttagggttatttttaatgtgccttccagccagaaaaatcagctgtctaaagaagcattgcaattgtaatggggactcttacctcttagaatgcaagattttccctcctccctccctcttctccatctctttccctcatgatttgagaactgtaataatcctccactggtggcattacctacctagaaaacctgctgattcttagcatggaactttgcttcagtttgcaggacaaagtctgcttccttccggtcttcatttactttttatacaagggatgcagtcagctctccatgtataagatacctagatgatggatacatatttcataaatgaaatttatgtcattaatgaatatccccttgcccacaaccagctcaggctttcaaaattcgagaatggtcatgccacacagcattctaatctagatggattaattctgttgttcaaaacattctcatacctgcctttatattgaaaacaaattctagatacaactggggttattctggaaaagcacattctcaccttttttttttttttgagacggagtctcgcactgtcgcagggctggagtgcattgtcgtgatctctgctcactgcaacctctgcctcctgggttcaagcgattctcctgcctcagtctcctgagtagctgggattacaggtgcccaccaccacgcccagctaatttttgtatttttagtagagatgaggtttcaccatgttggccaggctggtctctaactcctgacctcgtgattcacccgccttggtctcccaaagtagtgggattacaggcgtgagccgtgcgcctggcccattctcatcttattcaaattactggcacatgggcaagagagacaatgacatggatagaagcttttctgcctttctctgcacacacatacagtgaaggaaccacaggcagattttttgatcagtttggtgaatacattgctcgttgtcactgttccaaccacattggtaaaaaaaatagttaccttttgtcctttggatgtcatgtctaaactttggaaaatataagtcattgcccttttagagaatgtttgtgtagtccaaagattgtgagctccatatagtatgaaaatcaagtacttttgcatgagcaatagcagtttcaaagtgaaatattataatttaatctttttcaagtagatcaaaaattcttaactgattaataaaatattttatcaatatatcatccccctttcagagagaagtccccagaagagacagcacacttagcaattgccctcattattaaaggcctaggtgagtggcataaagggccatatgcgattatgtttcaaggtaaacattacctaaccttgtgtgggttaaaaacagtgaagtgtccttgtatcctgataaaatttttttttaaataacatggtgggttgacatttttgcatctgctataagttttctcacatgtcgttcttcctggtgagagcgggctgcatcattctggcacttaatttgggtgttcgattttgctatagagttctttgcagtacagcatagcctcttcttggccttgggaacagtgaactcttcttttgatggtgtggattgcatgcatatctggagagaggagggctcaggactgtgttcactttatttggtcagatgtattttatttgaaaaccatttgagcccaaaatacaagtgtacccttcccacttctggctcaagcacccgtgagccgactagacgtaatattaaaacttactgatgctgggcgcggtggctcatgcctataatcccagcactttgggaggccaaggcaggcagatcacctgaggtcaggagttggagaccagactggccaacatgacgaaatgctctcgctactaaaaatagaaaaattagccaggcgtggtggcacacccctgtaatcctagctactcgggaggctgagacaggaaaattgcatgaacctgggaggcagaggttgcagtgagcagagattacaccactgcaacgagactcgggcccagacgagatctgcctgggcgacacagtgagactctgtctcaaaataaataaataagtaaatagaacctcctgagctaccctggcttataaggattcagattactttaggaaattaggcattagcactaggaggggggaagatggctggcaaaacttctagctagcaacctatgtctagcacatgggtaactaaccatagcgagatcctgaacacatatcctctaggtgcaggtggagggaacgatgtccaatacctgaagcagaatctcacatggacggaacgtctgtatttccctctcctgcacgaatcactcatcattcttggagggcttctctgcattcctccttttcttctctcccctcccctgccttttgtcttttctaaagagtctgaactccgatttccatgctctcctgctacattaataagcaaaacctgcttgtgtgtacggttctttactggaaacatgactttttgtttctgtattggttttactgtcatccagttttctagtttaatatctagcaaaactaaatctgaatgtactcgctttttccgttaagtatgccaagcacctcggttgaaaggcttgactcaaaccagaagtcttgctggaattcgtctctgaacacttgaaaaacagaaaccctgagccgcaacaaacatgcctctgtgtgtcgggattgcctttgtctctgcttccatgtggcttttccttttgtagctatgcttagtgacataatcttccctcttctagccttctcctttcaagcctgtctgttaattaaccatgtcagtattggcaagcatttatcttcccccaccctaacatgcaatcttctaagaattttgcaaaattctaaacaaatatagagatggtatatagaattcatatctagaaaactttgattttaatgtgagcttatcaaatttgttctggcttttttggcactaaggcaaaaacatgttaaccagaaataatttattcttcatgtatgtaaaatatttgagaatgtttagccttttattagaattttatttggaaaatatttatctttctacacattttacacttatgttcctttgcttataacccaatttcttaacttttttgttacttaagcaaatatcaattatgttttattatctaataaagtgtaagattcttactatctaaaatatttaattctgtgtgactaatatacttttctgatcattcaaattgaatatgaaaagctagaataactgtattgcaactgttaattccagccaattgtataatgataacactggtgaatttctaagtaaatctaatacttgaaaatttgggtatacatagaaaataaattttaatataatgtacaaagtaa

SEQ ID NO: 7073 - DNA, 403 bp, Homo sapiens
agaccctgtatctaaagtgaatgaatgaatggtagcctggaaatttcagttacatctcattttctccaaccagaaatcttgtaccaaagttagaatcaaataactagacttgagggggaactgcaaaatttccagaaggcaactagcagatgaggtaggcaaaggcggtaaatgatttgcaaactcaaccttcaagttcaaaaatggtgggcaatgtgttagattttagtcatccttccacatctcccctaggtccccatttcacatcagtggtaggggaacaaactaaaaaccttttctttgccttgagttttttatttctttttcttttcctttttttttttttttttttgagatggagttttgctcttgtcgcccaggctggagtgcagtgttgtgatct

SEQ ID NO: 7074 - DNA, 19349 bp, Homo sapiens
tcctcctgcctcagcctcccaagtagctgggagtagctgggaatacaggcacacaccaccacactcggctaatttttttttttttttttgagaggaggtcttgcagtgttgcccaggttggtctcgaatacctggcctcaagtgatcttcccaccttggcctctcaaagtattggaattacaaccatgaactagttcacctgacccaattaaaaaaaaaaagattttagcagttcataaaatccaaaagccaactgtaccatatactataccacctccctcagatgagtaccttgaaacaagaagtttacagaatggattggatctgtggctaaatgcacaaaaacttatagaaaaggtaatgtaaaaattgttagaacatagctctctaaagataggcttttgcaaagacattacaagaaaagaatgctattgaccgatatctcttatgattaaagatgagaaaatccttaacaaaatactagcaagccaaatccagcaacttataaaaagtacaatgtacttaaagtataatgtactttaaagtataatgttcctaaataaatggaaagacatccatgttcattgatctgaatacttaatattaaggtggcagtacttttcaaactgatctacaaatgtaacacatccctatcaaaatcccaagtggttttcttgtagaaattgacacacagatcctaaaattcatagggaaatacaagaaaacaagaatagctaaacaatcttggcaaacaacagagtttataacccacaccttgggaggctgaggtcgagtctgtagtgagctatgcttgcaccactgcattccatcctgggcaatagagcgagaccctgtcttaaaaaaacgtcaagagcaacaacaaaaaaaacactttctgatgtcaaacttaaaacaaacttaaaagtaatcaagaaagtgtggcactggcgtaaggacaaacacatagatcaatgcattagaatggagagcccagacacaaggcctcatgcttacagcccactgattttcaacaagagtgacaagacatttcagtggagggaatggtgctgggacaactagatatctacatggagaagaatgaagctgaacccactaccacacaccatttaaaacactaatccaaaatgaggaaaagacctcaatgtaagagctaaaactataaaactcttagaagacatgggtgtaaattttcatgtacttggattacctagtggtttcttaggtatgttatcaaaagcacaagcaacaaaagaaaaaagcacaggcaacaaaagaaaaaacagatcaattggacttcatcaaaagtaaacttctgtgcttcaaaagacagtatcgaaaagtgaaaagacaaccgacagaatgggagaaaatattttcaaatcataatcagataaggagcttgtatctagaatatatgaagaactcttacagctcagtaatagaaagacaaccctattaaaaatgggcaaaggactttgccttagtctgttttgtgctgctataaggagataccacagactggtactttataaagaaaagagacacatttcttgcaattctggaggctaggaagttcaagattgaggggaccacatctggtcaggcccttcgtgctgcttcataacatggcagaaggcagaacagcacacgtgtcggggaaggggtggcaaactcattcttttatcagaaacctacccccaggatagcagcattaatccattcatgaacagagccctcctgatagcctagtcatcatcccttaaaggacccacctctcaacactgttgctttggggattaagttttcaacacataaactttgggaaacacgttcaaaccatagctgacttgaatacacatttctccaaagaagatatccaaatggccaacaagcccataaaaaatgctcagcatcattagtcatcagggaaatgctgattaaaaccacagtgagataccactttacgcccaataggatgactataattttttaaaaacccagataatagcaagggttggtgaggatgtggagaaattgagaccctcgtgcgctgctagaaggagtgtaaaatggtatagctgctttggaaaacagtctggcagttgctaaaacaaacatggagttatcatatgatccagcaattctactcctaagtatattctgaagatcattgaaaacaacgtccatgtaattcgtaatcgctaagaagtagaaacagctcaagcatccttcaactagtaaatggatacacaaaatttactgtagctatacaatggaggagtattcagcaatacaaagaaataaaagtactgacgtgctacaacacggatgacccttgaaaacatgctaagtgaaagaagccagtcacaaaagactatatatattatatgattccatttctatgaaatcttcagagtaggtaaacaaaagagacagcaaatagaccagtgcttgtcctgggtatggttgggggcagttgagaagggctgggggaattggaaggtgacagctaaggggtacaatttgtcttgacagtgatgaaagtattctaaatttgattgtgggatggtagcacaactctatgccaaaacctattgaactgtatgcttgaaattgggtgaattgtatatctcaacgaagctgttataaagtaccacgaaggctttggggtatgccttattttctctgggtgctgagttgcttttgttttgcatgaagtctgttttgagcttactgtcctttccaccctagagctaagcttgtctgctggatccctgcagctggagcgcaaaaggagagatttcacctcttctgggagcaggaaactctacttcgacactcatgccttagtgtgcttactggaagacaatggtaatcctctgtcattcgtcatttagtgccttagaaaaacactttaaattatgacttctcttatggtttcatttaatttctcatgttcctctttgacttctattttttatttgtgtttaattaattaatttatttagagacaggctctggctctgtcacccaggctggattgcagtggcgcagtcttggttcactgtaacctgcctcccaggctcaagccatcctcccacctcagcctcccgagtagctgggactacaggcacacaccaccatgtctggctgatttttgtatctctttgacttttaggcctatgggcaatcttttaattaatctccatttttttaagtcctcattttttgctggaggacatttttgcttcatcaatagaatggagacttttctcacacattgtctctttgtccaagtgaagtgtatttctgtaacatcaccatggaagtacagtgttataggtaaaaatttagacacaagtcagcaaagctgaggaatgattcctatgacaacagtgtctgaagcacagaagtgatagttttattactgtgcatcttgtgtgctttttaaaatcctgtgaaattgaaatgttgctgagtagcagttcttgataatttcaacttactgttcttttttcttttttctttttctttctttttttttgagatggagtctcgccctgtcacccaggctggagtgcaatggcgcgatctcggctcactgcaacctccacctcgggttcaagcgattctcctgcctcagcctcctgagtagctgagattataggcacgagcctccacgcccagctaatttttgtgtttttcatagagatggggtttcaccatgttggccaggctggtctcgaactcctgaccttgtgatctgcccgcctcagcctcctaaagtgctgggattacaggagtgagccaccgcgcccagccctcttttttctttttaatactcaggctaacattcttcgttattgctgttaagataaaagattgttctggtatatatggcattcattgaaaatgcactttagacttagaatgtagggaacattctcatactaaatcatatttagacaaatacaccgattataattctctatatggtgacacattctcaaaaatcagaatttcaaaatagtgtaaattatgcttgtgaaataaatttgcctgtgcttttacttcattgtgtagttatttgtccagttgtacatgtttgtgtcagaaaagctactctctgtagaggtactttacatgcctaagacaaagtgacggaatgaattattctgtgctttgtgggagacagcagctctgggctcgagcctaaccctgcagacttctagttgcctagcttaggaagcttttttccccttctcagtttccatttatttgcccatctatagtatgagtgtaatacgaattccaaagacctttttgaatattaaacaagataatacgcatgaatgaactttggaaaaactgtcatatgctgtgtaataattttcacaacttttcctgtcaaacagtaggcttttttcgccaaaacttctttcagtacagaatttaaaagagaaaagtagaagcgagaagggagcatgtaaagttatgctgataaggccaggcgaggtggctcatgcctgtaatcccagcacttcaggaggctgaggtgggaggatggcttgaacccaggagttcaagaccagtctgtgcaacatagtgagagcctgactctaccaaaaaaaaaaaaaaattgataagcagaagtcttcctagttttcttgattttaaaccttaacccatggttatttgcatctttcaagactgtggtgtgagggccacactgcagtacgtggtatggaggggctgttcaatccaacatggatgagttgggggtgtctgagatgactggctgagtaggaggccaggaaggacttttcaaggcatattctaccctttctttatccagacctgtgtcttcaggttaacaaaatttctcatatgcctgtcatctcaccctggttctgtcctattccctcgtgtctacaaaaaattaatttctgcctcataactcagtaggttttcagacttccacttttttttttttttttttttttttggagacagagtctggctctgtcttccaggctggagtacagtggcacaatctcggctcactgcaagctccacctcccgggttcatgccattctcctgcctcaggcttccgagtacctaagactacaagtagctgggactacaggcgcctgccacaacgcctggctaattttttgtatttttagtagagacggggtttcactgtgttagccaggatggtctcgatctcctgacctcgtgatccgcccgcctcggcctcccaaagtgctgggattacaggcgtgagccaccgcgcccggccaagacttctactttttcatatccctttctcctcccacaagtggttataaagtatatggctttagagtttgttttacaatcaacataagttctctttctacctttatttttcttttcctcatcattgccaaacctaatttttttcttttttttttttttttttttttttttgagacagaatctcactctttcatccaggctggagtgcagtggcacagtcttggcctactgcaacccccacctcccggtttcaagcgatcctcccacctcatcctcctgagtagctgggattacaggcatgcaccaccacacctggataatttttctgtatttttactagagacggggtttcaccatgttggccaggctggtctcaaactgctgacctcaagtgatccacccaccttggcctcctaaagtgctgggattacaggcgtgaaccactgtgtccagttgccaaacctaattatgtttaaacatgaactctttttttaattaaaattttttaaaattttatttacattaaaatggagatgggatcactatgttgcccatgctggttctgaactcctgggctcaaagatcctcccgccttggtctcccagagtgttaggattacaggcgtgagccaccacacccagccagtgaactcttcttaataaaactttaaaatttggcaaaagtttagtttgagtttttaaaaactaggaagacagacgagaaaaaagaaaacagagtcagagctaaacaatgttaacattttggtgagtaaccttttgtattttttttctagacatgtgtataacatgttgaaaaattaaagaattttgacgaaagtgatgggaataggtctttggaggtttttttccttctcctttaaatctgtgtctttggtttttttgttcattatagtcccatgcttcatctcagccacacaaattccattaattaagtactactttattccaagaaatacacaattaattacaggaatcaatagattcttctgaaattcttatagctggaagcatttaatagaactatttcccaggcactcagttttaagcatttaattagaatttatgttaaataggagttactatccaatgtttttaaaaacaataccaagtactggccaggcgtggtggcttgcgcctgtaatcccagcacgttgggaggccaaggcgggcagatcacctgaggtcgggagttcgagaacagcctgaccaacacggagaaacttcatctctactgaaaatacaaaattagctgggcatggtggcgcatgcctgtaattccagctactccggagtctgaggcaggagaatggcttgaacccgggaggtggaggttgctgtgagctgagatcgcgccattgcactccagcctgggcaacaagagcgaaactctgtctcaaaaaaaaaaaaataccaagtactgcattgaatctctatcattcaattcagtatcatttattgactaccaaagaacatattttttctactttgggtcccccagactagttactgaagagaattgtggaggaaaaatgaaagaactgattttgtcttttaacatgaagttagccaacagctagattactatttatatagtcaatgatttgactgccttatgctggacataaaacaactgagctttcctatttaaggaaattattttttaataatgtacacattataaaattaaagaaatattgtccaccgtagaaaatctacataatgcagagaaacataaagaagaaaataaaaatgactatgaatttttgttaaattataaaaacaagaattgcatctgtaattttgagtcttgccttttttcacttgatgttgacttgccggcattgtctatgtcattaaatagtctctgaaaacatgacttttgatagctaggaacgacttacagatcagtcagcaaagccaccggtacctggggaagccaacttgtatgtttcgtgcttgctctgagtgaccggcacgtcatagtttgtggctgtaccctcctccctgcctcctaccacactgtgctgtactcttcctcctggatttggacattcacatgaatgtgtgcatttgctgtgggcttttgtaactctgagcatgattttttttgcttgtgtgcttgcttagggtttgctactcaacaagcagaaatcattgtgtctgcattggtcaagatcctggaggccaacatggacatcgtctacaaagatatggtcaccaagatgcagcaggttagccttgttgggtggtttagcaaattaggactgtgaagatggggtattatttgtagtaatgttttaatataattttttggataataccccgttgaaaagtatatagtaacttttaccatgattaagaggcaaaagattacagtggcataaaaaatacttactcagaactatttagtcaacagttgtagaatcgttatgcttgaaagctcactgttcaaaattattccagtgaaatatactttaataaatggagacgtggcctgaattgtagtattatagcatcatgttctcgagtcttcacatcaccacccttttagctgtgattcacttggtaacaataaccagatatgtggtttttgtttttttgtgttttgggggggtctttttgagacagggtatcactcatttgcccaggctggagtgcagtggtgcagtctcagctcactgcagcctcgttgacctcctgggttcaagtgatcctcccacatcagcctcccaagtagctgggactacagccgtgcactgctacagctggctaatttttgtacttttggtagagatggggtttcaccatgttgcttaagctggtctcgaactccttggctcaagtgatccacctgccttggcctccccaggtattgggattacaggtgtgagccaccttgcctggccagatatgtgttgtttttttcttttccttttccccttttggaataaaggatgaccctactgaacctctttttgtgtccacattgtcctggtttctcaataagaagatagcacattgagatgataggaagtggactttttagggtagactagattatgtgttttgtttttcttttcctaggaaatcacttttcagcaagtaatgtctcagattgcgaatgtgaaaaaggatatgattattttggagaagagtgaattttcagccctcagagcagaaaatgaggtaaaacagagcctctcacacttagaaagttgattatattaagacattgagataaattatatacacataaaagagcacacgttaagtgtacatctcagtgaattttcaaacagtgtgcacttccagtcagatcgagcaggaaaacttgcccactgtcccagaagtctctctcatgcctctcagttgctcctgccccagaggaaacgctgtcctggctgataacaccattaactagtttcgcctattctagaaccatttgatggtatcatactgtgtgtcttgtagcaagagatcatttttttcattgtctatagtcttaacatcaataggccccatcattttattgtaatgtgtattagaattgtttccagtttttggttattttgaataattgctactgcgaaatatctcttgtgtttctttaaacagagcatatgggatcagcatttaaataagtgctgtctatgcattttccttttattttcggtcctatttaaagtcccataatagggaaggccatttattgcctgttgaccctagccttgtaagaaaccttctagcaaaaagtaaagtggtaaagtttcagactctctaggttgttcttgaaatcagttatttgagggtaggattagttaaaagataaaccgaaggagatactaaataaagcagggtcactgaaggcaaatgtgtatgccaaacacaactgagttaactttacatagccttcaagatgaattcaaactgatttcaagatacgtgtgttgtaatgccattctgcaatcaatacggtgttctgaatgaaggaaaaacctgaggaacttgtgcataaatatgtattgtaatatttgttggttactacgttttatgttgttctttctaatgactttttttttatgtgtttttagaaaataaaactcgaactacatcagttaaaacaacaagtaatggtaagattcactttcctgtttgttggctggtttgtaattatataaacttattaataagtataatattagaaatggatgtttttaaaaacttaattctttgtgaaatgtttgtgtaatatgcctcaaaagtacacattggaagatttagctaagaacacagccaatgaatgaattactgttgtctgtaaccatattcattaagaaaattgtggccaggcatggtggctcatgcctgtaatcccagcactttgggaggccgaggtgggtggatcacctgaggtcaggagttcagaccagcttggccaacatagtgaaaccctgtctctactaaaaatacaaaaattaagtgggcatggtggcaggtgcctgtaatcccagctacttgggagactgaggcaggagaatcacttgaacccaggaagcagaggttgcagtgagccgagattgcgccattgcactccagccgtggtaacaagaacgaaactgtctcaaaaaaaaaaaaaaaaaaaaaaagaaaattgtgttctaggaggaattaagtcatttttaagtaaaagtttttctaaagtgctgcacggaaggaacccttaaattctcttagactgtctttagagaatcacacgtgatttttaaatgcttactgtgccagctatttaatgttttttaaatagaaaaaacatagatgttaaagaaaaaaaggctttgatatgtatcagagaaaaggctctatgtaaactggattttaatattttgctgctttgagtccatctttgctttccaaagttgtttaagatcagctttattcataagttccattcggagattgtatgaggagtcttgaggttaaaagcagcaacaggccgggcgcgatggctcacgccagtactcccagcactttgggaggctgaggtgggtagatcacaaggtcaggagttcaacaccagcctgaccaacatggtgaaaccccatctctactaaacatacaaaaattagccagacgtggtggcatgcacctataatcccagctactcaggaggctggtacaggagaattgcttgaacgcaggaggcagaagttgcgtgagcagagatcaccccattgcactccagcctggttgacagagtgagactccatctcaaaaaaaaaaaaaaaatggcagcaacaacccactctagactggcataagcatagaagggggttatttgtgtctaactgggaagtcctgggacaggctgcctccagatgtggcttggccagagttccctgatgccaggaggcctaggtccatttctctggaagcccctggctctctccctccctgggttgcctcgcctaggatagggacagtgggggcagtggtcccagtgtcacgtcctcatagagtttgggtttcttactttggatttttccttctttgttgtttgccctccttttaggatgaagtgatcaaagtccgaacagataccaaattagacttcaacctagaaaagagcagagtaaaagaattggtacgttcctttactaaaaacacattatgaattaatttatttttggaatggaatgcttggttaagcctaagtttatgtacatgtcataggtactgttaaatatttatctgtttatcagtgttaggctgtattttctctattataataattttggattaagacttaaatttgttgctttcaaaagtaacattaaaattaaactcctagtcaaattagtcagtttgaatatttgtttcagaaatattagagatatgttacatagagattcataaagaaattaaatgcaatcttgatctatttaatactgacttaaatcttcataggtcttgatcttgtaaaagttaagttgattatttcaggcttgaataatagtaaattattaacattaaataatattaaattatatactggaattcaagattaaaacatttctggccgggcgcggtagctcacgcctgtaatcccactactttgggaggccaagatgggcagatcacctaaggtcaggagttcgaggcagcgtgcctgcccaacatggtgaaaccctgtctgtactaaaaatacaaaaaataagccgggcatggtggcgggcacctgtaatcccagctactcgggaggctgaggcaggagaatcgcttgaacccaggaggcagaggttgcagtgagctgagattgtgccactgctctctagcctgggtgacaagagcaaaactccatctcaaaaaaaaaaagaaaatttctatgttgtcttttaagtgcagtgagaagttgtgagggtattttgttttgttttctatttttgttttttttgagacagagtctcagtgtgttgccgaggccggagtgcagtggcaccgtgtctgcccactgcaacctccgtctcctgggtttaagcaattctcctgcctcagcctcccgagtagctgggattacagacgccaccaccacacctggctagtttttatatttttagtagagacagggtttcaccatgttggccaggctggtctcaaactcctaacctcaagtgatctgcccaccttgtcctcctaaagtgctgggatcactggagtgagccactgcgcctggccggcaagtgtgttttttttttctttgtttttgtttgaggcggagtctcgctctgtcacccaggctggagtgcagtggtgtgatctcagctcactgcaagcttcgcctcccgggttcacgtcattctcctgcctcagcctccagagtagctgggactacaggcccctgccaccacgcccagctaattttttgtatttttagtagagacggggtttcaccgtgttagccaggatggtgtcgatctcctgacctcgtgatccgcccacctcggccttccaaagtgctgggattactggagtgagccaccgcgcccggcctaagtgtgttttaataaagatatgtgtcgggttgcctctagtgatttttaaccctgtctgaatattcagccgtcttcttgctcagactttatttgaatttggtaacatcaggtgccttttttattcttagcataatgagaaatagggcagagagagcatcttgcactaacacaaaactgaatacacatgcagaaactgagtactcacaactgtttgttgttttctcatttttgacaatttgcttttagataaaatgtgctataatgataagtgaagctaatactgaaactcaaaaaagtaacctacttgtgttttggaactgccactggatttcaagagttaatccaagcttcgttatacaaaataattattaaggctgtgttacctgtctttctagtcttacaacaacagtctccacccataaagattaaatcacctagtgttactaaatagttactgactatagcatgtcactggtgtctggaagaggagaaactcttttggttacctttatctttatgggttgtatactcaggaagaactgaattcacttgatataggaaaatgactgtgtgtagctaaccaacctgggaaaaactacatcaaggacatcaggaaatacagggcatgaatgtagattaaagccagtgaatttttttaaaattttatatggagtcattttaataacataactaggctgatatatatgtacatttttcaatcatgtaacatttagattttactcattttaagtcattaacatcatccagcaaacaaaaattttccagaaatttttttcacaattacagttttagtctttaaaccaaaatgaaaaaatttctgccgggcatggtggctcacacctgtaatcccagcactttgggaggtcaaggtgggtggatcacctgaggtcaggagttcgaggccagcctggccaacgtggtgaaaccctgtctctaccaaaaatacaaaaattagcccagcgtgatggcccacctgtagtctcagctactcgggagactgaggcagaagaatcatttgaacccaggaggcagagattgcagtgagccgagatcacgccactgcactccagcctgggtgacagagtgagaccctgtctcaaaaaaaaaaaaaagaaaagaaaaaaaatgatgaaatttcattcttgcaaatactcatatttttaaattattggatatatagagtggattcattcagtgttcttataagaaaagtaaagcttataatattttgcagacttgataatgcagcactcaaaatacttaccctgattttattttacttgaatttactagttaaatatgctgataaatatgatttacatgtaattactttatctggaatgactatattgaccttaatctccagaaagcaaccaatgcacagagtttcaattaaatcctgtccatcatgatagtaactttttctacatgacacaaaagtgtctgtggtatatttgaacagtaactgtgactatgaattgttcttatagtctttttttagtgtttcattattttaatttcagtgggttttgggggaacaggtggtgtttggttacatgaagacgttatttagaggtgatttctgagatttttggtgcccccatcaccctagcagcgtacactgtacccaatgtgtagtcttgcccctcacccacctcctaccctttcccccaagtcctcaaagtccactgtatcatccttttgcctttgcatcatagcttagctcccatcaagccagtgaatttatgtcatttagtaacctagcggggaggttgttcttggtaatcataaacttggattactctgaagcacaaggcagtagtaaattatacagcgagtgtgtttgtaacatgcattggtgaagatgagttttctggctctcgttctttcggtaaagttataatgttaaatattaaattgcaaattaactatgatatttacagccagttccaaaagcagtatggcatataaacttctggggcatggggatatagagctacatagatgttatttttaaaaccatgacagcgtcaatatttaggctcttcttttgtgggtgagtcaatgttgagttaatgaagactgaggtttagtggtgcacaaaatcttgttccacgccgccctctagtggtgatctgatgcatcgggctctcctggtctgaaaccctgaggtttaaagagcattgttcttggttttacaacctactccttggcttagggttttggggttttttgtttttgtttttgtttctctttctcttttttttcttttttttttttctacttctaagctcccagtagtcccaggagaatattttatagctaggaagtttctatatacttcaaaggattaactttttctttctataacaaggttaatgtagttcttaaaagtcgtcattcaaattactgattgtcatatgctcaattaaatcttgttgcccactactaaggagataagtctgatttcaatcttactgtctacaaaactgcactaaatcttttcactgacattaatagccaaaaggcgagatactttaactctgggtagaattagttcctttagtaacgctggattatggctacgcccaagtgggtttttttattgttattaaaaccaacatgtgcaggaggctaaggcaggagaattgcttgaacctgggaggcagaggttgcagggaccccagatcaagccactgcactccagcctgggaatagagtgagactccatctcaaaacaaaaaaccaagccaaaaaaaaaaaaacccaacatgtgatgagttagtgtatttatgtatttacattgtattttataatcacaacacaatgtctttgtcatagaataataatccttggcagctatttgttccccaacttcataccttttctgtcttttgttgagactcaagtagtgacgtgttttgctactagttatgatgggatagctcctaaattgagttgagtctccattttcaaccctctcaaaaccaaaaaccatatgactcagcatccttcgaaattggtccccagggagtgctactacaatagtgggagggacctaaagacatcacaggaaatatgcagggagaagtgacagatgactaaggaaatccagatattagaggaatgagtaagtataaataagaaactttagccagcacggcaggtcatgcttgtaatcccagcaccttgggaggccgaggtgggcagattgctcgagctcagaagtttgagaccagcctgggcaacatggcaaagccccatctctatggaaaaaaaaaaaaaagaaacctcaagtaacacatataaagaagcaggtaggctacttaatcccagaggtgactttctggtgttacgtattctaggaggtactgagaccagaatatttaaggcaccagagaaggagaagagagaggagtagatcagaatctgacccatgttacgtgtttatttcagtattcattgaacgaaaagaagctgctggaattgagaacagaaatagtggcattggtaagaaacaagactgtgatttttctttgtctttgtactcatctttgcttcgttccatgcatggttgtttgtaatgataataggaagttacatgcaggtttactgtcatgggaattttttacattgtgctaaaatacacacaacataaaaattaggatcttaaccattttttaagtgtacagttcagtacatttaaagtacattcacattttggggcaaccatcgccactggctatcacagaactctttattttgcaaaattgaaactctgcaccctttatacattcccttttccagcctctggtgacctccattctactgtctatggatttgactattctacatacctcatataaatagaatcatagcatttgtctttttgtggctggcttatttcacttaacacagtgtcctgaaggttcatccatgttgttgaaatgacaggactttcttcctttttaaggctgattagtattccattatatgtatatgccacattttctttattcgtctgtcaagggcacttgtgttgcttccacccgttggcctttgtgaatagtgctgctgtgggcatgggtgcacagatgtctgttgggatccctgctttcagttcttttgggtatatatgcagaagtggagtgtcacaggattttttgcacttcacaaagtgtttggttatcgtaatggaagatagttatcctatgaaagatttaaactttcttaatgaaagtttccttttcttctttctttttttttttttttttttttgaggtggggtctcgctctgtcacccaggctggagtgcagtggctcaatctcagctcactgcaccctccttcacctcagcctgtagagtagctgggaccacaggctcacaccaccatgccctacttgagagtttgtttttcttaacggaagttttattaagaaagtttaaatctcagtaattgaagaatagtgaggaatggagaagtcttattctatttttaatttatagcatacatttctccttttccatactgtatggaacctgggacctctgaaacccccaagaggctttcatgagagaattccagaatcctgggatatttctctggaatacttttttacgcatccaggcatttatttctttttttctctgcctgaattggtagccatagggaaagatttagttgctgtaggagttttagtgaaggattcccatggtttttatgctttaatgcagttctacaaccccctatagcgtcggccaaacccactgcctttttgagggttgattatgtgtccagtttaactgtattgtatttggggaaggacacaaattggccgtgggtagccaagcctcatagtaatgaaacacttgatatttgaacatgaaagaagaaagttttttaaaaatatgactagaaatagctcaagacaagcactgccgctttcacattatctaagactccatttcttgaaaacatttttgagtttactgtctatctttgactaaggaggatttagaaggatgagacgtagccgttgcctttgagaacagactggcctcataataccacatcatttgtatagcaacctagagcttacaaatgctttttcacatagattatcgcatttgattctctaaacagtccaggtaaaggcagggccactggcttggttgtttcgttttgttctgttttcattttttcaaatagaagaaaactaaggcctagagaggttaagggtcctgaccaatgcagcgtagaattagggttttagaactgagactaaagcccaggcctccatagtcttacccaggtttccctgtgactgcaccccgttgggaaggagctataggatggtgagcagaggggacgtgctgtggtctaacgctgtgactctcttcattttaaaagcatgcccagcaagatcgggcccttacccagacagacaggaagatcgaaactgaggttgctggcctcaaaaccatgcttgagtcacacaagcttgataatattaaatatttagcaggtaagctattttgtatctatttaaatcaacctgaaaagaaaataaatttataaaataagtcgttgacagatactgcatttcattgattccaacactttctgaaatattttaacatctctgaaattggaaagcatcttacaatttccagtagatgaagtatcatagtttaattggcactttttctttcttagtagtaaataaagtaattgtgtacgttataattgatagaattggaaatttgataagatactataattgaactatagttattagggattttaatgagattcaagacaggaaatattttatggataaaatggaaggtgtttcagttgtaatctttctgcttcaattgcttaaactccttttaaggagttattttactttcgcgatttttgatccaaaagagagaatgaacattcatgtaccaccccccacccaaattaaccattatttcaagtcagatttaacgtcttggattaattaaatattttaaggttacagcattatttaacagtgaaatgttgttctttatattaaattgtgtcttcctgtctctatagtgcatatacatagaccttgtgaccacagaatttttgctattcgaaacttttattgaaaagttttcttagcctaggcaacacagcgagacctagtctctacaaaaagatttagccgggcatggtgtcatctgcctgtagcttcagcttcttgggaggctgaggcaggagggtcacttgagcccgggagtttgaggcacagtgagctgtaatcataccattgcatggtgcactcctcctgggtaccagatgagaccatgtctctaaaataagaaaataaaataaagggtgtgggatttgttttttcagtaggcaggcgtttcacggaatatgggacatcagtgagcaatctaagtttctaggttttcttttttaggttttcttaaaaaaagatgttccctcaagtaactcttaatagaactaatagtactctcaattgtttttttcttacagggtctatatttacgtgcctaacagtagctctgggattttatcgcctgtggatctaataaagtgtctatttaaagtgatttctactgttttgccttaagaataccagattgttggctgggtgcggtggctcacacctgtaattccagcactttgggaggctgaggcaggtggattacctgaggtcaggagttcgagaccagcctggccaacacggtgaaaccccgtctctactaaaaaattaaaacattaggcgggcgtggtggcgggcgcctgtagtcccagctactcgggaggctaaggtgtgaacctgggaggcggagcttgtagtgagccgagatcacgtcactgcactccagcctgggcaacagagcgagactccgtctcaaaaaaaaaaaaa

SEQ ID NO: 7075 - DNA, 3603 bp, Homo sapiens
ccagaggtgactttctggtgttacgtattctaggaggtactgagaccagaatatttaaggcaccagagaaggagaagagagaggagtagatcagaatctgacccatgttacgtgtttatttcagtattcattgaacgaaaagaagctgctggaattgagaacagaaatagtggcattggtaagaaacaagactgtgatttttctttgtctttgtactcatctttgcttcgttccatgcatggttgtttgtaatgataataggaagttacatgcaggtttactgtcatgggaattttttacattgtgctaaaatacacacaacataaaaattaggatcttaaccattttttaagtgtacagttcagtacatttaaagtacattcacattttggggcaaccatcgccactggctatcacagaactctttattttgcaaaattgaaactctgcaccctttatacattcccttttccagcctctggtgacctccattctactgtctatggatttgactattctacatacctcatataaatagaatcatagcatttgtctttttgtggctggcttatttcacttaacacagtgtcctgaaggttcatccatgttgttgaaatgacaggactttcttcctttttaaggctgattagtattccattatatgtatatgccacattttctttattcgtctgtcaagggcacttgtgttgcttccacccgttggcctttgtgaatagtgctgctgtgggcatgggtgcacagatgtctgttgggatccctgctttcagttcttttgggtatatatgcagaagtggagtgtcacaggattttttgcacttcacaaagtgtttggttatcgtaatggaagatagttatcctatgaaagatttaaactttcttaatgaaagtttccttttcttctttctttttttttttttttttttttgaggtggggtctcgctctgtcacccaggctggagtgcagtggctcaatctcagctcactgcaccctccttcacctcagcctgtagagtagctgggaccacaggctcacaccaccatgccctacttgagagtttgtttttcttaacggaagttttattaagaaagtttaaatctcagtaattgaagaatagtgaggaatggagaagtcttattctatttttaatttatagcatacatttctccttttccatactgtatggaacctgggacctctgaaacccccaagaggctttcatgagagaattccagaatcctgggatatttctctggaatacttttttacgcatccaggcatttatttctttttttctctgcctgaattggtagccatagggaaagatttagttgctgtaggagttttagtgaaggattcccatggtttttatgctttaatgcagttctacaaccccctatagcgtcggccaaacccactgcctttttgagggttgattatgtgtccagtttaactgtattgtatttggggaaggacacaaattggccgtgggtagccaagcctcatagtaatgaaacacttgatatttgaacatgaaagaagaaagttttttaaaaatatgactagaaatagctcaagacaagcactgccgctttcacattatctaagactccatttcttgaaaacatttttgagtttactgtctatctttgactaaggaggatttagaaggatgagacgtagccgttgcctttgagaacagactggcctcataataccacatcatttgtatagcaacctagagcttacaaatgctttttcacatagattatcgcatttgattctctaaacagtccaggtaaaggcagggcactggcttggttgtttcgttttgttctgttttcattttttcaaatagaagaaaactaaggcctagagaggttaagggtcctgaccaatgcagcgtagaattagggttttagaactgagactaaagcccaggcctccatagtcttacccaggtttccctgtgactgcaccccgttgggaaggagctataggatggtgagcagaggggacgtgctgtggtctaacgctgtgactctcttcattttaaaagcatgcccagcaagatcgggcccttacccagacagacaggaagatcgaaactgaggttgctggcctcaaaaccatgcttgagtcacacaagcttgataatattaaatatttagcaggtaagctattttgtatctatttaaatcaacctgaaaagaaaataaatttataaaataagtcgttgacagatactgcatttcattgattccaacactttctgaaatattttaacatctctgaaattggaaagcatcttacaatttccagtagatgaagtatcatagtttaattggcactttttctttcttagtagtaaataaagtaattgtgtacgttataattgatagaattggaaatttgataagatactataattgaactatagttattagggattttaatgagattcaagacaggaaatattttatggataaaatggaaggtgtttcagttgtaatctttctgcttcaattgcttaaactccttttaaggagttattttactttcgcgatttttgatccaaaagagagaatgaacattcatgtaccaccccccacccaaattaaccattatttcaagtcagatttaacgtcttggattaattaaatattttaaggttacagcattatttaacagtgaaatgttgttctttatattaaattgtgtcttcctgtctctatagtgcatatacatagaccttgtgaccacagaatttttgctattcgaaacttttattgaaaagttttcttagcctaggcaacacagcgagacctagtctctacaaaaagatttagccgggcatggtgtcatctgcctgtagcttcagcttcttgggaggctgaggcaggagggtcacttgagcccgggagtttgaggcacagtgagctgtaatcataccattgcatggtgcactcctcctgggtaccagatgagaccatgtctctaaaataagaaaataaaataaagggtgtgggatttgttttttcagtaggcaggcgtttcacggaatatgggacatcagtgagcaatctaagtttctaggttttcttttttaggttttcttaaaaaaagatgttccctcaagtaactcttaatagaactaatagtactctcaattgtttttttcttacagggtctatatttacgtgcctaacagtagctctgggattttatcgcctgtggatctaataaagtgtctatttaaagtgatttctactgttttgccttaagaataccagattgttggctgggtgcggtggctcacacctgtaattccagcactttgggaggctgaggcaggtggattacctgaggtcaggagttcgagaccagcctggccaacacggtgaaaccccgtctctactaaaaaattaaaacattaggcgggcgtggtggcgggcgcctgtagtcccagctactcgggaggctaaggtgtgaacctgggaggcggagcttgtagtgagccgagatcacgtcactgcactccagcctgggcaacagagcgagactccgtctcaaaaaaaaaaaaa

SEQ ID NO: 7076 - DNA, 403 bp, Homo sapiens; identical to SEQ ID NO: 7073

SEQ ID NO: 7077 - DNA, 1944 bp, Homo sapiens
ccctcaacgagcacgaggagggcgtagcgccaaccgacagccgcctgcggcccgaccagcggctgatggagaagggccgttgggacgaggccaataccgagaagcagcggctggaggagaagcagcgcctgtcgcggcgccggcggctggaggcctgcgggccgggcagcagctgcagctcggaggaaggtgaggccgggcgggaagggcgccccggaggggaggaaaggggtgcccgggtgggggtgccgcagggacggattccgggggagcaggccacaagcccacccaccagcccactgtgcctgcccagcagagaaggaggcggatgcctacacgccactgtggtttgagaagaggctggatccgctgaccggggagatggcctgtgtgtacaagggcggctactgggaggccaaggagaagcaagactggcatatgtgccccaacatcttctgagcgccacccttgcaacaaatacaggcgcctgcacagcctggcccacctgttcattaatgcactcaatttagtactgaatggtctttctcccagcccattcccagcccttcctatttcctttcctattttttttttctccccacactttcttgggactcccaccttggaaggaggaagggctgacctgggttctctccagcccccaggtgcgccgggtcacccgtgccccttcattatggacctgggccctaccggaacccctgccccagttaccacaactcaggccggctggcccgggccatgggctgcgcaaatcaccagcccccaacccagggaggaactggcccctcctagggagcctcttcgacttttttagaaaaatgatctccatttctttccagccatgatgtttagtaaatatttttagtaccgcacttagcagacagctttccaagtgtgctttcttgccacaaaagtgtcctggcaagagccccttatttttaagacatcaggaagccagaccgctttgagttgggagaattttgtagctcaacatatcaagtcctcgatggtatctgagctgcccacacccccacctgccaaggccccacagagcccaaaacagaagggggctgccccagcccagcagagcacagagtttctggagctcccatccacagatgcaggagggggtactgatggtaacccccatgtggatttgagggcagcagtccctggcctcaccctagccagcctgggtggctccctagccccaagaggccaggaagggctggaaggcagggcctgcaggtgctccccgccctgagacccaggccccaaatcagcaataatgaacaaacccttggcccagcctgggctggtgacctgggcaccagagaccttgcatccctcctcatcctaggaggcccctaggggtgccccatctcagtgtcccctgaactctttatttgcctaatttatatatatatatatgagatatataaatatatataaaatagctattttgcttaaatttctacagtatgtaaaagtgaaaaaatgatgaagacgggtgcacctgtctgagtttggccctcatgtgagctgtgcccttccctctcctcatgcccccttccagcggcttctgccaaccatggggggctggaccaccatggccactgacccagcccctcagaatcccacactccaatcctttccatttcagtttagtcctaaaagttcatcacagggtctttctttctactccaggactggttttgtttttatatatataaaaaaaaaaagtgaaaacaccaatgtgtgaaatgccttacaatgcccactggagaggcggggcggggtggggcaggatggccccactggggctcctacagagctgtggaatgtacctctccccaacactgttttgttagcgagcaccttttgaccagtaataaaaaaccttggctttggagttttccactg

SEQ ID NO: 7078 - DNA, 252 bp, Homo sapiens
atatatatatatatacacacattaggaaagatggactaactacaacccaagtagagaaagtatgaacaaggcctgctggacagttatacaaccttgcactcaacaactgttctcttcaatcacatggaacgtgtgcaaaaactgcccatatactgggccataaagcaaatttcaaaggactgaaattatgccaagtatattgtctgactccaaggcaattatactagaaaaaaatgactagaaaaatcccca

SEQ ID NO: 7079 - DNA, 277 bp, Homo sapiens
cacaaggtgaaagacctttatggacatgacagagaggacctgagttaagagggaaaatacatcttcatagctaggttcacattcagttatgttagtcccaaacctacaaattcaacatgatccctattaaaatcctaccaatatagttcaaaagcttgacaagttgattgtgacatttatatgagagaataattaaaaaaaaaaaaaatagggccaggtgcagtggctcacgcctgttatcccagcactttaggaggccaaggcggacagatcactt

SEQ ID NO: 7080 - DNA, 2552 bp, Homo sapiens
gaattagattccatttttgaagaagaaattcagtggggattacataaatgacaaaatgtatagtttgactaagggtctaagttttactgtcctcagatgaagagcataatgggatgcagaattttatttgaattaaaatgctggtgcattttatgagggaaaaacatcaataaaagagcattaggggtaccttggctctgtgattaggagacatacttctaaataagaacattatttatcaaggctggtaacataacaagaagaatgctggaatatggtttattgctcttggttattttggtcctttttccctcatttccttaaacttatcttcaatttcaaacaaacaggaaaccttgttagagggcaatgtaatatgccacagattgaagcgtatacgagtacttgttactttcgtcacttaatcatatataacgtatgtatgtttgtatttacacctttattacatataggttgttattgggctatcctgtctaataataagctattaagtagaccaatttaaacaagagtatatttcaggagtttattttgtgttagaaaaaaacatgatatcctgatgattctactttagttattcatcttcctcttctttttttttttttcttgagatggattccaaaacctgcctcaggaaggagccatgctgctagtgtctctaaagtggtttcttatcccctgcagcatctgccaaggttctgtttggctgaggatctatgaggcatctgaagctcctgtgttttgtctacaaaaatatataggtcagatcaaaatgtaaaatatgtatttttttaattggaaaaaaaaagagaggcttctgtaacatccgaaaggccatctgagccctatctctgagcttcggttttctcatctgggtgagggcagtggccctgcaaggtcccccacctcacaggacagctgtgaggaccgcacagaagttctttgaaagctggaaggcaccaggataacatggtgtgtgttcttggcagggagggtgtttctgcaaaagcatatttttaacatgcaatttatgaaaaaatttaatatgactgacagaaggacaattttatgaaagtaaatatccatacttctcaatagactattaaaactgtagcactgggttagaattttgtctcatttgattgtagggatgatgataccaaaatctatatgttgtaatattaactcaattctcaattatattctttggctgtcttgtgtggttcaagttcagctctctgcttccgtgtggaatgccaacattttataaaaatatacaactgtaacatttttaacacaaataaaaaatgaggtagtaatgttatggcattataacagtaaattgccttggctgattaaatattagccctactaaattgtaagtgcttataaaacacaattttttaagttaaaatatattctaatttaaatcgcaaccttggtgagtcaactctaggtcctgagaaactatgtttactatctgtaatttctgaaccttcattgcatcctaataattttgatttatatgttcatgtatatgtgaaattacagtgttaaagtgtgtgcttatgatagctgctcagagtaaaagtgataaaaacttattgaatattagtataaaaactcacagaatcctgtagagactacatagattcatagatttacctgtttaaattttaaagctaaatctaattatattaagcatcagaagaattagaaaatatatataaagcaaaaaatatttgttgaatctttaactttatttgtagtattttcttaccatcaagaaattacaatggtcacatacttagtaactgccacataaatactgtttgcttgtaaatacgtgaacttccccctctgaatttttagcatagaaatacaacataaactacatgggttggccacatactcctggaatctggaaatatgtgagaggaaaatttgataaattattttatgcaagcaaaacaaaagcgctggttgctccagaatactttagatgtcgcgaaaggagcaaagaatgttctgtcaatttgtaggaccataattttgcaatcttttataaggaaaaatgttgcaatgagatataatgtttgtgtgaataaagtagtgaatgtttgtttatatttcgacagcataagaagtatataataacctaacgcacagatacacatgaatgaaaggctcttttacgttatatttaagatggggaactcatagaagtagcttacagtgaatccttctgaaggctttattgagtactgtgtaaaaactcttgtaaaaatatagaaagattaactgtagaactacaatgagttttgccctttcgccttgcttatatggagatttatttgtcattgggattctatttctaaagctggcactttgctactaaaatgggatattacaaacatatttttaaatttaatatcaaagcctgttaattctcatgagactcttaaaattattttctcttgacatttaaagagcaagcacaccaaatatactgaagtatgttaaaatacaaa

SEQ ID NO: 7081 - DNA, 856 bp, Homo sapiens
gttttttcttgaaaagctttacttttctttccacactcagctctccctcctcaaccccacttttatttttcttgctggggttgaggagagaaaatatagaattcctggataagaccaaacaaaacaaaacattaaaatacctgtatgttttgttttagacgagaccaaactaaacaaaaagtatctgtttatcaaagtaaaagtaacacaatggacaattctgcttattctctcaaagagattctaagatgcacctttagaactattaatagcaacctgcatttttttttaatttatacttcagaatcctttaagaacctggtgttcctgagtggtcctgaatcatataagttggtaatggaagctgtaatgaccaagtcccctaaacatactatgtctttgccacgtgtgctgtgacttctctgtgggtgatttaatttatttggatccacctctgagtgagcgcacagtgatcaggtgcttcaaagccaacagaccagctcctcttcctccggatcctcttttgatctgcccaggaaagggatgcattgacactctcctgcatgcacctggcgagaagccacctgaaagtcactgtggttaaagatattggtggaggtaccccaggagcactgttacaaatccttcttgttttggcatctcgtacaacattattaagacacagctgagagttgatgggtgtgtaatgcatatgccaaggaaatgtcactaatcccaaagcaatcaaaaaggagacctcaaaccagatgttaatttgttctttgtgtaacaatgtaaccaaaatattgatgataaaagtcataatttaagattcagaataaatgggtttgatgtc

SEQ ID NO: 7082 - DNA, 4411 bp, Homo sapiens
ctcaggttcctggcatgacttcagggccatggcctggtggctgggacacacttacacagaggtactgaacactctgttccaagagaatctgtccactgccccctccttccacccccaagggaactttgacctgggcccaagccctgggcaggccagtgaccaggccttgtctttcctccacagagtcccagaacctgccaaagcagccccctctgatgctcgccctgggccaggcatctgagtgtctccggctcatggcccgagcaggcctgggttcttgctcctttgccagagttgatgactacttgcactagctgactgtgctggctggctctggctggccctccactggccccagggctggagctgccctgccctccataggcaactggtgcagggactgggaaaccatagacagagtccactcctcctgcctggcctttccccctctccctttccttccttccttcctttctctgcccaccaccccgctcagtctctctctctctccccttcacgtgcagcggcctgtaacacagtattggctggttactctcatgtagcgccttctattttgaaaggggggttttgttttgaggaggggttggggtttttaaatttttttctcctgactgagccaccagtatttatctctggagagtttgtgctgagctggtttctgctaatttagtgatgaagcctatccaagttggtgatagcttattattttcataagtaaaaaacaaatgagattatatatatatatataaaaatatatatattaaaaaaaaagacagtatttatcgtagcattagtggtccagcacctcttgggtgaggctgtccaggcaccatgttttctttgagtccaactcattaaaaaagaagaatctctgtcacctcagccaagtgatttattttttgctcccccttttttgagtcacaggccgagctgcagcctaggaaacccaaatagggtttggtgggccacttagtgggcatggttacattggtttatagcatcccaagaactgtagatccctaggcccctgagagctggacagagcagagaactacagggccaagggtccagagaagtgataacttggcccagggccacacagcagaggtagagggtccttggccagcacactatctaccactctaccccacctcccactgcctgccttgctcccctttcctcccttttcaataccctatcttcccttgttgttaagatggccaaataatacatttactctaaattgattgcctggaaactacctgccttcgtcctgagagcttctgtgtgtcaggctgctggaaagaagactccattcccaggacagaggcccttgagtacaggggctgctttcttcctgcctagatcttcaccatctctgcacagctctgagagaatggatgctttctgttgagaaaccagtaccttgtggaggcaggttcttgggctgctactccagggagtggatggaatccttggtcccctaggccagacttcactgccactgtgccagacagctccctgcagctgggccctagccactcttaggaaagactattgggagtatttgctggccagagaatgggactctatcagctttacacatgtcccaccagctgtttcagatagatccttacagctggcagagtaaaagtggtcccgctaccattggggaatcaggaaaggaaagactgagatggttgccaggacttggggtggcccacctgtggagaggactggctgccctggaggaggaaagggaggaagtctacacagaggagcaccaggacggctggaatttccatatgtgcttcacattgtgaggggagtgcacaagccgcccatgcaaagagtagggtcagccatggcaaggccggaagttgaactttcagtccctgcctgaatctgggctttgcaagctcctgctccatattggtggacatgggaatggttggtgtggcctgagatacccattgctcaccaggcctcactgggcccacagctgggcaacaagaaaaatgtttgaattggaccaactgctggtgatggggccagggccctgggccctgtgctgtcagaattctgccttgggaaatgatcctatagctgctgctttttcttggtccttggggctggcagacccatagaccatggcctgttaggaggcgtcctgtctgtaaaggaaattcatctcttgtgacagcctggggctacctagctcccaaacccagaagttggagacatcaggctgtttaaatgatcatagcctagcaggattggattaaaaccacaggcttttgcagctggaatggggttcagtgaacatctcccccattcctctcttgctacaaataaggaaacaggcccaggagattaagtgacttggctaaagtcacatagcaaattagtagcagagccgggactatcccttatccctgtgggttgggcaacactatttagtcctgaaaccgaatggcagataaaccccatgaggggtcaggctgatgtgccctccagcagtatctgagaagctgctaccttcaggggtgtgtcagggatgaggacgggtgcctgagcttaggttgtggagtggctgagagggcccaggagggctcgggacagctgtgtgctgcatggggttgggtgtctgcctggctcgcacttggtacccatggccacctccccattttctgtgccttatctcactgtttcagctgagtccaagttgtttactctgttcctctccagaggggctctctgtcccagttgggcagctcacctttgggacataagcctttgccccacaagctgtggagagggccaaaaccaagctgcttgagcccactctcttgctgagagtccaggcctgcctgcctgccagccagaggtgccccttatgcacatccagtcctaccagcctgcttccaggagcctagagtgggaaaggcacctgggggagccctggtgaagggctggacctgacccatggaggcaggaggaagacctggctttcttggtttgtccggccctggggagcagccttccctactcactttccccttgcggcaccaaatggtcactccttccagagcaaaaactggcactcatagcaagccagaacccccatccccatcctcatgggtctgtggctgggtgcaggccatcaaaatggacaccacgagacagaagtggggactgcctggccacctagcgccttcccactccttaagcaagcacaaagaagatgaggcagagaattgtcagagctgaaagttcctttggttgctcacaactcaggtatgcacccatgtggcagccaggcagcggagccctactagactgccagtctcatgcacccagacctgtggccagattgtggcctctggctgcctcaggcattttcctctttgcattgggttttcctgcattagtaactacagctgcaacagacatcctccacattgtgcacactggttttgcctttgtcctcaagagttgatacttggcattagcatgaaacttgtgggtgtgggaggatggagagagaactctaacacaaaacatcttattaaaattgtacttgagagacaaaaaaaaaactctgttgtattttgacagaattatttttattaaaatacacatccatgagcagtcatgtgtgtctggtctctgttttgagtcttactgaggttggcaccccttctgtgacacatcctgtcctaaaggatttgggcccttcccagcctctcaagtgcccaggccctcaggtgccttcttcaaggacctttgaaactgtgtatttgtaagaccccaaagaggacaggtacttaaacctcagttctctcttgaaacggctttcttcttatacaaggaaaaagtagcaaattcaactaaagagcctgggcacagtggctcacgcctataatctcagcacgttgggaggctgaggcaggtggatcccttgagctcaggagttcgagaacagcctgggcaacatggcaaaaccccatctctacaaaaaatacaaaaattagctgggcatgggggcgcattcctgtggtcccagctattcaggaggctgaggtgggaggatcactcgagcccaggaggtcaaggctgcagtgagttgagatcataccactgcactccggtctgggtgacagagtgagaccctgtctcaaaaaaaaaaaaaaaaaaaattcaactaaataaaggtgggccacaggaacttttccccacaaaaataaggtattaagaatacatttcagagccaggtgcagtggctcaccctgtaatcccagcactttgggaggccaaggcaggcagatcacctgaggtcaggagtttgagaccagcctagccaacatggtgaaaccccgtctctactaaa

SEQ ID NO: 7083 - DNA, 184 bp, Homo sapiens
ctcttttttttttttttttttttgagacagagtctcgctctgttgcccaggctggagtgcagtggcgcgatctcggctcactgcaagctcggcctcccgggttcacgccattctcctgcctcagcctcctgagtagctgggactaaggtgcgtgccaccacgcctggctagttgttgtattttt

SEQ ID NO: 7084 - DNA, 1078 bp, Homo sapiens
gttcttcctactttcaaattttaattattctagtttcttttaaagactcgttctctgaaatgttttatattttgtttatttgtttaggttccagagttctaaatctggaaagatctacctccatagagacgtacggctcctgttctctagaaagtcaatggaggttgatagcggtgctgcatatgaactcaaatcttacactgaatcaccaacaaaccctcagttttcaccaagatgttgataaggagtgatgatttaaagtatttactcagtacccaagtttgcaagtaaaaattagcatagaatggagtgtaccaaattaacaatcaggagagtggattctctcctgttatcctggaccagtttttatgaaaggattcctgaaatgaaatccatatattccatgtagactggaaaaactcatgtcctaatcctttttgtactgttgaaaccacttcattggacatgttgcaatagcaaaacccccagttagattagtgtttacacattttctcagttatttaatatttaatgttttccttaatactcaagtgatgtttgtctctagtgttctaatgtagcacaaatcctatgtaaaatcatactatgtatttttgacattaatgttgaaatcaaatatatgcacaagtctttaattttgtgtaatgtgttaagtgctgttcatttaagttattgaaaatgagaataaaatgttgagcttctttaaaagtaacacactatgcaagcatgtgtactttttatatctctcatgtttagtttttataacaccatatccaggttgctatctcacatagtagtcctttaacatattgtattagcagtgcaatgtggactaagctgcttcactttccctttgcaagttcagatcatcatgcccattcatagccaggattccttatccccaaaacagttctatttttccttaatcactactatagagtctttacattaaattactgtcgtatgctagataattttctcaaattgttaaaagaatatgtactttggaaacaaattagtatttatattgtaaatatattcaaaaaaaactaagaaa

SEQ ID NO: 7085 - DNA, 1078 bp, Homo sapiens; identical to SEQ ID NO: 7084

SEQ ID NO: 7086 - DNA, 521 bp, Homo sapiens
gcttttatttgtagatgagacatttatgtgattgagtgaattagccattagacattttcattctagctctacagctgcaaagagggagggggaagatgtcttgagtcttgttcccaatttatcactaagtgcatcagaaatctgtcttccaacacccttggaaagaacagggtggtttttagatgtttgtgctcagacagcgggcaacagcagattaaataacaaggcaaaaatactaggaatgctggtagaaatctatgaccgcaggttaaaaaaaaagaccactcaagtaggccagacccaggagacctgggaatctagaacctggtaagcagtctggaattgggaaaggagaaaatctacttttggacccaggcattagaccgcttaagagaatctatcagtccaggtgatgagtgtgtggctgcaggccagcaggctgtggaatggcaagcagataccttttatatatttcttttaaaatatcagttaaaaaaaggctatttatattccataaaact

SEQ ID NO: 7087 - DNA, 521 bp, Homo sapiens; identical to SEQ ID NO: 7086

SEQ ID NO: 7088 - DNA, 844 bp, Homo sapiens
atttttaacaaagtggtccaagggaaaaataatgttttaagtttttatgtgcggattccagacaagcattctttctttttgttcttcctgcactctcctacatttctatgttgttactagacagtgatgtctggttctgacttatttatgtattttttttctatttgtttctggcaatgcacataataagaaatacacatagccaatattcttgctgttgttcataaccgctgagaaaaaaaagcagcatctagtaggaataaaagaagcctcagccccagaatggcaagaatcgttatatgttttttagggccactctttgcacctcgttttacagacaggttactacttatcagcttactgaccttgggaagaccccaacctctgagctaccacttcctcatctgtaacctgaggatccagtgaagtcatgtaagacaatgtagcattgtacgcttatgactagaccccagtcatgacatgagctgcttctgtctagaaaatagagggctggcagggcacgttggctcacgactgtaatctcagcactttgggaggccgaggcaggcggatcatgaggtcaggagttcaagaccggcctggccgacatggtgaaaccctgtctctactaaaaatacaaaaattagctgtgtgtgatggtgcgcgcctgtaatcccagctactgaggaggctgagccaggagaatcgcttgaacctaggaggcggagattgcagtgagccaagatcgcatcactgcgctccagcctggagacagagcgagactccatctaaaaaaaaaaaaagaaaaaagaaaaagaaaagaaaagaaaaatgaaagaaaaag

SEQ ID NO: 7089 - DNA, 105 bp, Homo sapiens
cacgcctgtaatcccagcactttgggaggctgaggcaggtggatcacgaggtcaggagatcgagaccagcctggctaacaccgtgaacctcgtctccactaaaaa

SEQ ID NO: 7090 - DNA, 281 bp, Homo sapiens
caatcataacactggatgtattaacgcatgtcaagactctcacttctctgtagaaatgagaaataaatgtcgattgttggttttctgtagacttgtgatcacgcccaggaactgtcattttccagttaccagaatctgaatcattgtctaatgtgccacgtatataacaatatatcactaacagcgatctaaaagcgtaaagatgtttacgtaaaattcatagatttgatgaaaataataggaatgaatgaaaataaatacaagaatctggatttctaaaa

SEQ ID NO: 7091 - DNA, 664 bp, Homo sapiens
tcagcctcccaagtagctgggattaaaaagccagctagctttaagatacagtgttgggcatcacattttggcacggagcaggcactcttttctttgcccccaggtgggactaagccaccacaagccttccctggtgtgtgcagtaggtaatgaatgcttgcctgctcagcacccactacatgctgggctgggtcacattactctgactcccccttgagcttcagtccatgcctggttcaagatgtattgactcaactcgaggatccggaggtgggatgtggctctggcctggccagaggaccgaggatgctgcatgccatggctacagcaaccggttcagctttgggctcatgtcctagtcagagccaatgagatgtaatcttgggatatctgctgggctgttcggaggggacaggctgccctgctcatccccattcctgatgctgagggatctgagaaaatcacttgtaaaattcggggctgtttggaagaaggggagactgatgtctccttctctctacagacatctgctcagctacagagcttgactgacctacccagaggcagaatgatatggtggttaaaagtgtgctatgggccgagatcttgccattgcactccagcctgggtgacagagtgtgactccgtctcaaaaaaaaagaaa

SEQ ID NO: 7092 - DNA, 672 bp, Homo sapiens
tcagccttccaagtagcagggattacaaagccagctagctttaagatacggtgttgggcatcacgttttggcatggagcaggcactcttttctttgcccccaggtgggactaagccaccacaagccttccctggtgtgtgcagtgggtgatgaatgcttgcctgctcagcacccacttcctggtgggctgggtcacattactatgactcccccttgagcttcagtccgcgcctggttggagattattgactcaacccggggatccagaggtgggatgtagctctggcctggccagaggaccgaggatgctgcatgccatggctacagctactggttcagctttgggctcatgtcctagtcagagccaatgagatgtaatcttgggatatctgctgggctgttgggaaggggacaggctgccctgcacatccccattcctgatgctgagggatctgagaaaatcacttgtaaaatttgggggtgtttggaagaaggggagattgatgtctctttctctctacagacatctgatcagctacagagcttgactaacctacccagaggcagaatgatatggtggttaaaagtgtgctctgggccgagattttgccactgcacttcagcctgggtgacagagtgagactccatctcaaaaaaaaaaaaaaaaaaaaa

SEQ ID NO: 7093 - DNA, 666 bp, Homo sapiens
tcagcctccaagtagctgggattacaaagccagctagctttaagatacagtgttgggcatcacattttggcacggagcaggcactcttttctttgccctcaggtgggacttagccaccacaagccttccctggtgtgtgcagtgggtgatgaatgcttgcctgctcagcacccactacatggtgggctgggtcacattactctgactcccccttgagcttcagtccgtgcctggttcaagatgtattgactcaactcgaggatccagaggtgggatgtggctctggcctggccagaggaccgaagatgctgcatgccatggctacagcaactggttcagctttgggctcatgtcctagtcagagccaatgagatgtaatcttgggatatctgctgggctgttgggaaggggacaggctgccctgctcatccccattcctgatgctgagggatctgaaaaaatcacttgtaaaattcgggggtgtttggaagatggggagactgatgtctccttctctctacagacatctgatcagctacagagcttgactgacctacccagaggcagaatgatatggtggttaaaagtgtgccctgggccgagatcttgccactgcactccagcctgggtgacagagtgagactccgtctcaaaagaaaaaaaaaa

SEQ ID NO: 7094 - DNA, 632 bp, Homo sapiens
aaagccagctagctttaagatacggtgttgggcatcacattgtggcatggagcaggcactcttttctttgcccccaggtgggactaagccaccacaagccttccctggtgtgtgcagtgggtgatgaatgcttgcctgctcagcacccacttcctggtcggctgggtcacattactctgactcctccttgagcttcagtccgcgcctggttcaagattattgactcaacgcgaggatccagagatgggatgtagctctggcctggccagaggaccgaggatgctgcatgccatggctacagcaactgggtcagctttgggctcatgtcctagtcagagccaatgagatgtaatcttgggatatctgctgggctgttcggaggggacaggctgccctgcacatccccattcctgatgctgagggatctgagaaaatcacttgtaaaatttgggggtgtttggaagaaggggagattgatgtctctttctctctacagacatctgatcagctacagagcttgactaacctacccagagacagaatgatatggtggttaaaagtgtgctctgggccgagattttgccactgcacttcagcctgggtgacagagtgagactccatctcaaaaaaaa

SEQ ID NO: 7095 - DNA, 669 bp, Homo sapiens
  SITE (110): n equals a,t,g, or c
tcagcctcccaagtagctgggattacaaagccagctagctttaagatacagtgttgggcatcacattttggcaaggagcaggcactctttcctttgcccccaggtgggantaagccaccacaagccttccttggtgtgtgcagtgggtgatgaatgcttgcctgctcagcacccactacatggtgggctgggtcacattactctgactcccccttgagcttcagtccatgcctggttcaagatgtattggctcaactcgaggatccagaggtgggatgtggctctggcctggccagaggactgaggatgctgcatgccatggctacagcaaccggttcagctttgggctcatgtcctagtcagagccaatgagatgtaatcttgggatatctgctgggctgttgggaagaggacaggctgcactgctcatccccattcctgatgctgagggatctgagaaaatcacttgtgaaatttgggtgtgtttggaagaaggggagactgatgtctccttctctctacagacatctgatcagctacagagcttgattgacatacccagaggcggaatgatatggtggttaaaagtgtgctctgggccgagatcttgccactgcactccagcctgggtgacagagtgagactccgtctcaaaaaaaaaaaataaaa

SEQ ID NO: 7096 - DNA, 674 bp, Homo sapiens
tcagccttccaagtagcagggattacaaagccagctagctttaagatacggtgttgggcatcacgttttggcatggagcaggcagtcttttctttgcccccaggtgggactaagccaccacaagccttccctggtgtgtgcagtgggtgatgaatgcttgcctgctcagcacccacttcctggtgggctgggtcacattactatgactcccccttgagcttcagtccgcgcctggttggagattattgactcaacccggggatccagaggtgggatgtagctctggcctggccagaggaccgaggatgctgcatgccatggctacagctactggttcagctttgggctcatgtcctagtcagagccaatgagatgtaatcttgggatatctgctgggctgttgggaaggggacaggctgccctgcacatccccattcctgatgctgagggatctgagaaaatcacttgtaaaatttgggggtgtttggaagaaggggagattgatgtctctttctctctacagacatctgatcagctacagagcttgactaacctacccagaggcagaatgatatggtggttaaaagtgtgctctgggccgagattttgccactgcacttcagcctgggtgacagagtgagactccatctcaaaaaaaaaaaaaaaaaaaaaaa

SEQ ID NO: 7097 - DNA, 726 bp, Homo sapiens
cctctggcttctgcctcctgggaggtactaaggatggatgtgaaatgtgtctgcagaccccagagttggggactgcagacggaaattgagatcagggccccagtctggcagaaatgggtgcagcatggggcattgggttccttccatcaaaggcatggggtgtgttgcagacagtcatgagatgtggctgaatcttgcaagggagccgcggtcctagggttgctgcttgagacaaagactgctgtcagtggaacctggtgaccttcacccttctgtgtcaggctgcagacagcaagagatggcagcagattacacccaacaggaaaagggccattgccatcccacaggttgccataggaggagatgacatctctccctctcctcctccagcagtgtcagctggggaagaggtgggtgggtttgcacaaaagagtagaccacagaccatgctccttctcctccagtctgctggggccccaagagagtctgcagcccttggccagggaccagctgacacaggagaacaaaagaccttaggttgggataacatggtggtgcagttcatcctctggagctccctgtgagatcagactggagctggtgtccagctgagaccacatctcactcagatccttccctgccatatcctgtttcccttactcctatctcctgagagttcttcctgaatgaattacatgcatttaatccctgcctcaggctctgctt

SEQ ID NO: 7098 - DNA, 336 bp, Homo sapiens
ttttttttttgagacacagtgtcactctctcacctaggctggagtgcagtggcacgatctcagctcactgcaacttctgactcctgggttcaagcaattctcgtgcctcagcctcccaagtagctgggattatagacacgtgccactatgcccagctaagttttgtgtttttagttgagatagagttttgtcgtgttggccaggctggtttcgaacccctgggctgaagtgatccacctgccttggcctcccaaagtgctgggattacatgtgtgagccactgtgcctagccctaatttttttttttttttttttttttttagtgtttgtagagat

SEQ ID NO: 7099 - DNA, 726 bp, Homo sapiens
cctctggcttctgcctcctgggaggtataaggagggatctgaaatctgtctgcagaccccagagttggggactgcagagggaaattgagatcagggactctagtctggcagaaatgagtgctgcatggggcattgggttccttccatcagaggcatggggtgtgttgcagacagtcatgaaatgtggctgaatcttgcaagggaccctcggtcctatggttgctgcttgagacaaagacccctgtcagtggaacctggtgacattcacccttctgtgtcaggctgcagacagcaggagatggcagcagattacacccaacaggaaaagggccattgccaccccacaggttgccatagaaggagatgacatctctccctcttctcctccagcagtgtcagctggggaagtggtgggtggatgtgcacaaaagagtagaccacagagcatgctccttctcctccggtctgctggggccccaagagagtctgcagcccttggccaaggaccggctgacacaggagaacaaaagaccttaggctgggataacatggtggtgcagttcatcctctggagctccctgtgagatcagactggagccagtctccagctgagaccacatctcacttagctcctttcctgccatatcctgttttccttactcctatctcctgagacttcttcctgaatgaattacatgcactcaatccctgcctcagtctctgctt

SEQ ID NO: 7100 - DNA, 438 bp, Homo sapiens
ttgtatttttagtagagctggggtgtcacgatgttggccaggctggtctcaaactcctgacctcaggttatacacttgcctcagcctcccaaagtgctaggattataggcgtgaaccaccgtgcctggctgtgcactaatgtttgatttttgcagaaccacccttccctaatggttgtctcctagatctaaggtgactttattcattttagaatgaacttaccccattgatactgtaaccagagttggcatacatcacgattggcagaacccggtcatgtttagcgatatggaagtgttctggaaactcctccttcttgtagacgtggaggtgacggtgcgcattcttcagtgcctggtaaagggcttcctcttgccccaacttgggcaggggcatccaaaagcaaccgtgcgcacaatattaaacttggaccaggtc

SEQ ID NO: 7101 - DNA, 545 bp, Homo sapiens
cctctggcttctgcctcctgggaggtactaaggatggatctgaaatgtgtctgcagaccccagagttggggactgcagagggaaattgagatcagggaccccagtctggcagaaatgggtgcagcatggggcattgggttccttccatcagaggcatggggtgtgttgcagacagtcatgagatgtggctgaatcttgcaagggagctgcagtcctagggttgctgcttgagacaatgaccgctgtcagtggaacctggtgaccttcacccttctctgtcaggctgcagacagcaagagatggcaggaggttacacccaacaggaaaagggccattgctatcccacaggttgccataggaggagatgacatctcttccctctcctcctccagcagtgtcagctggggaagaggtgggtgggggtgcacaaaagagtagaccacagaccatgctccttctcctccagtctgctggggccccaagagagtctgcagcccttggccagggaccggctgatacaggagaacaaaagatctcagtctggg

SEQ ID NO: 7102 - DNA, 637 bp, Homo sapiens
ttgtatttctagtagagatggggtttcaccatgttggccaggcttgtctcaaactcctgacctcaggtgatacacctgcctcagcctcccaaagtgctgggattataggcgtgagccaccgtgcccggctgtgctcttatgtttgatttttgcagaaccacccttccctaatggatgtctcctagatccaaggtgactttattcattttagaatgaacttaccccattgatactgtaaccaaagttggcatacatcacgattggcagaacccggtcatgtttagcgagatggaagtgttctggaaacccctccttcttgtagatgtggaggtgagggtacgcattcttcagtgcctggtaaagggcttcctcttgccccaatttgggcaggggcatcccaaagccaccgtagcccacaatatcaaacttgaccaagtccataaacttgatgtagttggacaagggatcttgttgacattgggtctcttcttcacggtggtcatcccatggtctcatgtgatgatgacgctgaggtgttctgcaggctgtgcttctcagtggctcccaccagatacctgatggtcctgtcgatttgctgaatcatcaacttcctattctctgcctctggcctgaatcg

SEQ ID NO: 7103 - DNA, 638 bp, Homo sapiens
ttgtatttttagtagagatggggtttcaccatgttggccaggctggtctcaaactcctgacctcaggtgatacacctgcctcagcctcccaaagtgctgggattatgcgcatgagccaccgtgcctggctgtgcacttatgtttgatttttgcagaaccacccttccctaatggttgtctcctagatccaaggtgactttattcattttagaatgaacttaccccattgatagtgtaaccagagttggcatacatcacgattggcagaacccggtcatgtttagcgatatggaagtgttctggaaactcctccttcttgtagatgtggaggtgagggtacgcattcttcagtgcctggtaaagggcttcttcttgccccgatttgggcaggggcatcccaaagccaccatagcccacaatatcaaacttgacccagtccctgaacttgatgtagttggacaaggggatcttgttgacattgggtctcttcttctcggtggtcaccccatggtctcgtgtgatgatgacgctgaggtgctctgcaggctgtgcttctcagtggctccctccagatacccgatggtcctgccgatttgctgaatcatcaacttcctgttctctgcctctggcccgaatcg

SEQ ID NO: 7104 - DNA, 730 bp, Homo sapiens
cctctggcttctgcctcctgggaggtacaaaggagggatctgaaatgtgtctgcagaccccagagttggggactgcagagggaaattgagatcagggactgtagtctggcagaaatgagtgcagcatggggcattgtgttccttccatcagaggcatgggggtgtgttgcagacagtcatgaaaatgtgactgaatcttgcaagggaccctcggtcctagggttgccgcttgagacaaagacccctatcagtggaaccctggtgaccttcacccttctctgtcaggctgcagacagcaagagatggcagcagattacacccagcaggaaaagggcggtttttatcccacaggttgccataggaggagatgacatctctccctctcctcctccagcagtgtcagctggggaagaggtgggtgggtgtgcacaaaagagtagaccacagagcatgctccttctcctccagtctgctggggcccccagagagtctgcagcccttggccagggaccggctgacacaggagaacaaaagaccttaggttgggataacatggtggtgcagttgatcctctggagctccctgtgagatcagactggagccagtctcctgctgagaccacatctcacttagctcgttccctgccatatcctgttttccttactcctatctcctgagagttcttcctgaatgaattacatgcactcaatccctgcctcaggctctgctt

SEQ ID NO: 7105 - DNA, 727 bp, Homo sapiens
cctctggcttctgcctcctgggaggtaataaggatggatctgaaatgtgtctgcagaccccagagttggggactgcagagggaaattgagatcagggaccccagtctggaagaaatgggtgcagcatggggcactgcgttccttccatcagaggcatggggcgtcttgcagacagtcatgaaatgtggctgaatcttgcaagggaccctcggtcctagggttgctgcttgagacaaagacccctatcagtggaacctggtgaccttcacccttctgtgtcaggctgcagacagcaagagatggcagcagattacacccaacaggaaaagggccattgctatcccacaggttgccataggaggagatgacatttctccctctcctcctccagcagtgtcagctggggaagaggtgggtgggtatgcacaaaagagtagaccgcagaccatgttccttctcctccagtctgctggggccccaagagagtctgcagcccttggccagggaccggctgacacaggagaacaaaagaccttaggctgggataatatggtggtgcagttcatcctctggagctccctgtgagatcagactggagctggtgtccagctgagaccacatctcacttagctccttccctgtcatatcctgttttccttactcctatctcctgagagttcttcctgaatgaattacatgcactcaatccctgcctcaggttctgctt

SEQ ID NO: 7106 - DNA, 637 bp, Homo sapiens
ttgtatttttagtagagatggggcttcaccatgttggccaggctggtctcaaactcctgacctcaagtgatacacctgcctcagcctcccaaagtgctgggattataggcgtgagccaccgtgcctggctgtgcactcatgtttgatttttgcagaaccacccttccctaatggttttctcctagatccaaggtgactttattcattttagaatgaacttatcccattgatactgaaactagagttggcatacatcacgattggcagaacttggtcatgtttagcgagatggaagtgttctggaaactcctccttcttgtagacgtggaggtgagggtgcgcattcttcagtgcctggtaaagggcttccgcttgccccaatttgggtaggggcagcccaaagccaccgtagcccacaatatcaaacttgaccaagtctctgaacttgatgtagttggacaagggatcttgttgacattgggtctcttcttcacggtggtcatcccatggtctcatgtgatgatgacgctgaggtgctctgcaggctgtgcttctcagtggctcccaccagatacccgatggtcctgtcgagttgctgaatcatcaacttcctgttctctgcctctggcctgaatcg

SEQ ID NO: 7107 - DNA, 638 bp, Homo sapiens
ttgtatttttagtagagctggggtgtcaccatgttggccaggctggtctcaaactcctgacctcaggttatacacttgcctcagcctcccaaagtgctaggattataggcgtgaaccaccgtgcctggctgtgcactaatgtttgatttttgcagaaccacccttccctaatggttgtctcctagatctaaggtgactttattcattttagaatgaacttaccccattgatactgtaaccagagttggcatacatcacgattggcagaacccggtcatgtttagcgatatggaagtgttctggaaactcctccttcttgtagacgtggaggtgacggtgcgcattcttcagtgcctggtaaagggcttcctcttgccccaacttgggcaggggcatcccaaagccaccgtagcgcacaatatcaaacttgaccaggtccctgaacttgacgtagttggacaaggggatcttgttgacattgggtctcttctttacggtggtcatcccacggtctcatgtagtgatgacgctgaggtgctctgcaggctgtgcttctcagtggctcccaccagatacccgatggtcctgtcgatttgctgaatcatcaacttccttttctctgcctctggcccgaatcg

SEQ ID NO: 7108 - DNA, 726 bp, Homo sapiens
cctctggcttctgcctcctgggaggtataaggagggatctgaaatctgtctgcagaccccagagttggggactgcagagggaaattgagatcagggactgtagtctggcagaaatgagtgctgcatggggcattgggttccttccatcagaggcatggggtgtgttgcagacagtcatgaaatgtggctgaatcttgcaagggaccctcggtcctatggttgctgcttgagacaaagacccctgtcagtggaacctggtgacattcacccttctgtgtcaggctgcagacagcaggagatggcagcagattacacccaacaggaaaagggccattgccaccccacaggttgccatagaaggagatgacatctctccctctcctcctccagcagtgtcagctggggaagtggtgggtggatgtgcacaaaagagtagaccacagagcatgctccttctcctccggtctgctggggccccaagagagtctgcagcccttggccaaggaccggctgacacaggagaacaaaagaccttaggctgggataacatggtggtgcagttcatcctctggagctccctgtgagatcagactggagccagtctccagctgagaccacatctcacttagctcctttcctgccatatcctgttttccttactcctatctcctgagacttcttcctgaatgaattacatgcactcaatccctgcctcagtctctgctt

SEQ ID NO: 7109 - DNA, 2257 bp, Homo sapiens
ctggttcttaaaatgccctttttctcctgcctttaggagctctgtgatcatatcgagctcatctgggttaatttatttatattcacaatatccatggagtacatatggcatcttgtgggcctttagtctgccttctatgaatataagacattatttccccagaatgaaaatgtatatgaagaaagagaaatatgccactggaaagtagttcaaataatgaaagtcttttgcttgttatagccttcctttttttctgttctttttcctttccttccataaaagatttattatatgcttttaggaaaataacaaaagcagaatgtttgctaaccatctatgggtgaaagagtagcaaatttggtttaaggagatgttgtaaataatggtatgacaattcctgggattctgggagtcacttaataaggagacagaaatagattcaatgccagtgtgcccctaatgagaaaagggaattcttttactgaggcctataatcttgggaatatgcttttaattaaaattataagtctaaaacttttactattactatgactgtttatagctcccaatttaactcacgtaacagaggagtgagtggatgggtgggctagacttaagataataagggagtaaggagtgaaagaaaaccccacctatctcctcacctgaaggccctggacacgtccagcctgctttgggagtaaggcaacaggagattgaaatcaagttggcagttgagttttgaactgtattagactccacagttcaatttccaagagttgtatgaaaataaaactagtaggataaaagacagacatccagtacactcattccttcttcaatgttctattttatcattatagccagtgcctgtggcaggcacactctgagatgggccacagtgttctgtctcccggaatccatacccttgtgtaatcgttaccacttcagtgtaggctggatctagtgactctttactgaaaaatacaaaatggcagaaatgctgggatgccactgattttgttaggttatcaaaacgctgtggcttttgccttgaatttctctccatgctcattttcttactttctgtaataccttacaaaaggagaagcaagctggcataatgagagcaactttatggagaagtccgtgtgagaaggaattggtatctctagccaacagctagggagggtctgagcctgtcagaaaccaatgaatgagtttggaagcagatctgtcagcccctttcaagacttcagatggctgaaactccaactgacaccttgtctggaatctcattaagccatgaagcacgtagctaaacacattctttaccaatatgaactattaagtaataataatctattgttttaatccatgttttcaggttattatagcaatagataacaaatatgcatagtgctcaagtttaaaagggattatatgccattaaatgcacattgcaaatatgattatatggattcatttttccttataggcaatattataagcaaaagtcagattcctggacagcctagcagaatgggattacttttataaaaagatgaccaaagtgtttgcataaaatattcttcacatttcataacaccaaagcaaaagagtacttcacagctcaggggagattgtaaaatactcagatcgcttacagaaccatggggtcgttacatctctttgacttgtggtatttatttccaccaagttctttttaataaagtctgcggaagtttcccgggtaagttcaaggtgttgttctttctgtagtgcgtatttcaaaaaaaaaaaaaaaaaaaaaaaagctgacattctaagcctttccaaagaattcttcttctctttttttgttttatagagataagaaaaatcaaatattgtatttcaattaaagatacaaatcatttaaaagatcagccatttattaatgaacaaatacgttgtcaaagaggtgacaagcaatggtttcagtgattttattttattttcacttcaaattgcttattccagctctaaccacctacattattattatgagctgctgttaactgaacctctattttattcctctttgtccaagagctctacaaacactctctataatccttaaaataactccacaaatggaagacattatttccatttcacagatgaggaaacaaactcggagttatcaggtagttgtctgcctatgaaatggaagaaaaggcatttgaattcaagtttacctagtcctaaaactaga

SEQ ID NO: 7110 - DNA, 5363 bp, Homo sapiens
taagtccttgcacaagtgggatatattttgaatattgaccatctagcttgatgtctcatacaaaaagatattttttacacagtttttaatatttccatagtttattttcaaagggactgtaatgcatattacttattaaaagcattttttcccccaactttgatggggaaaagcatatcaacagatacctacttttgtagatggctataaaaattgttacccaaaaggctttcttagagcaaattgtctcttatgattattcctgcctgcctccatgggatctgtctttatattgttggagagaatagcaaacatccataatacattttttttttttttgtggatataacattcaggatagaattgtttgtcatttattgcttagattgatattttgtatacttagggattatgaaaaaagtttgtgttaatattgcattattaaagcacatgtttaaagataattattagattttaagttcacaatgcttcatgtattgtttattcttgtgattttatttttactttaggaatttattcttcattgcctgttgaagttcctttgaatcacaaacggtttgtttgtgatctaactcaagctgatcgtcttgccctctatgatttcgtagttgaggagacaaagaaaaagcgctctgattctcaaattattgaaaatgacagcgatctctttgtagacttggctgccaaaatcaatcaaggtttgagatgcacatcatggctttacatttcttcattatcattttattctatgagtgttattaagatgatttaattcttgggccactttgagttagagtaaaatggttttgtatcatttaatattgacatgaagttggccctctgtgtctgtgggttccatatccatcaatttgaccaacggtggattgaaaatatttggaaaaaataaaagtgtgtggttgcctctgtactatacatgtagagactttttattcttgtcataattccataaacaatatattaacaactattcatgcagcatttacatcgtatcaggtttttggtgttttttttgttttgtttttttgagactgagtcttactctgtcacccgggctggaatgcagtagcgcgatctcagttcgttgcaatctctgcctcccaagctgaagcaattctcgtgcctcagcctcctgagtagctgggattacagacatgtgccaccacacctggctactttttgtatttttagtagagatggggttttgctacgctggccaggctggtcccaaactcctggcctcaagtgatcctcctgtcttggcctcccaaagtgctgggattacaacgtgagccactgtacccggcctgtattaggtattgaaagtaatttagagatgacttcaagtgtactggagggtgtgtgtaggttatatacaaatactacaccattttatatcagagacttgagcatccatggattttgatatccttgggggttcctgaacaaattctgcatggatactgagggatatttactcagtacctgaggttttactctgacttttacattaaatgtaccttctttctgtgaaaatattacaactgtgctgttactttaatctatgtacctaagcactcttatgttcaactaatggctggagagaagaaatgatataaaacttagcccgtgtatataaataatatacaatttttagaatgtttttatgtgctactttgaaacaagttaaaatataggattgtgatgtatttatttgataattcatagaatttaaaagctttgaaggatataatacttttattttattctttcattagacaatagtcgaaaaagtccaaaatcctaccttgaaatcctggcagaagtacgagattataaaagaagacgccagtcctatagagccaagaatgttcacataaccaagaaatcatatactgaggtaagttttacataatctttgttgataagaatttcccttaggtaattttctaaatctgttctatgaatttccacaattctttggaaattttctgaaagtgtcttcagggtggccacacctgatttgtatctgttccatcacttctagatccaccctttagcaagcaaaggctttcatagtataagaaccttatataaaacaattgtacaatcttaaaagatatctccttgtgagaaagtagtagtgtatcatggtaagagcatgagtttgggtttaggtagaccataccttgacttttgattctgctgtttctcattggctctttgacttaagcaagttatttgagctttttagattgaatgttttcttttcataataataataatataatctttgcagggttgttatgagaattgactgacagaatgtatgcaaacacaaatttcttcatgaatattagctattatcttttttggcagaaagcatgtttttatgtactctagtaaatatttggacttaagaaatgtcttgatatacattatttatgtattagtctcttggtgtatgtctagacttattttcagatgccatttaatggctcgttagagttgatgaatttttttggtatgtgaattaccttgcccagactctacaaataattgcctcattgattccctaattgttcccgtattatttcttacttctctctgatttaaaagaccttccataatctggcctccttttcccaagcatttcttttgctttagtcaagcatgtctcttaaactatatctgattgcatataattattcttacctccatgccctattacctgttactttcttacctgaaatgctctgtttttgccattttaaatcttgttgagtttaagggccaccatttccatgaggtgctagttgactaatctatcactagtttattgtactaatactctgtaccacacagcttagctctaaattttatgctgttctttttacagttaaaatctgtgttttagacttaacttagcaagtagagacctgggtccctgtcatactaccttggtgattctcatagtccctaagatacttggctcatcagttatttcttctctcgtctcataacccttgtaatcaagcttaaatgttgctgctagcattctttacggttttatagttgatattttattgtggaaatattcaaacatatactaaagtggatagcatcgtctaaggaatgtacccatcacccagcttcaaaaattgaaataaaagattggcaagggcttcatagagaaaagcatttgagggaaagggagaagcaaggaggaataaaggaatgtctgctattgactcttgcctatgtggtggagcctgagctaggtggattctgtgcaaatagcaggcttcaaggcgcttacatagagctgctgacagggaggcttgtaggcctgccagggaagtgcgagagctggaacttgagataggtgtgtgtgactcatgtcactccgctaggttggaccttggcatatcttaggttttccatgggagaatatagtggaggaggagaagtggtggataaggattttccgggtggaagaactagcattctgaaaagcagatagaagtataggagtttttcagagactcattagtaacccagggtggctagagcttagggcttctctgttgagagatgaggctaagttctatcttatgtaggaaaatcctggagggctctgaaggcttcattaaggagtttggatattgttcgattttactttgagagccattgaaagtttctttaaggtggggagaaatgcagtcaggcctgaatgaatagtgtttctgagattgccccgtgtcccctataccttttttctgaaaacattttctatttaatcatgagggaagtgtaaactcctattttagttttgtctttgcctctgcagtgactaaccctgtgcttggtggcatgggtaaataggaaaggaaaaactttcaagtggtttttacctatttgaaagtttctttatagagtcattcagaaagtatctgtgaagtgactgtatgtttcatattttgtcttattaagtcatatgattaagtcaagatgacttaattataaggttttaaaaaaatcatttgtaaataagctctaatagagagataaattgcaaaactaaaaatagtaccaagaactcccatattgtctttacccagatcacccattgttagcattttgccacatagcttctcattggcactctctctctctctctctgcacatttttcactctctcgatctcgatctgtacatatttttttcccctgaattctttaagggttaaattacatacctcataaccctttatccccagtatgtatttcctaagaacagagatattttctcacataaaggtagtacagttatagcaacttcaaatttaatattgctgtaaaacttttatctactattcatattccagtttgaccattgccttttctgtgttctctaaactgcacaagtcccacagtcaattatgtcatagcacttagtaaatatttgattgttagcactgatttttctagcgttacagtcttaattttttgagcagttttcttacctgaagttcggtgcttacctctcccaaggtgattcgagatgtgataaatgtgcacatggaagaactcagcaatcattggcaagaagagcaagagaaggcagaggatgatgccgaaaagtacgtcattatctttattggtgaaaatactctctctttgataacagataacaattaacttataattgttaaattttagcatttccaaaacccttgatagcacacagtaaactcgtgaaaatgctttttgtttttcgttgtcagtgcccagggttattgtaccagagttgttctgacattaccctttgacagttttcaggggatagccatattagtgaaatattcaaatagcaaaacatactaacatttatgcctagtattccattatgggaacaccaagcatgtgggagttatttatgtcctactgctcaaggtcatcgccaaggtctcattgcaaaaattaaaaaaattgcaacctcaggcataaatgggttaagagctgtgtttatttgtccttttatatgggttataagattgtgcatatttagaccatatctaccattggtttgatatagaatattacactttagactggtgtgtctgtgtacgtatactggagaccagtggtaacacaaactgattaacattcttttctgtgttttaggaatgaagaaaggcgatcagcttcagtagattcacggcagtctggtggaagctatttggatgctgagtgttcacgacatagaagggataggagtagaagcccacataaaagaaaaagaaacaaagataaggataaaaa

SEQ ID NO: 7111 - DNA, 5341 bp, Homo sapiens
taagtccttgcacaagtgggatatattttgaatattgaccatctagcttgatgtctcatacaaaaagatattttttacacagtttttaatatttccatagtttattttcaaagggactgtaatgcatattacttattaaaagcattttttcccccaactttgatggggaaaagcatatcaacagatacctacttttgtagatggctataaaaattgttacccaaaaggctttcttagagcaaattgtctcttatgattattcctgcctgcctccatgggatctgtctttatattgttggagagaatagcaaacatccataatacattttttttttttttgtggatataacattcaggatagaattgtttgtcatttattgcttagattgatattttgtatacttagggattatgaaaaaagtttgtgttaatattgcattattaaagcacatgtttaaagataattattagattttaagttcacaatgcttcatgtattgtttattcttgtgattttatttttactttaggaatttattcttcattgcctgttgaagttcctttgaatcacaaacggtttgtttgtgatctaactcaagctgatcgtcttgccctctatgatttcgtagttgaggagacaaagaaaaagcgctctgattctcaaattattgaaaatgacagcgatctctttgtagacttggctgccaaaatcaatcaaggtttgagatgcacatcatggctttacatttcttcattatcattttattctatgagtgttattaagatgatttaattcttgggccactttgagttagagtaaaatggttttgtatcatttaatattgacatgaagttggccctctgtgtctgtgggttccatatccatcaatttgaccaacggtggattgaaaatatttggaaaaaataaaagtgtgtggttgcctctgtactatacatgtagagactttttattcttgtcataattccataaacaatatattaacaactattcatgcagcatttacatcgtatcaggtttttggtgttttttttgttttgtttttttgagactgagtcttactctgtcacccgggctggaatgcagtagcgcgatctcagttcgttgcaatctctgcctcccaagctgaagcaattctcgtgcctcagcctcctgagtagctgggattacagacatgtgccaccacacctggctactttttgtatttttagtagagatggggttttgctacgctggccaggctggtcccaaactcctggcctcaagtgatcctcctgtcttggcctcccaaagtgctgggattacaacgtgagccactgtacccggcctgtattaggtattgaaagtaatttagagatgacttcaagtgtactggagggtgtgtgtaggttatatacaaatactacaccattttatatcagagacttgagcatccatggattttgatatccttgggggttcctgaacaaattctgcatggatactgagggatatttactcagtacctgaggttttactctgacttttacattaaatgtaccttctttctgtgaaaatattacaactgtgctgttactttaatctatgtacctaagcactcttatgttcaactaatggctggagagaagaaatgatataaaacttagcccgtgtatataaataatatacaatttttagaatgtttttatgtgctactttgaaacaagttaaaatataggattgtgatgtatttatttgataattcatagaatttaaaagctttgaaggatataatacttttattttattctttcattagacaatagtcgaaaaagtccaaaatcctaccttgaaatcctggcagaagtacgagattataaaagaagacgccagtcctatagagccaagaatgttcacataaccaagaaatcatatactgaggtaagttttacataatctttgttgataagaatttcccttaggtaattttctaaatctgttctatgaatttccacaattctttggaaattttctgaaagtgtcttcagggtggccacacctgatttgtatctgttccatcacttctagatccaccctttagcaagcaaaggctttcatagtataagaaccttatataaaacaattgtacaatcttaaaagatatctccttgtgagaaagtagtagtgtatcatggtaagagcatgagtttgggtttaggtagaccataccttgacttttgattctgctgtttctcattggctctttgacttaagcaagttatttgagctttttagattgaatgttttcttttcataataataataatataatctttgcagggttgttatgagaattgactgacagaatgtatgcaaacacaaatttcttcatgaatattagctattatcttttttggcagaaagcatgtttttatgtactctagtaaatatttggacttaagaaatgtcttgatatacattatttatgtattagtctcttggtgtatgtctagacttattttcagatgccatttaatggctcgttagagttgatgaatttttttggtatgtgaattaccttgcccagactctacaaataattgcctcattgattccctaattgttcccgtattatttcttacttctctctgatttaaaagaccttccataatctggcctccttttcccaagcatttcttttgctttagtcaagcatgtctcttaaactatatctgattgcatataattattcttacctccatgccctattacctgttactttcttacctgaaatgctctgtttttgccattttaaatcttgttgagtttaagggccaccatttccatgaggtgctagttgactaatctatcactagtttattgtactaatactctgtaccacacagcttagctctaaattttatgctgttctttttacagttaaaatctgtgttttagacttaacttagcaagtagagacctgggtccctgtcatactaccttggtgattctcatagtccctaagatacttggctcatcagttatttcttctctcgtctcataacccttgtaatcaagcttaaatgttgctgctagcattctttacggttttatagttgatattttattgtggaaatattcaaacatatactaaagtggatagcatcgtctaaggaatgtacccatcacccagcttcaaaaattgaaataaaagattggcaagggcttcatagagaaaagcatttgagggaaagggagaagcaaggaggaataaaggaatgtctgctattgactcttgcctatgtggtggagcctgagctaggtggattctgtgcaaatagcaggcttcaaggcgcttacatagagctgctgacagggaggcttgtaggcctgccagggaagtgcgagagctggaacttgagataggtgtgtgtgactcatgtcactccgctaggttggaccttggcatatcttaggttttccatgggagaatatagtggaggaggagaagtggtggataaggattttccgggtggaagaactagcattctgaaaagcagatagaagtataggagtttttcagagactcattagtaacccagggtggctagagcttagggcttctctgttgagagatgaggctaagttctatcttatgtaggaaaatcctggagggctctgaaggcttcattaaggagtttggatattgttcgattttactttgagagccattgaaagtttctttaaggtggggagaaatgcagtcaggcctgaatgaatagtgtttctgagattgccccgtgtcccctataccttttttctgaaaacattttctatttaatcatgagggaagtgtaaactcctattttagttttgtctttgcctctgcagtgactaaccctgtgcttggtggcatgggtaaataggaaaggaaaaactttcaagtggtttttacctatttgaaagtttctttatagagtcattcagaaagtatctgtgaagtgactgtatgtttcatattttgtcttattaagtcatatgattaagtcaagatgacttaattataaggttttaaaaaaatcatttgtaaataagctctaatagagagataaattgcaaaactaaaaatagtaccaagaactcccatattgtctttacccagatcacccattgttagcattttgccacatagcttctcattggcactctctctctctctctctgcacatttttcactctctcgatctcgatctgtacatatttttttcccctgaattctttaagggttaaattacatacctcataaccctttatccccagtatgtatttcctaagaacagagatattttctcacataaaggtagtacagttatagcaacttcaaatttaatattgctgtaaaacttttatctactattcatattccagtttgaccattgccttttctgtgttctctaaactgcacaagtcccacagtcaattatgtcatagcacttagtaaatatttgattgttagcactgatttttctagcgttacagtcttaattttttgagcagttttcttacctgaagttcggtgcttacctctcccaaggtgattcgagatgtgataaatgtgcacatggaagaactcagcaatcattggcaagaagagcaagagaaggcagaggatgatgccgaaaagtacgtcattatctttattggtgaaaatactctctctttgataacagataacaattaacttataattgttaaattttagcatttccaaaacccttgatagcacacagtaaactcgtgaaaatgctttttgtttttcgttgtcagtgcccagggttattgtaccagagttgttctgacattaccctttgacagttttcaggggatagccatattagtgaaatattcaaatagcaaaacatactaacatttatgcctagtattccattatgggaacaccaagcatgtgggagttatttatgtcctactgctcaaggtcatcgccaaggtctcattgcaaaaattaaaaaaattgcaacctcaggcataaatgggttaagagctgtgtttatttgtccttttatatgggttataagattgtgcatatttagaccatatctaccattggtttgatatagaatattacactttagactggtgtgtctgtgtacgtatactggagaccagtggtaacacaaactgattaacattcttttctgtgttttaggaatgaagaaaggcgatcagcttcagtagattcacggcagtctggtggaagctatttggatgctgagtgttcacgacatagaagggataggagtagaagcccacataaaagaaaaa

SEQ ID NO: 7112 - DNA, 285 bp, Homo sapiens
tgctagactgtgagctccatgaaggcaaggtctgtatcttacttagttttatacacaaagtactttcaaatattaggctctcaaataatatcctgtctctccagggccactggtaatcaggaattaaagcttattgtattggtttggtaattttgttcatcttactatcattcagttaattaggtttaaagctacctatgacttagtccttttcttatacaaatgaaatatttgcttagtaatcctttttgattcatatgctgttttataataactatagtgctt

SEQ ID NO: 7113 - DNA, 285 bp, Homo sapiens; identical to SEQ ID NO: 7112

SEQ ID NO: 7114 - DNA, 610 bp, Homo sapiens
  SITE (595): n equals a,t,g, or c
  SITE (596): n equals a,t,g, or c
agatccccacctttttacccttctgcaaagtctcttgtaattcctaagtaatgaaatggaaagtacaaattacttaaaacaagctctgttctttttcttctggaaaacttgtgtagtttgtcctgtgtatctgtttctcatgaggagaccggctttctgtggcccacgtgaacactgagtaagaaacaaaagactgtggtctccaggacacagtgtgtgtttgtcctctgccatggttattcaccaagtggagtccagcagtttaggaatcgggaggtctcccatgatgagttgtcatcttctgaattgctgcaagtgacaccaaaggggcccccctaccagtttctcacttcccagtctcactactggatcagctcttaggagccaggagagttcactgctgtggctaggatagaaaagggcagctagtgccccagggtagatcttggaaaatattttttgggaaaaatgtaattaaggccacccctaaaatagatactgtatctggctgtactatactaacagtgatttgcctgcatgtgtttgatagagatttctaccatgtactgcttggtgctggatagtctatcacagnncaaaaaaaaaaaaa

SEQ ID NO: 7115 - DNA, 5684 bp, Homo sapiens
agaaaaaaactgaaggcacctatgacttaccttactgggaccgggcaggtaactcacgtggtctttgcatctcatttctatcagagggatgtcgctcccctacagggggcagtagtgaaaaaagagtcattctctggcccaggtgaactccccgacactgttagaacaatggcattactcttcagttctcaccatttttacccttctgcaaagtctcttgtaattcctaagtaatgaaatgaaaagtacaaatttcttaaaacaagctctgttctttttcttctggaaaacttgtgtagtttgtcctgtgtatctgtttctcatgaggagaccggctttctgtggcccacgtgaacactgagtaagaaacaaaagactgtggtctccaggacacagtgtgtgtttgtcctctgccatggttattcaccaagtggagtccagcagtttaggaatcgggaggtctcccatgatgagttgtcatcttctgaattgctgcaagtgacaccaaaggggcccccctaccagtttctcacttcccagtctcactactggatcagctcttaggagccaggagagttcactgctgtggctaggatagaaaagggcagctagtgccccagggtagatcttggaaaatattttttgggaaaaatgtaattaaggccacccctaaaatagatactgtatctggctgtactatactaacagtgatttgcctgcatgtgtttgatagagatttctaccatgtactgcttggtgctggatagtctatcacagcaaaaaaaaaaaaaaaagttggattataaaggcaagtttgtagagatatttgttatagaaatggcttaaatgcaacaggatttttctcttgatactactgtttgagatacaggtttttatttaatggtctctttggcttgccgtcacaatgaaggttggtggaaaggaatgaagcagtttcttcctgcaaaagcagtggaccatgaggaaaccccagttcgctatagcagcagcgaagttaatcacctgagtccaagagaagtcaccacagtgctgcaggctgactctgcaggtaactatgttgcagccttctggtaccaggcagagggagaaactgcttaggcttgctataaagtgctttgggatttacagttctttgatccctttcatgtttaagaaatgaattgtttcctaaaggtagaaccacttttttaaaaggtgactcttcagagagtcatttctgtatcttggatattctgtctgtaaagttgggacattgatttctaaagactctgggcattatgtatgttaactgaggcttgtggggagacccgagatgttgagaggagagcgggaaagacagaagaagccttacagtgtttatcctcttagcctagtacatacttattttaaacatttcctaatatttgaaaaaaatctctgaaattatttttcaagattaatatttattccagtaactgaatgtttcttttccaatgaaatattctgaaaataattcagaaaggaaatattcagtaaagaaatatgttgtctgtaaatctaaagaacatatgtgaaaattctatatgcaaaattacatgaatgagactttctggtatattattactatgagaagtactagacagtatgtttaattttaattttcaaagttcttacagattaagtattgatggcaacaaaagtatcctaaagaatgtttgcttttagtataatctgcagctgccaccctaaattatgcaatctctttactagtaaaatgacttttctgttgttttgtgatatccacagagtatgctcagccactggtaggaggaattgttggtacacttcatcaaagatctacctttaaaccagaagaaggaaaagaagcaggctatgcagacctagatccttacaactcaccagggcaggaagtttatcatgcctatgctgaaccactcccaattacggggcctgagtatgcaaccccaatcatcatggacatgtcagggcaccccacaacttcagttggtcagccctccacatccactttcaaggctacggggaaccaacctcccccactagtgggaacttacaatacacttctctccaggactgacagctgctcctcagcccaggcccagtatgataccccgaaagctgggaagccaggtctacctgccccagacgaattggtgtaccaggtgccacagagcacacaagaagtatcaggagcaggaagggatggggaatgtgatgtttttaaagaaatcctttgaagatgatgctgctttttacaaagcatcgttttaaagcacatggcctttttttttttaattattagtggtagtaatatatagaatgtattacataactgtcactgaagtggttggggaaaatgtggtgactgaggtacaggaaactactaatcttgccatcttgctttaaggtgttatggtggcacagttactgctcgcctgttaaatttcaaatgtcctgtttgatactactgtagaacactatttttaatacagaaaaagctccctataatgcacttcagagaaattaaaaatcacagagtatttattaccaatgctgcaggtacattaatgaactcgagatggctctgtaagcctgactggcaataacgcacggtactgttcttgaaatacctaatggcttgaaattctagtctgtttgtgaaagatgggtactatcatgatttcctcttctattcctatattcttttctggattttttttaataattagtgatataagcattgtttttattgcagccatatccacttatccatcttaagatctgtagctgggattttctgacttgtaatgagcagggggattgctttttcactttgtgacactctttagagctttaatgcttcacagtatatggcctggtctcatccttgcgtgttccacttgaggccctttggtgtcttgccccattcttgtgtttataaaatgtttgagtatttctgatgagtgatgcttgccttagtctcatgaattcagatcccttcatgtcctttaagtatgctcctcaatgtgtaaacaggaacaactttatgatttgaaagctttaaaggagattcttctcccacccccaactttatttgcaatgggatttttcctaggagagttatgaaaagttgaaggcttctaagggaatactgtaaacatgacccacttatatttatcacagtgaaaggcaaaattattcactcagaagtaatataaattacctctttaaaaagtaaccagaatttgtcctttttggttttatacattcacaaacatatacatttttcttgagtctcaaggtattttatatttttagtcagaaaaaataatttttcatttcagttttccataaactgttacacaaaatataaacctaacgtgtatttttcaggactgcgtgatcgtgcactttgtgtggtaagaggtttgagtagtcctatatgtcacctagggaacagacattatagcttcctagcaaatgaatattcatgccttgtttttgatacctcctggcagcttccatgtcaccacttgttcatacctgcccagagctagttttagacatggcaaaatagaaatcatctgtaatttattagctaacaatgtaaaaccatcttttaaagccttcagactgtcaagacgacatgagcagctcaccatatgataaaaatacataaatttgacattccctcttccataaacctttgtttgtagatttaatgttgaacagtacttttccataaagttctagtcacttctgttggcctgagccaccagattatgatgttgccagaattcactcaatttgaataaagatgaacagtatttgttttcttgtttccatgaattatatcagtattctaaaacatcgcttcagaaagagaactgtttatttctgcaggcttcctgtccttttgtggtatggttttttggccttattttcactggcttttccttctccaaactttgaggcgtgatttcattcattgaagaatcaatacatattttgtttcaaaatgtttgaaacaaaagacatagatggtagacttttattaaaacatatatggatgtggaaagcacatatattaatgcagtcatcccttttcaggtgggaagagagcaaaccagttgattttttaattcatccttagtacacagagaatatacttttcctcaagtaatatacctgtttgaagctttaagagagatgtttttggtaactatttcattttcccaaagaagtttgctattcttgtgttaattgtgtatacctgattgttttttcctggaggtttttgttgttgttgtttagttttgggtttttttttttttaagaggggcaagtgttttctgaaatgatgcatattttaagactcgattcatattgccactgtgctatccttgaactaccaataatttttataaaatatctagtttttactacttttatataaactttactttccagatgaagagctgagcctgattcaaatggtttttctgctttatacttctttttagttcattggtttttatagtagaggttttctattttttttttttttttttactacatttatatgtctgatacatatacggctttggagacaatcaagtaacaactgaaaatgtgaaagtaaccatatctgacaaaattcccttgaatttttatcctttgcttgcaacatttaagactcaaagtcactggtatattggattaagttttttcctgttaatgcaattatagaaatacatcggagacacaacaaatgtggccattacaggtttcataaaattacactgacttggctgttacttgatcttaggaaacagcacagtttaagatattgtgaattctgacttatactttattaaatgctataaatctaaatagatcctgttggatgtgatgggtctagtccagtttatttaagttcatgtttcactgtttgcactttgcattgaacaatgggtttattcgctgatgtaaacggttcgagtgaagaattaatgcagtaagtatgacaacacatacacacttgcctctccccatctccagaagaggggagcagagtccgagcttatctaaatatgaatgtggccacaaagctgtggaaggtgacaaagcttaaacacctttgccctggctctgcattgtcacctagagagcaagaggtctatagaaacatcatgtcacatgaaacgattctctgctttttggttctgaacttgaagtccctaaactgcaaaatctaagagttgggtggttattaaaatgcttttaaaaagttaactgtggcaccaattctaatgtaatccaacttgtgactgtttttttttgttttgttttgtttttgtgtgtgtgtgtgtgtggcactgggaaaagtggaaacaaacatgtattgaaatacatattggaaataaaaatggtttgagcgtcagtgatattctcccagaatgtacttatcttacctcggcatgtactgtagtcactcagtatttgtatatgttgctagaatttagattgtaaaatagtgaaattttaatgtgttcatttgtttttaatgtatatatgtcttgctcagattatttggtttaaataaaacaaccttgaggtttgtagcttttccttatactataaaa

SEQ ID NO: 7116 - DNA, 5681 bp, Homo sapiens
agaaaaaaactgaaggcacctatgacttaccttactgggaccgggcaggtaactcacgtggtctttgcatctcatttctatcagagggatgtcgctcccctacagggggcagtagtgaaaaaagagtcattctctggcccaggtgaactccccgacactgttagaacaatggcattactcttcagttctcaccatttttacccttctgcaaagtctcttgtaattcctaagtaatgaaatgaaaagtacaaatttcttaaaacaagctctgttctttttcttctggaaaacttgtgtagtttgtcctgtgtatctgtttctcatgaggagaccggctttctgtggcccacgtgaacactgagtaagaaacaaaagactgtggtctccaggacacagtgtgtgtttgtcctctgccatggttattcaccaagtggagtccagcagtttaggaatcgggaggtctcccatgatgagttgtcatcttctgaattgctgcaagtgacaccaaaggggcccccctaccagtttctcacttcccagtctcactactggatcagctcttaggagccaggagagttcactgctgtggctaggatagaaaagggcagctagtgccccagggtagatcttggaaaatattttttgggaaaaatgtaattaaggccacccctaaaatagatactgtatctggctgtactatactaacagtgatttgcctgcatgtgtttgatagagatttctaccatgtactgcttggtgctggatagtctatcacagcaaaaaaaaaaaaaaaagttggattataaaggcaagtttgtagagatatttgttatagaaatggcttaaatgcaacaggatttttctcttgatactactgtttgagatacaggtttttatttaatggtctctttggcttgccgtcacaatgaaggttggtggaaaggaatgaagcagtttcttcctgcaaaagcagtggaccatgaggaaaccccagttcgctatagcagcagcgaagttaatcacctgagtccaagagaagtcaccacagtgctgcaggctgactctgcaggtaactatgttgcagccttctggtaccaggcagagggagaaactgcttaggcttgctataaagtgctttgggatttacagttctttgatccctttcatgtttaagaaatgaattgtttcctaaaggtagaaccacttttttaaaaggtgactcttcagagagtcatttctgtatcttggatattctgtctgtaaagttgggacattgatttctaaagactctgggcattatgtatgttaactgaggcttgtggggagacccgagatgttgagaggagagcgggaaagacagaagaagccttacagtgtttatcctcttagcctagtacatacttattttaaacatttcctaatatttgaaaaaaatctctgaaattatttttcaagattaatatttattccagtaactgaatgtttcttttccaatgaaatattctgaaaataattcagaaaggaaatattcagtaaagaaatatgttgtctgtaaatctaaagaacatatgtgaaaattctatatgcaaaattacatgaatgagactttctggtatattattactatgagaagtactagacagtatgtttaattttaattttcaaagttcttacagattaagtattgatggcaacaaaagtatcctaaagaatgtttgcttttagtataatctgcagctgccaccctaaattatgcaatctctttactagtaaaatgacttttctgttgttttgtgatatccacagagtatgctcagccactggtaggaggaattgttggtacacttcatcaaagatctacctttaaaccagaagaaggaaaagaagcaggctatgcagacctagatccttacaactcaccagggcaggaagtttatcatgcctatgctgaaccactcccaattacggggcctgagtatgcaaccccaatcatcatggacatgtcagggcaccccacaacttcagttggtcagccctccacatccactttcaaggctacggggaaccaacctcccccactagtgggaacttacaatacacttctctccaggactgacagctgctcctcagcccaggcccagtatgataccccgaaagctgggaagccaggtctacctgccccagacgaattggtgtaccaggtgccacagagcacacaagaagtatcaggagcaggaagggatggggaatgtgatgtttttaaagaaatcctttgaagatgatgctgctttttacaaagcatcgttttaaagcacatggccttttttttttaattattagtggtagtaatatatagaatgtattacataactgtcactgaagtggttggggaaaatgtggtgactgaggtacaggaaactactaatcttgccatcttgctttaaggtgttatggtggcacagttactgctcgcctgttaaatttcaaatgtcctgtttgatactactgtagaacactatttttaatacagaaaaagctccctataatgcacttcagagaaattaaaaatcacagagtatttattaccaatgctgcaggtacattaatgaactcgagatggctctgtaagcctgactggcaataacgcacggtactgttcttgaaatacctaatggcttgaaattctagtctgtttgtgaaagatgggtactatcatgatttcctcttctattcctatattcttttctggattttttttaataattagtgatataagcattgtttttattgcagccatatccacttatccatcttaagatctgtagctgggattttctgacttgtaatgagcagggggattgctttttcactttgtgacactctttagagctttaatgcttcacagtatatggcctggtctcatccttgcgtgttccacttgaggccctttggtgtcttgccccattcttgtgtttataaaatgtttgagtatttctgatgagtgatgcttgccttagtctcatgaattcagatcccttcatgtcctttaagtatgctcctcaatgtgtaaacaggaacaactttatgatttgaaagctttaaaggagattcttctcccacccccaactttatttgcaatgggatttttcctaggagagttatgaaaagttgaaggcttctaagggaatactgtaaacatgacccacttatatttatcacagtgaaaggcaaaattattcactcagaagtaatataaattacctctttaaaaagtaaccagaatttgtcctttttggttttatacattcacaaacatatacatttttcttgagtctcaaggtattttatatttttagtcagaaaaaataatttttcatttcagttttccataaactgttacacaaaatataaacctaacgtgtatttttcaggactgcgtgatcgtgcactttgtgtggtaagaggtttgagtagtcctatatgtcacctagggaacagacattatagcttactagcaaatgaatattcatgccttgtttttgatacctcctggcagcttccatgtcaccacttgttcatacctgcccagagctagttttagacatggcaaaatagaaatcatctgtaatttattagctaacaatgtaaaaccatcttttaaagccttcagactgtcaagacgacatgagcagctcaccatatgataaaaatacataaatttgacattccctcttccataaacctttgtttgtagatttaatgttgaacagtacttttccataaagttctagtcacttctgttggcctgagccaccagattatgatgttgccagaattcactcaatttgaataaagatgaacagtatttgttttcttgtttccatgaattatatcagtattctaaaacatcgcttcagaaagagaactgtttatttctgcaggcttcctgtccttttgtggtatggttttttggccttattttcactggcttttccttctccaaactttgaggcgtgatttcattcattgaagaatcaatacatattttgtttcaaaatgtttgaaacaaaagacatagatggtagacttttattaaaacatatatggatgtggaaagcacatatattaatgcagtcatcccttttcaggtgggaagagagcaaaccagttgattttttaattcatccttagtacacagagaatatacttttcctcaagtaatatacctgtttgaagctttaagagagatgtttttggtaactatttcattttcccaaagaagtttgctattcttgtgttaattgtgtatacctgattgttttttcctggaggtttttgttgttgttgtttagttttgggtttttttttttttaagaggggcaagtgttttctgaaatgatgcatattttaagactcgattcatattgccactgtgctatccttgaactaccaataatttttataaaatatctagtttttactacttttatataaactttactttccagatgaagagctgagcctgattcaaatggtttttctgctttatacttctttttagttcattggtttttatagtagaggttttctattttttttttttttttttttactacatttatatgtctgatacatatacggctttggagacaatcaagtaacaactgaaaatgtgaaagtaaccatatctgacaaaattcccttgaatttttatcctttgcttgcaacatttaagactcaaagtcactggtatattggattaagttttttcctgttaatgcaattatagaaatacatcggagacacaacaaatgtggccattacaggtttcataaaattacactgacttggctgttacttgatcttaggaaacagcacagtttaagatattgtgaattctgacttatactttattaaatgctgtaaatctaaatagatcctgttggatgtgatgggtctagtccagtttatttaagttcatgtttcactgtttgcactttgcattgaacaatgggtttattcgctgatgtaaacggttcgagtgaagaattaatgcagtaagtatgacaacacatacacacttgcctctccccatctccagaagaggggagcagagtccgagcttatctaaatatgaatgtggccacaaagctgtggaaggtgacaaagcttaaacacctttgccctggctctgcattgtcacctagagagcaagaggtctatagaaacatcatgtcacatgaaacgattctctgctttttggttctgaacttgaagtccctaaactgcaaaatctaagagttgggtggttattaaaatgcttttaaagtcaactgtggcaccaattctaatgtaatccaacttgtgactgtttttttttgttttgttttgtttttgtgtgtgtgtgtgtggcactgggaaaagtggaaacaaacatgtattgaaatacatattggaaataaaaatggtttgagcgtcagtgatattctcccagaatgtacttatcttacctcggcatgtactgtagtcactcagtatttgtatatgttgctagaatttagattgtaaaatagtgaaattttaatgtgttcatttgtttttaatgtatatatgtcttgctcagattatttggtttaaataaaacaaccttgaggtttgtagcttttccttatactataaaa

SEQ ID NO: 7117 - DNA, 360 bp, Homo sapiens
tttttttaaaaaaataatttcaacttttattttagattctaagggtacatgtgcagagtgcaggttgttacatgggtatattgtgtgatactgaggtttgtggtatgaatgatcccatcatccaggttgtgagcatagtacccaatacatagtctttcagcccttgccctccccgctcccctcgctccccccgccgcagtcctcagtgtctatcgttcccatctttatgtccttgtgtacccacagcaccattctttttgaagcctgatttactttatatcaattgaacttcagcagccacactgcagcctatggctgtgtggtatgaggggaaaatcacactgattgattacatgtgat

SEQ ID NO: 7118 - DNA, 4403 bp, Homo sapiens
aaaacaatctacgaagcaggcactataataagccccgttttacagaaggagaaaatgagacacaacataaataacttgcctagttatgggcaaataacttgcctagtttatgggcataaataacctgcctagttattgcctagtacatgggcagaggggagttttggaccagacttgagagatcgtgctcttacccactgctgctctgaacacataataaataaagtataactcactgttattaaagcacagggtgtgagggggaggactgaggagtgccgctgttgagagggcagaagtcagacagagcctgaggtcagtttgggatggtgttgaaaggaccctgtggacatccagactcctgaggcaattcgaccacacacctggcgttaaggacacgatctgagctggagaattgaagttactgttaggaacgtagttgaaatcactgatgagtgtggctttatgacaaggagtaaaggagcagataccattaatatgctgtggaaaatagggaggatgagaatgataataaaaacagctgcagcttattgaatccagagctcattctaagcactttatacgtaatgaataagtaaccagaagctttgtcacttatgtgtataaaatcctttatagtacaacctatggctaatattgatgccataaatttgttgtcctagcaatatagggcatctaacttctatttagaaaagatgatttatttatttttttatttctaaatcatgtgatgattagagcattttcagggagaaaggtgtttaatcagtatttttttttatttcttttccattcaagtgtttcattaacatcttcaacactcattatcttttccacaaattttttattatgctgtactttgaaataatgaaataagtatacctacgctttaaaatgaggatgcatttagtatcaaaaatatagtcttatactggagaatgtttcccagtaggaaaagcacatggcttgggctttttatgaaaaccacatttgtggtgctcacttcggcagcacatatactaacattggaacgacacagagaagattagcatggcccctgtgcaaggatgacacgcaaattcatgaagcgttccatatttttaattgaccacatagttgaaagtaaagcactcatcagcaaatgtaacagaaaagaaattataacaaactgtctctcagaccacagttcaatcaaacaagaactcaggattaagaaactcactcaaaaccactcaactacatggaaactgaacaacctgctcctgaatgactactgggtacataatgaaatgaaggcagaaataaagattttctttgaaaccaatgagagcaaagacacaacataccagaatctctgggacacattcaaagcagtgtgtagagggaaatttatagcactaaatgcccacaagagaaagcaggaaagttctaaaattgacaccctaacatcacaattaaaagaactagagaagcaagagcaaacacattgaaaagctgcagaagtcaagaaataactaagatcagagcagaactgaaggagatagagacaaaaaacccttcaaaaaatcagtgaatccaggagctggttttttgaaaagatcaacaaaattgatagactgctagcaagactaataaagaagaaaagagagaagaatcaaatagatgcaataaaaaatgataaaggggatatcaccaccgatcccacagaaatacaaactaccatcagagaatactacaaacacctctatgcaaataaactagaaaatctagaagaaatggataaattcctggacacatacaccctcccaagactaaaccaggaagaagttgaatccctgaatagaccaataacaggctctgaaattgaggcaataattaatagcctaccaaccaaaaaaagtccaggaccagacggattcatagccgaattctaccagaggtacaaggaggagctggtaccattctttctgaaagtattccaatcaatagaaaaagagggaatcctccctaactcattttatgaggccagcatcatcctgataccaaagcctggcagagacacaacaaaaaaaagagaattttagaccaatatccctgatgaaaatcgatgcaaaaatcctcagtaaaatactggcaaaccgaatccagcagcacgtcaaaaagcttatccactgtgatcaagtgggcttcatccctgggatgccaggctggttcaacatatgcaaatcaataaacgtaatccagcatataaacagaaccaaagacaaacactacatgattatctcaataaatgcagaaaaggcctttgacaaaattcaacaacccttcatgctaaaaactctcaataaattaggtattgatgggacgtatcccaaaataataagagttatgtatgacaaacccacagccaatatcatactgaatgggcaaaaactggaagcattgcctttgaaaactggcacaagacagggatgccctctctcaccactcctattcaatatagtgttggaagttctggccagggcagtcaggcaagagaaagaaataaagggtattcaattaggaaaagaggaagtcaaattttccctgtttgcagatgacatgattgtatatttagaaaaccccatcatctcagcccaaaatcttcttaagctgataagcaacttcagcaaagtctcaggatacaaaatcaatgtacaaaaatcacaagcattcttatacaccaataacagacagagagccaaatcatgagtgaactcccattcacaattgcttcaaagagaataaaatacctaggaatccaacttacaagggatgtgaaggacctcttcaaagagaactacaaaccactgctcaatgaaataaaagaggacgcaaacaaatggaagaacattccatgctcatggataggaagaatcaatatcgtgaaaatggccatactgcccaaggtaatttatagatcaatgccatccccatcaagctaccaatgactttcttcacaaaattggaaaaaactactttaaagttcatatagaaccaaaaaagagcccacattgccaagacaatcctaagccaaaagaacaaagctggaggcatcacgttacctgacttcaaactatactacaaggctacagtaaccaaaacagcatgatactgggaccaaaacagagatatagaccaatggaacagaacagagccctcagaaataataccacacatctacaaccatctgatctttgacaaacctgacaaaaacaagaactggggaaaggattccctatttaataaatggtgctgggaaaactggctagccatatgtagaaagctgaaactggatcccttccttacaccttatacaaaaattaattcaagatgaattaaagacttaaatgttagacctaaaaccataaaaaccctagaagaaaacctaggcaataccattcaggacacagacatggacttcatgtctaaaacaccaaaaacaatggcaacaaaagccagaattgacaaatgggatctaattaaactaaacagcttctgcacagcaaaagaaactaccatcaaagtgagcaggcaacctacagaatgggagaaaatttttgcaatctactcatctgacaaagggctaatatccagaatctacaaagaactcaaacaaatttacaagaaaaaaaaacaaccccatcaacaagtgggcgaaagatatgaacagacacttctcaaaagaagacatttatgcagccaacaaacacatgaaaaaatgctcatcatcactggccatcagagaaatgcaaatcaaaaccacaatgagataccatctcacaccagttagaatggtgatcattaaaaagtcaggaaacaacaggtgctggagaggatgtggagaaataggaacatttttacactgttggtaggactgtaacctagttcaaccattgtggaagacagtgtggtgattcctcagggatctagaactagaaataccatttgacccagccatcccattactgggtatatacccaaaggattataaatcatgctgctatagagacacatgcacacgtatgttcattgcagcactattcaaaatagcaaagacttggaaccaacccaaatgtccatgaatgatagattgaattaagaaaatgtggcacatatacaccatggaatactatgcagccataaaaaatgatgagttcctgtcctttgtagtgacatggatgaagctggaaaccatcattctcagcaaactgtcccaaggacaaaaaaccaaacaccgcatgttctcactcataggtgggaattgaacaatgagaacacttggacacaggaaggggaatatcacataccaaggcctgtcatggggtagggggagcaggctt

SEQ ID NO: 7119 - DNA, 4403 bp, Homo sapiens
aaaacaatctacgaagcaggcactataataagccccgttttacagaaggagaaaatgagacacaacataaataacttgcctagttatgggcaaataacttgcctagtttatgggcataaataacctgcctagttattgcctagtacatgggcagaggggagttttggaccagacttgagagatcgtgctcttacccactgctgctctgaacacataataaataaagtataactcactgttattaaagcacagggtgtgagggggaggactgaggagtgccgctgttgagagggcagaagtcagacagagcctgaggtcagtttgggatggtgttgaaaggaccctgtggacatccagactcctgaggcaattcgaccacacacctggcgttaaggacacgatctgagctggagaattgaagttactgttaggaacgtagttgaaatcactgatgagtgtggctttatgacaaggagtaaaggagcagataccattaatatgctgtggaaaatagggaggatgagaatgataataaaaacagctgcagcttattgaatccagagctcattctaagcactttatacgtaatgaataagtaaccagaagctttgtcacttatgtgtataaaatcctttatagtacaacctatggctaatattgatgccataaatttgttgtcctagcaatatagggcatctaacttctatttagaaaagatgatttatttatttttttatttctaaatcatgtgatgattagagcattttcagggagaaaggtgtttaatcagtatttttttttatttcttttccattcaagtgtttcattaacatcttcaacactcattatcttttccacaaattttttattatgctgtactttgaaataatgaaataagtatacctacgctttaaaatgaggatgcatttagtatcaaaaatatagtcttatactggagaatgtttcccagtaggaaaagcacatggcttgggctttttatgaaaaccacatttgtggtgctcacttcggcagcacatatactaacattggaacgacacagagaagattagcatggcccctgtgcaaggatgacacgcaaattcatgaagcgttccatatttttaattgaccacatagttgaaagtaaagcactcatcagcaaatgtaacagaaaagaaattataacaaactgtctctcagaccacagttcaatcaaacaagaactcaggattaagaaactcactcaaaaccactcaactacatggaaactgaacaacctgctcctgaatgactactgggtacataatgaaatgaaggcagaaataaagattttctttgaaaccaatgagagcaaagacacaacataccagaatctctgggacacattcaaagcagtgtgtagagggaaatttatagcactaaatgcccacaagagaaagcaggaaagttctaaaattgacaccctaacatcacaattaaaagaactagagaagcaagagcaaacacattgaaaagctgcagaagtcaagaaataactaagatcagagcagaactgaaggagatagagacaaaaaacccttcaaaaaatcagtgaatccaggagctggttttttgaaaagatcaacaaaattgatagactgctagcaagactaataaagaagaaaagagagaagaatcaaatagatgcaataaaaaatgataaaggggatatcaccaccgatcccacagaaatacaaactaccatcagagaatactacaaacacctctatgcaaataaactagaaaatctagaagaaatggataaattcctggacacatacaccctcccaagactaaaccaggaagaagttgaatccctgaatagaccaataacaggctctgaaattgaggcaataattaatagcctaccaaccaaaaaaagtccaggaccagacggattcatagccgaattctaccagaggtacaaggaggagctggtaccattctttctgaaagtattccaatcaatagaaaaagagggaatcctccctaactcattttatgaggccagcatcatcctgataccaaagcctggcagagacacaacaaaaaaaagagaattttagaccaatatccctgatgaaaatcgatgcaaaaatcctcagtaaaatactggcaaaccgaatccagcagcacgtcaaaaagcttatccactgtgatcaagtgggcttcatccctgggatgccaggctggttcaacatatgcaaatcaataaacgtaatccagcatataaacagaaccaaagacaaacactacatgattatctcaataaatgcagaaaaggcctttgacaaaattcaacaacccttcatgctaaaaactctcaataaattaggtattgatgggacgtatcccaaaataataagagctatgtatgacaaacccacagccaatatcatactgaatgggcaaaaactggaagcattgcctttgaaaactggcacaagacagggatgccctctctcaccactcctattcaatatagtgttggaagttctggccagggcagtcaggcaagagaaagaaataaagggtattcaattaggaaaagaggaagtcaaattttccctgtttgcagatgacatgattgtatatttagaaaaccccatcatctcagcccaaaatcttcttaagctgataagcaacttcagcaaagtctcaggatacaaaatcaatgtacaaaaatcacaagcattcttatacaccaataacagacagagagccaaatcatgagtgaactcccattcacaattgcttcaaagagaataaaatacctaggaatccaacttacaagggatgtgaaggacctcttcaaagagaactacaaaccactgctcaatgaaataaaagaggacgcaaacaaatggaagaacattccatgctcatggataggaagaatcaatatcgtgaaaatggccatactgcccaaggtaatttatagatcaatgccatccccatcaagctaccaatgactttcttcacaaaattggaaaaaactactttaaagttcatatagaaccaaaaaagagcccacattgccaagacaatcctaagccaaaagaacaaagctggaggcatcacgttacctgacttcaaactatactacaaggctacagtaaccaaaacagcatgatactgggaccaaaacagagatatagaccaatggaacagaacagagccctcagaaataataccacacatctacaaccatctgatctttgacaaacctgacaaaaacaagaactggggaaaggattccctatttaataaatggtgctgggaaaactggctagccatatgtagaaagctgaaactggatcccttccttacaccttatacaaaaattaattcaagatggattaaagacttaaatgttagacctaaaaccataaaaaccctagaagaaaacctaggcaataccattcaggacacagacatggacttcatgtctaaaacaccaaaaacaatggcaacaaaagccagaattgacaaatgggatctaattaaactaaacagcttctgcacagcaaaagaaactaccatcaaagtgagcaggcaacctacagaatgggagaaaatttttgcaatctactcatctgacaaagggctaatatccagaatctacaaagaactcaaacaaatttacaagaaaaaaaaacaaccccatcaacaagtgggcgaaagatatgaacagacacttctcaaaagaagacatttatgcagccaacaaacacatgaaaaaatgctcatcatcactggccatcagagaaatgcaaatcaaaaccacaatgagataccatctcacaccagttagaatggtgatcattaaaaagtcaggaaacaacaggtgctggagaggatgtggagaaataggaacatttttacactgttggtaggactgtaacctagttcaaccattgtggaagacagtgtggtgattcctcagggatctagaactagaaataccatttgacccagccatcccattactgggtatatacccaaaggattataaatcatgctgctatagagacacatgcacacgtatgttcattgcagcactattcaaaatagcaaagacttggaaccaacccaaatgtccatgaatgatagattgaattaagaaaatgtggcacatatacaccatggaatactatgcagccataaaaaatgatgagttcctgtcctttgtagtgacatggatgaagctggaaaccatcattctcagcaaactgtcccaaggacaaaaaaccaaacaccgcatgttctcactcataggtgggaattgaacaatgagaacacttggacacaggaaggggaatatcacataccaaggcctgtcatggggtagggggagcaggctt

SEQ ID NO: 7120 - DNA, 360 bp, Homo sapiens; identical to SEQ ID NO: 7117

SEQ ID NO: 7121 - DNA, 2239 bp, Homo sapiens
agtgagactctgtctcaaaaaacaaacaaacaaacaaaaaattaccaatcttcaactattatcaagtcatgattatgaacattaatccttagtttgtgcttttttagaagtagtaaatataggagtttgggttggcatgcactaatccaagcatttaagtggagatttggaatgtgatgggcagttctacaggaagagaaagagagagggagggaaagcgagagatagagggggagagagaggacaacatgtttcactttgttagttgtttggatttcaggtttttgggagtagaatgtacaaccccaacagatgcaatgcggttagtttatggagtctatgcatgttttatcctggattttcagtgttatcgagggatataagtagaattattattgatttctttatgtatgaatggtaggtgagaaatacttccttgaaaggcaggcacaaaagagagtattactactctgcctgctcattcattcattttagctactcatggtgtgccaggtactttgctagtactttgtaaaacaatcttttaatccttcattttgtgattgaagaaactgaggctcagtgagattaagacaatttcccaaggtcacagagcaactggagctggttcatttccaaacctcttgtacaatttcctctgtgccatgtaacctttcctttattcatttgttctatgtgtgtatatctgtaaatcatttgtatttctttttatttaagtttgggaacacatgatatttcgttttgtcgtatataccagtaagcaaaacaaagttccaaatagatgtgctgaaactgacaaatcataaagaaaaccctaagtgtttaaatcatgaatagtcagtcccacaggaggaaggctctaggaaggaacttgtacaatgtgcctcctcctggctgctgcttcctgacgcagctggtcaaatgtaatttcagaagttttgctaaaaccttctctgaaggtgtttttagctacaggtgaaaggatgaaacatcaggaactttggcagggttgtgcagagacaaaggaagggaaggattggccctagtgtgtgagctgtgagctgctattagcccagagttttgtttagtggatacttaacctgtgtgaggataaataatacacagtttgacaggataaactgaagtcaacatggtagcttcttcttttagggttctccctttaaaaattttcttctattccccattttctttaaccactctgcgttcattttcccgtttttccccatctccctctttttcctcctgttcctgtccttttgtgtttttggaccccaatccatgttgccctcttttttatttgttttatttcttctttctacatttattctctttttttcctttcttttatttagtcctttcctttctccctcccccacaacctccttatatttcttcttcatctactctcgcttgatattttctgcaaagcgctgcctgggccccttgacctcacaagaagctctctgacgaaacgcttaagaaaaacaaggtattatgcattatcctacacattctgcaatcgccctagcaatttagtaactacagtccaatttaaaccaggcctcaaggcaacaaaaattgcaccaaatgccaactaatttaccaaacttatagaaggaatatttgggagtctattcccttcaacccatctgattcatattattgactcatttagaaaacagaaagtgaacagagacaagtttttaaggagtttggtttcatgcaaatgacttgcaattgcagcccattatttttataccacgacttcattagtcatatccctgtcagacctgtgaccagtgtcaaatgttttcaaaaagcacaccaggacaggcatggaactcatcagcctgtgtcaaaggtcgctctcattaaggagtcaaaatgaaaactttcagtgtctctaacacatcgcatagctctccctggtactcccacccccagtcctgaaatccagggccagctaagcacctccagctccccagacattcaaataagatcaagatgacagggcaagaaaatgaatagagttcttacccggctggacctcataatctggtactgattgaaacaaccagaaagctgtttgccaggtcttatagcaccatttcctgaggttaaacataacatctcaaaatgaagcaattaggggtttctccaaaacaagagtcttcagtaattaaaaaagaaaaaaaaa

SEQ ID NO: 7122 - DNA, 291 bp, Homo sapiens
tttttttttttttttttttgaggtggagtttcgctctttcgcccaggctggagtgcagcggcgccatctctgctcactgcaagctccacctcttgggttcacgccattctcctgcctcagcctcctgagtagctgggactacaggcgctcgccaccacgcccggctaattttttgtatttttagtagagacggggtttcaccgtgttagccaagatggtctctatctccagacctcgtgatccgcccgccccggcctcccaaagtgctgggattacaggagtgagcccccg

SEQ ID NO: 7123 - DNA, 558 bp, Homo sapiens
agaaagaagaaaataaagactatcatggtaggagctgattaggcccattaggtagggtttgatggtggaggaactgcttttttttgccacctgggaggtcaacttttgattatggaagcagtaggtaaagaagaacttatcgataatagtgctataaagatggacattaaggaatctgaagatcagagataagaagaaaaccatctttcccaggactcatttggacaatatggaatatcagagattcggtgctccttttcttgtttcattttgttttgaatcattactgcttttctgaagacctgttcactatgtgagcatagcctctgtgttatgatgctataagggatttccaaagaggtctgagtgatggtttcttattttccttcagaatcttcttcaagccacattctggtgttggtgttggtgttggatttgggttcctaggagacttgaaacatggattacatcctgtcaccacaatatttggctggttacagtggctttaagattgatgaacagatatttccagtatcacgtggggtaaatgtcaaggaa

SEQ ID NO: 7124 - DNA, 7231 bp, Homo sapiens
tgtactttactgctcttatactatctctgagtcagcaaatgacaagtgacagaatccacctttacacaccttcttctgttaatggtagcctctggtaagaattcacaatgacattagcaattgttaatggcaataacagcaacttttcttatccttccattctttttcaactgcaaataatgaaggctctgtttttgtttccaaatatatggcaagaaaatacttattcctttggttaatgggtaactattgttatgtccacctgcatttttaatgaaatatcttccttttaaaaatctgttttagatcttcaagttatagtttttttttttttcgagatagagtctcgctgtgtcacccatgctggagtgcaatggcactatctcggctcactgcagccaccgcctcctgggttcaagcgattctgcagtcttagcctcctgagtagctgggattacaggcacccgccatcatgcctggctaatttttgtatttttgtagaaatgggcttcaccatgttggccaggctggtcttgaacttctgacctcaggtgatccacccgccttggcctcccatattgttgggattataggcatgagccactgcgcccagccaagttatagttctaaaataagtcatcatatgatggacggaaggagccctgcattcttaccccctgtcagggagtttcatatcccagaacagtgatgggagtgagtagctgggatagattcagaaaaccaagcaatgctagaaagagcggaacagggagagccaacatctgcagatcagcggccagccatgaagctgacaggatggctgagattatagttcataaaacttagagaagcagtcttttttttttttttttttttttttccccaaatgctgcacgtagcatccaaaagtagtcttttttgagagagtggctagggacattaggtaaagagaaagcaaagatactttattgaggattaatgtcatggtagttggaaggaaaacttttagagaattttcttgggaatactaactttgcatttatatgaatgtatacagcagatctgttcagagtttaaataacctttgaacccttgttctcattatatatgtggtatattttacagggaaattatattttctttcacactttacttgttatttctctaggagaggactgctgttttttcttaaagttcataaaatagatatatttgtgtatatgaaccaaactgaaggcacttctaatgagtgtttctacatttttagggaagcaggaattgaggaacagattctccagccatggattgtggtgaatctcgtggtggctcttctggttggattatcttggctatttttgtcttataggccaggcatggatcttagtgaaggtattaaagaaaaaaaatagcataagaatatcctgaaatcttctataatggttttataaacctccttttaataggtatagcttataatattccaataacaaagacacatttaaattaaaatgatacaagaagagagaaaataaagtggtgtaacagaatgccaagagaagcagggaggagtgtctaggagggcttgagtctggaactacttaatgaggggcttctgtggcccttgtgcattttcaggaggtatttcttctcttggaacccttcaagtaatgtagaaaaagtctttgctcttcacttctcttagtctcctgctgatgaattttgaaataaatcatgctttgtctacatagcctctctgtcggacacatactcaagtcaattattcttccttctctatttggtacaaattcttaaccgttcattggctaacagtgtttagtactcttttaacatgctcagtgtgcagtgattcactcatctctagtccccagaccccttttggaacacctgaagaagaatcatcatattagcaaactgctaaccttttatgctgcttgaggaactgtttagtatttgtattgtaaattgtgtttccttggccaatgttcaacagttttacccttgaatatctttttttttttattttttatttttggagatggagtctcgctgtgtcgcccaggtcagagtacagtggctcgatctgggctcactgcaagctccgcctcccgggttcatgtcattctcctgcctcagcctcccgagtagctggaactacaggcgcccgccaccacgcccggctaattttttgtatttttaatagagacagggtttcaccatgttagccaggacagtctcaatctcctgacctcgtgatccgcccgcctcggcctcccaaagtgctgggattaaggcgtgagccaccgcgcctggccaaacatcttttatggatattttctgggtcttggttattattttattttttatttgaccaactatttacaacctatctgcctcagaagccttagcatgcagaatttcgccaacatctatgctaagtaatagtttaaatgtagaaaatgtcagctaataacattctacattgtggctgggatcaaaactgcatctggattgtgcagtattcagtctaaatatttccagaatcctgttcttttaaggccatgttagtcatacaacatgtggatttaaaaagtaagtataaaatgagatgataatacctggcttcttgcgttgttttgatgattaaatgggatgacccatttaaaatatcctggcacacatctcttgttagttccaagtccttcctctgtatctgtcccctatgtttcagatgatctgatcactgtagaattagacattttagctgtttaatgatctttgattctctaagtgacttaaatttccaggtaggattgtgtatattgtctctattacattttacttttaaggggtctataatttaaaatttaaatattttaaaatgtaaaacttgtacatttgttatcagcttaccttttaaatcatatttcactgtcaagaaatcttacttgagggctttctattagtatatattatgtcaattttttaaaggactatttataaataagctatacaactctgttggaggtactgggaaacaattttaagtatgatctgttcattttcttctccagagttaatgttctcctcagaggtggaagaatatcctgataaagagaaagaaatcaaagcctcttcataataccagctcacctttggaggaataatgacccagtatttgtcccatttttgtttttaaatgtatttttataagatgtatacatgtgtatttgtaatagattttttgattatataatactgaaacatctctcaatattatgaaaaatgttaaaattgtgtttgctgtttatgtctaaacattaatttgtctagcattatcatcttaatgacaaagggaataatgaactagaaaccagcaagtgaaagtgtttatttcctattttctcaaaacagttgtatttataactattaccttaaaaagcactggtttagaaaaagccataacttaaatagtgttataaaatatatatcaggtttaaacataaatttagcgaatatggtagaagggaaaaaagccttcatttttgacctccccttactgaataaattgaaatatgaagtttgtcttttctgaaactggcttagtgattgagtatcatgtaataattataatataatttagcttgaaagatgctctacattatgaccaataaaaagggaatgtatgttttgtttgaaaaattatataacctaaattttttacctagaagtaactaaaaagttgcttctcattataatctgtactagtggttctcatatctggttgtacatcaggatcatagagggagattttaaaaatctatgtagcaaaagaggctgagcagggcaaggctcaggggaataaaggagagacctgtgagcttgtgggctcccagttgacatctgcagtaccctttcctctgtcccttttttctgagtgacaagaaataggagtagaaattcaccatctctgttctccagctctttgtcagagaggtttctggttttccaggaaatccccctcttgagatgggtcctgcactgggaaagatctcttcagaactatatccaatggtacctcagctgttgtatatgagaccctaaagctcaagttgaggagaagactagctatgggaaaaaatgtttcaaaggctgttgagcacatcaataaaactattgagcctgccctgattagcaagcacctgaatgttatagaacagaagaggattgacaaattgatgatagagacagttgaccctgacaataggtctaaatttggagtgaacattatactgggaatctcttttgctgtttgtaaggctggagctgccgaaaagggattctccctgctgtcacagaattgtgaatttgctggcaattctgaaggcatcctgctagttccagctttcactgtgaccagcaatggttctcaatctggcaataagctggcagtataggagttcataatcttccccgtcagcaaacttcagggaagccatgctcgttagagccaaggcttagcacacttgagccgtgtcatcaaagagaaatgtgagaaagctgctgccaatgtgggggattgtggtaggctgcataatgtctcctaaagatgtccatgtcctaatccctggaacttgtgaatatactactttacttggccaaagggatttgcagatatgattaaggttatgaaccttaaaacggggacattatcctgtattatccagaagggtccagtgtaatcttatgagtccttaaaagcagagaagaaagccttttatgtctgtggtcagagaggtcagaagttatgatattgctggctttgaagatggaagagggggccatgagccaaggagagtgatgaccttgcagctgagtacggcccttggccaacaatgagcaaggaaatggatttcagtcacataaccacaaggaactgagttctatgagtatcccaaatgagcaaggaaacaaatcctcccctagagccaagaaaggaaggcagctctgtggataccttggttttggcctggtgctgcccatgtcatacttttgacatacagaactgtaagatagcaagtgtatgttgactaagctgctaaattggtggtgattgcttatggcagcaatagaaagctatatatcctagagaataaagaaggctagagctgctgtggaatgcacttgggaaagctggctacattgataatatgtaactgccatgggcatagttgcctttgtattcttccaggtctgggaagtacaacttagacttcagatctcgtaatgacccaggaggcatataaacctgagcagctagtggccctgtacaagtccttcatcagggaaaaacattgagtattccctgattaaggacttgtacagaggactctgttttccctggtgtttctggtgtgtctcaaaaattgtttgactgtgatgacagggaagtttggaagaagttcactgctaatgcatgtctccaggaagcagggaatgatctcacagtgacacttgaggcacattgctgaggccgtcgatgagaattcatgtaactttctccagcttacagtggactagattgacatgcaagctgatccagtccaattggtagggcatcatggtttctcattactcactgacttaaaatacttttattgccatcctggtgaagcactgcactgggtagataacacaggggcaccttgctgatcagagcccttggccaggtacaaagagctcagtttctaaaactctgtcatttcaataatgttataaattgaatcatacagtatgtaattttatgggattcgctttttttctgttgatctctttttttctgagtcatctcagctgttgtgtgtatcaatagttcatttccttttactgttttgtttggtttaactcattgacctattgaaggatatctgggctcattccagtctgtgaataatgctgctgtggacattcatgtgcaagtttttgtgtgaacattaagttttcatttctttaagataaatgcccaggagtgaaactgatgggttgtatgtagttacaaactgccaagctgttttccagagttggcggtaccattctaatttcccatgacaattttttgaagagtccaagctagttgctttagagtgcctcacctacattttttaattgtctgactttttcctaatgacatcacttaatttgttcctcaatctcctgaatttcctatagactggaggttaggtctggtggtttgattagattttttaaaaaaatatgacttcatctgtgatgctgtgtactttatgttgcataacatgaaccctaagaacagagtgagctgctggacagcaagtttcatggggtgcagtaattaacacaccacatagtataaatctgaaataatgacaaatgtgttaagggccttgggatattgggccatgtactctgaggagcacaaggtgaggtgcaggttcctgcccctaaagaactctatcttttgagattagcaactaacagtgtgagcccactaataggatgtgaaagttgtcaaaatcaagttctggtcattgtgttaaaaatcctaacaaatagagctggggaaggccgtgaaaggacgattttcatgcacagatgtctgataatgaggactatcattaaaagactgcacaaaaccacaccttgcacaaaggccatcacaacctgacacacacaaaaaatacttctatgaggacatttgcccagcaactccctgtccaatgtccaactggcaacatccttgttattgatccttgtagccaaggataattctctcaaaacaatcatttttgctttaaaaaccgttgtcttccttgacctccctgtatatgcacatagtttactgtggcacttgtattcttattgcaatgcctactcctgaataaacatcattttctttcagagagtctccctctctgttatttaggctgacaaggatatgccaagaagtagcttggatatagcagttaactctgcctttaggatatgtgtatggggatataagagttaactaaaagctgacctttgagttggtccttgaataaaagaagaatagattccaaaaataagaggaataaataatgatcctgagctaggagagtacattttgcagacctttggtttccatattaagaaattcagatttttatgtacaataaagaagttctggaattctctg

SEQ ID NO: 7125 - DNA, 5027 bp, Homo sapiens
tatttttattttttattttttattatactttaagttctagggtacatgtgcacaacgtgcaggtttgttacataggtatacatgtgccatgttggtgtgctgcacccattaactcgtcatttacattaggtatatctcctaatgctatccctcctccctccccccaacccacgacaggccgtggtgtgtgatgttccccccccgtgtccaagtattctcattgttcaattcccacctatgagtgagaacatgcagtgtttggttttctgtccttgcgatagtttgctgagaatgatggtttccagcttcatccatgaccccacaaaggacatgaactcatcctttttatatggctgcatagtattccatggtgtatatgtgccacattttcttaatccagtctgtcattgatggacatttgggttggttcctagtctttgccattgtgaatagtgccataataaacatatgtgtgcacgtgactttatagcagcatgatttataatcctttgggtatatgcccagtaatgggatggctgggtcaaatggtatttctagttctagacccttgaggaatcgccacactgtcttccacaatggttgaactagtttacactcccaccaacagtgtaaaagcgttcctatttctccacatcctctccagcacctgttgtttcctgactttttaatgattgccattctaactggtgtgagatggtatctcattgtggttttgatttgcatttctctgatggccagtgatgatgagcattttttcatgtgtctgttggctgcataaatgtcttcttttgagaagtgtctgttcatatactttgcccactttttgatggggttgtttgtttttttcttgtaaatttgtttcagttctttgtagattctggatattagccctttgtcagatggatagattgcaaaaattttctcccattctgtaggctgcctgttcactctgatgctagtttcttttgctgtgcagaagctctttagtttaactagatcccatttgtcgattttggctttggttgccattgcttttggtgttttagtcatgaagtccttggccatgcctatatcctgaatggtattggctaggttttcttctagggtttttatggttttaggtctaacatttaagtctttaatccatcttgaattaatttttgtataaggcgtaaggaagggatccagtttcagctttctacgtatggcgagccagttttcccaacaccatttattaaatagagaatcctttccccatttcttgtttatgtcaggtttgtcaaagatcggatggttgtagatgtgtggtattatttccgggggctctattctgttccattggtctatatctctgttttggtaccagtaccatgatgttttggttactgtagccttgtagtatagttcgaagtcagaaagcatgatgcctccagctttgttcttttggcttaggattgtcttggcaatgtgggctcttttttggttccatatgaactttaaagtattttttccaattctgtgaagaaagtcattggtagcttgatggggatggcattgaatctataaattaccttgggcagtatggtcattttcacaatattgagtcttcctatccatgagcatgtaatgtttttccatttgtttgtgtcctcttttatttcattgagcagtggtttgtagttctccttgaagagaaccttcacatcccttgtaagttggattcctaggtattttattctctttgaagcaattgtgaatgggagttccctcatgatttggctctctgtttgtctgttattggtgtataggaatgcttgtgatttttgcacattgattttgtatcctaagactttgctgaagttgcttatcagcttaaggagattttgggctgaggcgatggagttttctgaatatacaaacatgtcatctgcaaacagggacaatttgacttcctcttttcctaattgaataccctttatttctttcccttgcctgactgccctggccagaaattccaacaccatgttgaataggagtggtgagagagggcatccctgtcttgtgccagttttcaaagggaatgcttccagtttttgcccattcagtatgatattggctatgggtttgtcataaatagctcttattattttgagatacgtcccatcaatacgtagtttattgagagtttttagcatgaagggctgttgaattttgtcaaaggccttttctgcatctattgagataatcatgtggtttttgtctttggttctgtttatatgctggattatgtttattgatttgcatatgttggaccagccttgcatcccagggatgaagcccacttgatcatggtggataagctttttgatgtgctgctggattcggtttgccagtgtttcattgaggatttttgcatcgatgttcatcagggatattggtctaaaattctctgtttttgttgtgtctctgccaggctttggtatcagaatgatgttggcctcataaaataaatttgggatgattccctgtttttctattgattggaatagtttcagaaggaatggtaccacctcctctttgtacctctggtagaatttggctgtgaatccgtctggtcctggagtttttttggttggtaggctagtaattattgtctcaatttcagaacctgttattggtctattcagggattcaacttcttcctggtttagtcttgggagggtgtatgtgtccaggaatttatccatttcttctagattttctactttatttgcatagaggtgtttatagtattctctgatggtagtttgtatttctgtgggatcggtggtgatatcccctttatcattttttactgtgtctatttgattcttctctcttttcttctttcttagtcttgctagtgatctatcaattttgttgatcttttcagaaaaccagctcctggattcattgattttttgaaggtttttttgtgtctctatctccttccgttctgctctgatcttagttatttcttgccttctgctagcttttgaaagcatttgctcttgcttctctagttcttttaattatgatgttagggtgtcaattttagttctttcctgctttctcttgtgggcatttagtgctataaatttccttctacacgctgctttaaatgtgtcccagagattctggtatgttgtgtctttgctctcattggtttcaaagaacatctttatttctgccttcatttcgttatgtacccagtagtcattcaggaagaggttgttcagtttccatgtagttgagcagttttgagagagtttcttaatcctgagttgtagtttgattatgctgtggtctgagagacagtctgttataatttctgttcttttacatttgctgaggagtgctttacttccaactatgtggtcaattttggaataagtgtgatgtggtgctgagaagaatgtatattctgttgatttggggtggagagttctgtagatgtctattaggtctgcttggtgcagagctgagttcaattcctggatatccttgttaactttctgtctcattgatctgtctaatgttgacagtggtgtgttaaaggctcccattattattgtgtgggagtctaagtctctttgtaggtctctaaggacttgctttatgaatctgggtgctcctatattgggtgcatacatatttaggatagctcttcttgttgaattgatccctttaccattatgtaatgtccttctttgtctcttttgatctttgttggtttgaagtctgttttatcagagactagcattgcaacccctgctttttcttgttttccattggcttggtagatcctcctctatccctttattttgagcctgtgtgtatctctgtacgtgagataggtctcctaaatacagcacactgatgggtcttgactctttatccaatttgccagtctgtgtcttttaattggaccatttagcccatttacatttaaggttaatattgttatgtgtgaatttgatcctgtcattatgatgttagctggttattttgctggttagttgatgtagtttcttcctagcatcaatggtctttacaatttggcatgtttttgcagtggctggtaccgattgttcctttccacgtttagtgcttcattcaggagctcttctaatgcaggcctggtggtgacaaaatctctcagcatttgtttgtctgtaaaggattttatttctccttcacttatgaagtttagtttggctggatatgaaattctgggttgaaaattcttttctttaaaaatgttgaatattggcccccactctcttctggcttgtagagtttctgccaagagatctgctgttagtctgatgggcttccctttgtgggtaacccgacctttctctctggctgtccttaacattttttcctacttttcaactttggtgaatctgacaattatgtatcttggagttcctcttctcgaggagtatctttgtggcattctctgtatttcctgaatttgaatgttggcctgcctcgctaggttggggaagttctcctggataatatcctgaagagtgttttccaacttgattccattctctctgtcactttcaggtacaccaatcagagatagatttggtcttttcacgtagtcccatatttcttggaggctttgttcatttctttttattcttttttctatcaacttctcttctcacttcatttcattcatttgatcttcaatcactgataccctttcttccacttgatcaaatcggctactgaagcttgtgcatgcgtcacatagttctcgtgccatggttttcagctccatcaggtcatttaaggacttctctacagtgtttattctaattagccattcatctgatcttttttcaaggtttttagcttctttacaatgggttcgaacatcctcctttagctcggagaagtttgttattactgataatctgaagccttcttctctcaactcgtcaaattca

SEQ ID NO: 7126 - DNA, 9456 bp, Homo sapiens
ggcgcacgccagtaatcttagctacttgggaggctgaggcaggagaatctcttgaacttgggaggcggacattgccgtgagctgagatagtgccactgcgctctagcctgggccaaagagtaaagatctgtctcaaaataaataaataaataaaaaataaaaacaacaataaatgactgtgtgtccttaggcaaggcacttagcaactcttgagcttgttccatctgtaaacccaggacgttagtgattctccctctagtggatgaaatgaagcaatgcagatagagccctaatgcagggtacctgcgagtcgctgcagcagctgtggcaattgtcaccttcatccaggcccatcccgctttgagggcctagagagagtgggccagaggttaacccccgattcatctgcctccccacgctgggcatctgggtgtgccagggcattcccccgctggtcagacaggtttttgggccagggcggggctgaccagggttaattagagggaactggctaggaggagctggggagggggctgggcagagtccaggcctccagagcccctgggacacagcaggtgtgtgctgccatgggccggggcttgaactctgccagactcaggcgccaaaaacggcgcttgcgacctcaggtccagaagccccggcagcagctggaggtgagtggtcatcagagatccccccaccccaacccttgccccgggcccacgcgtcctgtctgctcggaaccttccctctaaatctctgggtcttgctcacgcttcctccctcactctcccttgcttttgtgtctgtcttggacacaaggcccccttaggctttctccctaggtgtctgtccctccatcgccatctctctgtgcctgcccagtctcatcggtgcctctctgcctctgtccctctgccctggcccccacagcggctccagcaggagaaccatgagctccggcgaggcctggcagcccgaggagccgagtgggaggcccgggccgtggagctggagggggacgtggaggccctgcgggcccagcttggggagcagcgctcagagcagcaggacagtgggcgagaacgggcacgggccctcagcgagctcagcgagcagaacctccggctcagccagcagctggctcaggtgggatggccctgaccccagggccctggacaaggttggggaggatgcctgggtccccagcggggagtaggtgcattgggcttggtgctgaggctcctctgtccctctttccacctccccaggcctcccagactgagcaggaacttcagagggaactggacgcccttcggggacagtgccaggctcaggcactggctggagcagagctgaggacgcggctggagagtctgcagggggaagtgagtgtcagctggggctgggggattatctgagccaaaaaagccgggctgagggctgggaggggctgcccctgtccccagctctcaggcctttccccagaaccagatgctgcagagccgccggcaggacctggaggcccagatccgaggcctgcgtgaggaggtggagaagggtgagggcagactgcagaccacccacgaggagttgctgctgctgaggcgggagcggcgggagcacagcctggaggtgacctgcagggctgggggactacaactgcctggacccttagcaatggcttcagggctttctgggagatgaggccggagctggatcactgggaggcccagaggctggcccacaagagcatgggcattagcccatgggcaaatgggagccacggaaggctgttgagcaggtgaggcatgctcttagagtgcatcagagcctggcagctggaagagcagggagggggctggtgccagagctcaggccaggaatgacagcccctagaccacggctgcgcaatggagacggagaaaaagaaatgaaaagaggatgcggtgtctgatgttagagatcaaaggagtctgcactttggggtcagcttgccttccttcgcatcccggtgccccttcttacttactactgtgggacaagcagcctcagtagcaccaataaatgctgcatgaaacaattactgaatgaggaggtagactgggcaggggaggagatggggctcttcgaggtgcggccctgctctataggcgaggaaactgtatatatccgctgagggaggtgcacggcccaaggcgcccagcgatccaggaacgggaacagcctgggccgctggggtgcggggctctccgcggcacccccgtgtggacctgccgcgggatgtcggcgttgcgtgcgtcccgctgaccgcccgcgcttccgtctgcgggaccgtccacagctggaacgcgcacggtcagaggctggggaggcgctgagtgcgctgcggaggctgcggcggcgcgtctccgagctggaggaggagtcacgcctccaggacgccgacgtgtcggctgcctcgttgcagtcagaactggcccacagcctcgacgacggcgaccagggccagggcgccgacgcacccggagacaccccggtgagctcgtggggccccagcccccttacctgtgccatcgagagggttgcaggctccgcctttcctcctttccccaataaactccacaccactaacccatttctttggcccacagaccacccggtccccaaagacccgaaaggcgtccagcccccagccttcacccccggaagagatcttagagccccccaagaagcgaacatccctcagtccagcggagatactggaggagaaggaggtggaagtggccaagctgcaagatgaggtggggcagagggcacggtgctggatgcacggcccctccagctgtcagtttctgtctcccatgtccacctcccagcctttgcccactaagctccctatacctggatcggctttcatctcaacaaacttacttcaagagccagcctgtatgccacctcctccaggaagacttcctggacagcacctctgcccttagttccactcccaatgcttctccctgcatccctcctgcagggttataccactccaactaaccctgctccaccccaccccgcaccagcctgaggggctcagagggctcatatcggagtctccagcacagggccacggctgcctggggtgtctgtcgcaggcagaggaggggtggggagagccagagtcggggctgctgggagaagcagggaggcccattggcccatctgccgcacggcccccctcctctgctcacagatctcgctgcagcaggcagagctgcagtccctgcgggaagagctgcagaggcagaaggagctgcgggcgcaggaagaccctggggaggccctgcacagtgccctctcagaccgggacgaggccgtgaacaagtaagcctcaagccattgaccaccgccccagcgccctctgggccctcctgggctcctgattcctcttctgatacgggttatgatccccactcccacccaggggccccctgacctccttgatctaggtgtttgcagccctcctcccgcccgggtccagaagtcccccgccaccccggctccctgaggccctagcgccctcaaacgcgtcttctgctcctgcccgcctagggccctggagctgtccctgcagctcaaccgcgtctcgctggagcgagactccctgtctcgggagctgctgcgcgccatccgccagaaggtggcgctcacgcaggagctggaggcctggcaggtgaggggcggggcccgtgtgcggggcggggcaaggggcgggaccggcgctgagccgaccacggcctcccgcaggacgacatgcaggtggtgatcgggcagcagctgcgctcacagcgccagaaggagctgagcgcctccgcgtcgtcgtcgaccccgcgccgtgccgcgccccgcttctcgctgcgcctgggccccgggcccgccggtggctttctcagtaacctcttccgaaggacctgacggctgggcccagagggctgcccttgcccacttaggggctcactttcctcttcaggccaatggagcgacagggcccagattgtcttccaaaagaagctgatgccctccccgccccaggatgctgggcaagggctcatcgggagcaggggctcatccggagcaggggccagctttgtggggcaggagctccaggtgggtggcaggggcaggtgaacagagctattttccgaattaatataggtctatcttttctagggcagggatggggctgggtatttatgtatcaagatcggacagagtaatatataaatcactccaccgatttggcccccattcatagaaagaaagagcatggtaaaaaagcctgaaactttattgtaaaaaaaaaaaaaaaagaaaatgaaaaacactctaaaaccctgagctggctgggggtgtcgtcagagatcagaaggacagggagaaggctcggtaacccaggttggtgaagacatccacccggcagctgttgcctgcagctgtcaggacctggaggaaagaggggcatgactggcctgcccacacccctgcctcccagccgctccgcggcccctgccggacccaccttgcactcaggcgcggcaggctgctggttgaggctgaggctgagcagccctggggaggagccaggcacctgggccttcagctccccgctcagctgccactggttgacgcagcggccctggccagctgacagaatctgcagaggacagggaaggtgctcaggggtcaggactgaagggaagagtcagtgggggtggcagaagtgagacacagggcctcaccaggtcctggtagaaggtgacgtgcttctgtggcgcccggatggggaagatggtggtgggtgtggaggatcggaggtgccagagggtgagggctgggccccctccacagacctggacagaaaggtgggagtccccagctgtgaaccacaggcccacagctgacagggcccggagctgccatcccatcccacagtctgcccagctcaccatccagtcggaatcagttgccaaacatccaatccagcgcccattgtggggcctcgagcactcctgggatggggaggggaggagggaaagaggtgaagacctggagaattcaaggagttgggggagaagaggacaatggccacggtcacaccctcacctcgtgcttatagacctcgatcgtctggacctccttggctgtgcgcaggtctgcggggaaagaactgtgagtggtgccccacttgcctcagcctccttcactgccatcttgccctccaaccagccacctgcttaccccaaagtcgaacagctccatcctcgccacctgacagcacctctgggctcctttcccgcagtgccaggcagtggatgtagtctgtgtggccccggaggaccctctgcatgtagaggggcgatgtcaggaggagacctaggaagagtgcctctccctgacctagacctgctctagggctccaggaccctgctcaccgtgaaagtcccagtttcaaggtccatagtgtgcaactgacagtctcccccagccaggatgagggaattctcctgtggaggagcaggatgaggcagaaagtcaatgtcaaatcaggataggcagagggtgaaggatcaaagtttggaccaagaacagtcacatggggctcagaccttggggaccagcagcaaagcgttgatctcaggcacttccaggctggtcctggggaaggaaaggcaaggtcagtgaggaagtggcttcaccctgatgcaccctctatccacgtggccctgctcacctgtatggaggctgacgacgccacagctccttacagcccttcaaaagagaaaataccaggtgacctcaaaggctctctctgggtccaggcaccccagccctttcccaagctcgactccttaccttcttgagcatctccgcccaaagccaggccttcacctccccatccccagcactaagcagatgtcgatcggtggaaaccatgctatagacgggcccatcatgggctaaagagaaatgcagaactgagtgagccaatcccacccaaagtcctgaagccagactccacagctatacccaccttggaaagtcaccaccggcttcttactttcctctttggcttctgagctcaaagcagaggacaagctgcagggacagcggaggggacccaggagtcagaaacgggggcatccgtcccatgagggccaagtgccagggctaatgggtggacagcggcagagggtacctgaagatggcaatctgcccgtaattgttgccagccgccagaaacttcccacatggtgagacgctctgggagaagatggtcatatggagccgctgcaaggcctggaacacctctgtctgcaggaaaagactggatgaggcctgcctgggacgtatgaaacctcccatccacagattcctccctgcttccccgaaaacctgccaggcctcccactgtcctgacttctcagccttcttttgaggcggccccgccccaagccagcacctgcccatgcagtcccatgggtggctccaagaagacactgaagaaggggagagttgaggtgatgcctcagggacctctgagcaagcacccaggcctctcctgccagcttcctcaactgacaaatggagctcacagaagattccatcacaattagatgagctagtgtatagacaagagctttacatggggctgtcactcagtgcttaagccgggtgtggtggttcatgcctgtaatccagcgctctgggaggccaggagtttgagagcagcctgggcaacatagtgagactctgtctcaaaaaaaatttaaaaatgtggggccgggcgcagtggctcacgcctgtaatcccagcactttggcaggccaaggcaggtggaccacctgaggtcaggagttcaagaccagcctgaccaacatggagaaaccctgtctctgctaaaaatgcaaaattagctgggagtggtggcgcatgcctgtaatctcagctactcaggaggctgaggcaggagaattgcttgaatctgggaggcggaggttgcggtgaacccagatggagccactgcactccagcttgggcaacaagagtgaaattccatctcaaaaaaaaaaaaaaaaaaaaatttggccgggcgtggtggctcacacctgtaatcctagcactttgagaagccaaggcaggcagattacctgaggtcaggagttcgagaccagcctggtcaacatggtgaaaccctgtctctactaaaaacacgaaaattagctgggcatggtggcacacgcctatagtcccagctacttggagggctgaggcaggagaatcgcttgaacctgggaggcggaggttgcagtgagctgagatcgcgccactgcactctagcctaggtgacagagtgagactctgtctcaaaaaaaaaaaaaaaagtgctttgcaagaactagaaaattaaaaaaaaaaaaaaagtacctctactaccccaacatagaaaaacgtactgatttataattcctactctctgacttgcgttaagcccctgaagcacttctgggttactatcccgcccccctggtcagagtctgagtcccacaaatagcccaggcaaaacagggctcagggcacgattccctgcccgccccgtcccagccatgcgtgaactacaaaccccagaaggcaacgcgcaccacgtccgtctcacctgacccagaggcaccgcgagcggcacagctcgctccatctccagaactacaagtcccagagtgctccgcgcgcgacgcaacctcacgaggccttacgtgcctagagcggttcctctccgtggcgccctaccgccttcggcgcgaaggtggctggtgcgtaccgtcccgaaccctaggagccgaggtgagcgccgcgaagacccccgacattaagaagtggtgtccaccgcagcccccttaagccggataccctcccccaccccgaggagcaagcctgccttccgccacgcgccgcccgtcttccgcgcccgcgcagaacctcgcggctgtgcccgcctaaagccacgcccatcctctcttggccacgccctcagagactcctcccctgtcgcccagatcccacccgcaggaccccaaaacccaatgatcctgcagcagcccttgcagcgaggcccccagggaggggcccagcgcctcccgcgggccgccttgggggtgacttggggcctggacgccaggtgcgtgtaggggaccagggtgggcctgaccaagggccgcaggagctttggctgggtgctcaggactggtctgcaggatgaatacggggtggggcgaatcggcggggcttaggcgtgagctgagatgggactggggctgcggctgagggtcgagacttccgaggtaccctgctggatggtccaggagagcggggaccggcaccagctgagacaggaatgggcttggggctcctggctgatgctgcaggcttaggcgggcagatccttgggaaggggccaagagggtggggtgcaccaggctctctttttttcccagctcccctctccgaggagctgtgcccatgagcaccaagcggcgcctggaggaggagcagtgagtttgggggcagggagggactcccaacaagatctctgtcacctctggtccccaacaggctgcctcctgtgtcagtatcccagcctgcctctctgccatctctccccagggagcctctgcgcaagcagtttctgtctgaggagaacatggccacccacttctctcaactcagcctgcacaatgaccacccctactgcagcccccccatgaccttctccccagccctgcccccactcaggtaggttcctccactggccaggccttctgcagaatcacaggcggtcctcacagctgacctcaggccctgcctcatcgtgccatttttagctctagctgacctctgggttgtttcccatcttggctctttggaaagtgctgggaacccaggagcccctggggacctggacctggtgggaggtgctcagctaggccagcctcagctccatgccctgacagtcatttcctcttctaggagcccttgctctgagctgcttctctggcgctatcctggcagcctcatccctgaggccctccgtctgctgaggctgggggacacccccagtcccccctaccctgcaaccccagctggggacataatggagctctgagtgctggtggacagtgcccctcccaccttccttcttccccacaacagaagagaccagcgactcccgcaaagggacaaggttcctccctctcctgcagagtaggcatctgggcaccaagaccttccctcaacagaggacactgagcccaacggagttctgggatgggaggggtgggagcatgggaagggaggcatcccacccccaagaagaactgaataaagattgctgagcaaaggaag

SEQ ID NO: 7127 - DNA, 246 bp, Homo sapiens
gtccatgccctctggactctaagctgcttgaagcagtgaacttggtggtctcacgtgccgctgacagcagaccccagaacaagtggagctcaggaaatgtgggaggattgatagcagtgtgggtggatagacttagagatattgtgtccaggccacaaggcatcagcagagccgagcatcagccaggacaatctgaccctgaacctgacaacttaatcctgaagctgtgttgcctctgcagtattc

SEQ ID NO: 7128 - DNA, 2038 bp, Homo sapiens
tttaaagttaaagattcttttattaataaattctccctcccctccaaactctccccaaaataaatatctcctccccgctttggggagttgggggggtctgtatcttagggccagccctcctagtgggccagccccctagtgttaaaaataggtccctaaccccccagggtgacccccgtggtggaatttcaggacatctgagtgagtggggcctagtgtcaagtctgccccccaagtcagcctggcccccagggcctctaggaaggagggcacccccctcccctgtgcaaatgctgcagttccttagtcagtgtcagctgttttgtgtgagccagcgtgaggctccctttctgttctggagccagaggcagggcaaccagacaccttggaaggttcccctgaaccctgggcccaggcctcagaggtgattcaccgccccccaccccccttgtggttggaggagcttggctcccgccgcgtctgggaggcagagactggctctagaatggatgaatgaatgatgagtgggcgagccccggctggcagggggcacattgtcactggatcagcgccacagctgggcagccctctccgccggtctcctctatgggggctgcaagataagaggtggggtcgtcagcagcagagaaaaggtcgagtgctgacagggctgggcaggccagggcacacttactggtgaacttctctctcctgcggcatcgtctccagaccaaaaagccagaaagcagccccagcacgaaggtcaggctcagagcgcccccaaggatgggccaaagcagccggaagggggcaggaggtgctgcagcgcctgggggcgggactcggagtcagacctcgcccctctccaggccagccccgccccctaagactgagccttctgccttctcccaaacgtggcctcctccctgaccggagccccctcccagctcccacctcctcccgattgatttcccagatgcaaagctctcggccccgctctgcgcaccagccaccctccctcccagtctggggtccgctggccactggccctgccccccactcacagcccaggcagaagtcgctgtgcggtcgcgccctgcaagacgcgcagtccatgcacttgtccaggtccgcgctccaggagctgccgcgggagcagggggcggtgcctggggagggggcctcgggtcagaggctgggggcgggactcggctattctggggtctgaggtcagggtcggccggctcgaataacgtgagtcaccggcgccctccccgcgcattcctcacaggtgaccgcacggcccgaccgggacacggcagctccgggagggagggcgtagcgcgggacgctgggggtggggggggtcaggtccccacaacccccctgccgccggcgggtgactcactcctgggcaccgggcccgaccccagtccctccccccgcatagctgggcactgaagtcaccggatggaagggggcaccccacatggtatagagggcacagaccctagtgcctctcgacggcctccccaactcgtcgatcactggggctagttagaccctgtacggaccaggctgggggcgtgccccttcctagactaaacatcccgccctcactcactttctctctccattcgaagtacttcggacttgtggaactgaagacccccccaaccccaattggacggtgggagaaactgaggcccggattgtgaatgaagcttggagagtgatggaacttcccacagccgggagcgagctgtttgaaggccacctgaccccagatccccacatccgcctgttcccccagttcggcgctgttctccagacacccagtccggctcccgagccccggcccggggttccccgaccccggagtcccgcgtacctggcgcttgctccccggccacggagcgcagcaacgccagccagagccccagcacgaggagccgcagcaaccggcgcagcgagccccgagccatagtgcacgtcctgcgcccgccgctgtctgcgcccgccgccggccggcagggac

SEQ ID NO: 7129 - DNA, 2692 bp, Homo sapiens
gttggccagttctacttcttaatccggaagagaatccacctgagacctgaggacgccttattcttctttgtcaacaacaccatccctcccaccagtgctaccatgggccaactgtatgaggtaatggttctggttgcacaatactggatgccgtccagtgcagtctggcatcctctagcccttgttctagatgcgttgataacacatctgagaagtggggcagaaggtgttatttatccggatcctcttacatatggcagtgtaaggctctgagagattagataccacttgttttttagggattagccactctactagatttaatccttctgaaatcttgtctgactatagtcttgtctgactatagtgttttaatgctggactgtttattgaaacagcaggaagtgattcctgatagcaaaagttccaaagcgtcagccatcgcagttcctgctattctggttggtagcatgtaatttgtaatgcattcagaatccagttcattattttactcccatttagcaacagattgagaaagcacgtaatagtaaagccagctccttctaactctgaggccagcctctgccaactgaaggattctccccacagtcagcttcttctatgaactctgaagttttggcttaagacaaccacattgatactaaacaaggggaaacttttcttagaacaaaactaaaactgtgaaacagattccacattatctgggcacaatgaatcagataaaatgaaatataaaattaaggcaaagtctgtaaatggattcatgtcttaacagataaactcaggaggaataatttttatgtgatgtggtttaattggaagtgtcagaatctgaggaaactatagtgaaggactttattattactgaaaatataacctgggattataactattgttttttgcagtattttgcataagatgcttccttctcattgtgctccgttaatgaattacgtaaacttctaataatcctgaatcttttattcatagcatatattccctggtagtatatgttctattataaaagcatctgtggtatctaagttccccttgctaggagtgagctctttaagagtgaggactgtgccctagtcatcttcatatccctgatacctatgtgtaatatgttttcaatgaaggatttttgtttgtgaactcagagctcaaagtgtaattccaaccacttctccctatcctttgctcctcttttaaatggggactaatgataccttccatacctgctttacaaggttgtgtgaggctcagcatcttagagctaatgaatgaatatgttttctaaactgttgtcttatctcttcccctaggacaatcatgaggaagactattttctgtatgtggcctacagtgatgagagtgtctatgggaaatgagtggttggaagcccagcagatgggagcacctggacttgggggtaggggaggggtgtgtgtgcgcgacatggggaaagagggtggctcccaccgcaaggagacagaaggtgaagacatctagaaacattacaccacacacaccgtcatcacattttcacatgctcaattgatattttttgctgcttcctcggcccagggagaaagcatgtcaggacagagctgttggattggctttgatagaggaatggggatgatgtaagtttacagtattcctggggtttaattgttgtgcagtttcatagatgggtcaggaggtggacaagttggggccagagatgatggcagtccagcagcaactccctgtgctcccttctctttgggcagagattctatttttgacatttgcacaagacaggtagggaaaggggacttgtggtagtggaccatacctggggaccaaaagagacccactgtaattgatgcattgtggcccctgatcttccctgtctcacacttcttttctcccatcccggttgcaatctcactcagacatcacagtaccaccccaggggtggcagtagacaacaacccagaaatttagacagggatctcttacctttggaaaataggggttaggcatgaaggtggttgtgattaagaagatggttttgttattaaatagcattaaactggaattgacaagagtgttgagcatccctgtctaacctgctctttctctttggtgccccttatctcaccccttccttggaatttaataagtctcaggcatttccaattgtagactaaaaccactcttagcatctcctctagtattttccatgtatcaggacagaggtgtcttatgtagggagggggcaagtatgaagtaaggtaattatatactactctcattcaggattcttgctcccatgctgctgtcccttcaggctcacatgcacaggaatgctacatgatggccagctgcttccctccttggttatcatccactgcagctgctagttagaaaggtttggagggatgacttttagtaaatcatggggattttattgatttattttcacttttgggattttgtggggtgggagtggggagcaggaattgcactcagacatgacatttcaattcatctctgctaatgaaaagggttctttctcttgggggaaatgtgtgtgtcagttctgtcagctgcaagttcttgtataatgaagtcaatgccatcaggccaaggaaataaaataattgcttaccttaaaaatcca

SEQ ID NO: 7130 - DNA, 2694 bp, Homo sapiens
gttggccagttctacttcttaatccggaagagaatccacctgagacctgaggacgccttattcttctttgtcaacaacaccatccctcccaccagtgctaccatgggccaactgtatgaggtaatggttctggttgcacaatactggatgccgtccagtgcagtctggcatcctctagcccttgttctagatgcgttgataacacatctgagaagtggggcagaaggtgttatttatccggatcctcttacatatggcagtgtaaggctctgagagattagatacctcttgttttttagggattagccactctactagatttaatccttctgaaatcttgtctgactatagtcttgtctgactatagtgttttaatgctggactgtttattgaaacagcaggaagtgattcctgatagcaaaagttccaaagcgtcagcccatcgcagttcctgctattctggttggtagcatgtaatttgtaatgcattcagaatccagttcattattttactcccatttagcaacagattgagaaagcacgtaatagtaaagccagctccttctaactctgaggccagcctctgccaactgaaggattctccccacagtcagcttcttctatgaactctgaagttttggcttaagacaaccacattgatactaaacaaggggaaacttttcttagaacaaaactaaaactgtgaaacagattccacattatctgggcacaatgaatcagataaaatgaaatataaaattaaggcaaagtctgtaaatggattcatgtcttaacagataaactcaggaggaataatttttatgtgatgtggtttaattggaagtgtcagaatctgaggaaactatagtgaaggactttattattactgaaaatataacctgggattataactattgttttttgcagtattttgcataagatgcttccttctcattgtgctccgttaatgaattacgtaaacttctaataatcctgaatctttttttgcatagcatatattccctgttagtatatgtcccattatatatccatctgtggtatctatgttccccttgctaggagtgagctctttaagagtgaggactgtgccctagtcatcttcatatccctgatacctatgtgtaatatgttttcaatgaaggatttttgtttgtgaactcagagctcaaagtgtaattccaaccacttctccctatcctttgctcctcttttaaatggggactaatgataccttccatacctgctttacaaggttgtgtgaggctcagcatcttagagctaatgaatgaatatgttttctaaactgttgtcttatctcttcccctaggacaatcatgaggaagactattttctgtatgtggcctacagtgatgagagtgtctatgggaaatgagtggttggaagcccagcagatgggagcacctggacttgggggtaggggaggggtgtgtgtgcgcgacatggggaaagagggtggctcccaccgcaaggagacagaaggtgaagacatctagaaacattacaccacacacaccgtcatcacattttcacatgctcaattgatattttttgctgcttcctcggcccagggagaaagcatgtcaggacagagctgttggattggctttgatagaggaatggggatgatgtaagtttacagtattcctggggtttaattgttgtgcagtttcatagatgggtcaggaggtggacaagttggggccagagatgatggcagtccagcagcaactccctgtgctcccttctctttgggcagagattctatttttgacatttgcacaagacaggtagggaaaggggacttgtggtagtggaccatacctggggaccaaaagagacccactgtaattgatgcattgtggcccctgatcttccctgtctcacacttcttttctcccatcccggttgcaatctcactcagacatcacagtaccaccccaggggtggcagtagacaacaacccagaaatttagacagggatctcttacctttggaaaataggggttaggcatgaaggtggttgtgattaagaagatggttttgttattaaatagcattaaactggaattgacaagagtgttgagcatccctgtctaacctgctctttctctttggtgccccttatctcaccccttccttggaatttaataagtctcaggcatttccaattgtagactaaaaccactcttagcatctcctctagtattttccatgtatcaggacagaggtgtcttatgtagggagggggcaagtatgaagtaaggtaattatatactactctcattcaggattcttgctcccatgctgctgtcccttcaggctcacatgcacaggaatgctacatgatggccagctgcttccctccttggttatcatccactgcagctgctagttagaaaggtttggagggatgacttttagtaaatcatggggattttattgatttattttcacttttgggattttgtggggtgggagtggggagcaggaattgcactcagacatgacatttcaattcatctctgctaatgaaaagggttctttctcttgggggaaatgtgtgtgtcagttctgtcagctgcaagttcttgtataatgaagtcaatgccatcaggccaaggaaataaaataattgcttaccttaaaaatcca

SEQ ID NO: 7131 - DNA, 776 bp, Homo sapiens
agtgtgtccggaattggtgggtttttggtctcactgacttcaagaatgaagccgcggaccctcgcggtgagtgttacagctcttaaggtggcgtgtctggagtctgtcccttctgatgttcagatgtgttcggagtttcttccttctggtgggttcgtggtctcgctggctcaggagtgaagctgtagaccttcgcggtgagtgttaacagcttttaaggtagcgcgtctggagttgttcgtttctcccggtgggctcgtggtctcgctggcttcaggagtgaagctgcagaccttcccagtgagtgttacagctcataaaagcagcgtggacccaaagagtgagcagtagcaagatttattgcagagcaaaagaacaaagcttccaccttttggaaggggacccaagcaggttgccaatgctggctggggctgcctgcttttattctcttatctggccccaaccacatcctgctgattggtagagccgagtggcctgttttgtcagggcgctgattggtgcatttacaatccctgagctagatacaaaggttctccacgtacccatcagattagttagatacagagtttccacacacaggttctccaaggccccaccagaggagctagatacagagtgtccattggtgcattcacaaaccttgagctaaacacagggtgctgattggtgtgtttacaaaccttgagctagatacagagtgccgattggtgtatttacaatccctgagctagacataaaggttctccaaggcccca

SEQ ID NO: 7132 - DNA, 900 bp, Homo sapiens
agtgtgtccggaattggtgggtttttggtctcactgacttcaagaatgaagccgcggaccctcgcggtgagtgttacagctcttaaggtggcgtgtctggagtctgtcccttctgatgttcagatgtgttcggagtttcttccttctggtgggttcgtggtctcgctggctcaggagtgaagctgtagaccttcgcggtgagtgttaacagcttttaaggtagcgcgtctggagttgttcgtttctcccggtgggctcgtggtctcgctggcttcaggagtgaagctgcagaccttcccagtgagtgttacagctcataaaagcagcgtggacccaaagagtgagcagtagcaagatttattgcagagcaaaagaacaaagcttccaccttttggaaggggacccaagcaggttgccaatgctggctggggctgcctgcttttattctcttatctggccccaaccacatcctgctgattggtagagccgagtggcctgttttgtcagggcgctgattggtgcatttacaatccctgagctagatacaaaggttctccacgtacccatcagattagttagatacagagtttccacacacaggttctccaaggccccaccagaggagctagatacagagtgtccattggtgcattcacaaaccttgagctaaacacagggtgctgattggtgtgtttacaaaccttgagctagatacagagtgccgattggtgtatttacaatccctgagctagacataaaggttctccaaggccccaccagagcagctagatacagagtgtcgattggtgcattcacaaaccttgagctaaacacagggtgctgattggtgtatttacaatccctgagctagacataaagactctccacgtcctcaccgga

SEQ ID NO: 7133 - DNA, 4842 bp, Homo sapiens
agaaaatgatgcatcctgttgccagcagtaatccagctttctgtgggcctggcaagccttcctgcctcaatgaagatgccatgagagctgctgatcagtttgacatatattcctcccagcaaagcaaatacagccacacagtcaaccacaaaccaatggtttgtcagaggcaagacccattaaatgaaacacacttgcagactacaagtggcagaagcatagaaataaaagatgaactaaagaaaaagaagaatctcaaccgatctggtaagcgtggccggccttcgggaaccaccaaatcagcaggataccggaccagcacaggcagacccctgggaaccaccaaagcagctggatttaagacaagtccaggcagacctttggggacaactaaagctgcgggatacaaagtcagcccaggcagacctccaggtagcattaaagctctatcccgtcttgccgatcttggttatggctgtggcactgctgcttttccttaccctatgatgcatggcagagcagttcatggggtagaggaaactagcagtgaagtcaaaccacccaatgagtgaatgaggcaggaaaagagggccaggtttagaaggaagattgtgaataatcccaaagcttcttggttttattttgatatacataattttatggcctgggctttccaaatttgttttcctgtttggtttttttcctgcttttgctcaaaaactgccatatgctgacagatgcactcagggcatgagcagcggcattgtatttgtacataggttcaagtgtaacacctaactaaatcatttttccttttcctttagagttatggtcatgtctcatgtttcattactactttggggctgttctaaatagatgctttatgtgataaacaactgaaaccattatacctattagtttgtgaagtaagcctacagtataataaagacactaacgtatttttaactgatggagcaaaaaagcaaactaatgaatcaggattacttgaggtaatggctgtgtgagtttttgtaacatttattttcacaagatgggacacatatttgtatgctttggcatttacatccacttcaaatgttaaaaaacttatttttaatgttttaggtttaagcagcttgtaatttattgatctacatggcattaattgatttaaccattatacctgaaataattcttcagtgtttgcctttgagcagtgataggttgtgtattttttaattgcctaagagcatatataccaaacactacaaacaattcatatttacagaaaatttaaactattttataaaaactgcacattacatttttggtgaaatatagtgcattctgaggatagcatatttcatataatagaaaaagaagcattctctaggtttgcatgtagctatagtcactatattttgcctttcatatagaaagttttaaagtattatgtttaaaaacatttattggctgggtgtggtggctcacacccagcactttgggaggccgaggcaggcggatcacttgaggtcagcagttcaagactagcctggccaacatggtgaaaccccatctctactaaaaatataaaaattagccaggcgtggtggcgggcgcctgtaatccaagctactggggaggctgaggcaggagaattgcttaaatccaggaggcggaggttgcagtgagccaagattgtgccactgcactccagcctgggtgacagagtaagactccgtctcaaataaataaataaataaataaataaataaataaataaataaaaccatttattgatgttgctcatttatttggaacgtttttagtttttctcagaaattgtcccattgcattagcacttactgtgttttcaggttgatatctaccaaaggacacaaattgaatggtagactgtaaaactggtataaacagaatgcagtttcccgaccatcagaacccaaatattaagaagcatataggaatccatctatgcatgaaacatgtaaaaaatatgttggttagtttaattaaaaatcttattgtgggtccagtgagaccatctcatccaaaagattttttttcccccaatgatgtttgctttagaagcaagatagaaaggaaaaaaagtattaggtagatatgtatagtagggacagagggaaatctttcttctttcctttctgaaagtaatacttcttgttacacattttatttattgagtttgttctaaataaaatattataaacttcagacttgaaaaaattccacttaactttaaagttacaatgtttgtatttgggattttaaatgcctttgagattaaaatgtagaattgcaggacccaaaaacttttaaaataattaaaattttaaaagagcacatgttgtgttttttgggcttgctattaatgcaaactctgattgcaaatggatgtcatgtttcataccttttttatcaggaaaaaagcagcaagccttcaggtgttccagtgatgcctgacacaattgagctggactttatgctgctctttacagtaagaggtgttgcattgtatgtggggactatgtgcactggcgtctaagacagtgacctcaacaatattagctttgcacaaaccatagagaacgatgttggatggttacataatcagttataacattctggcagctaaattgctacaagagctttttcttgcaaaagcttaaaatacaagatttttaataatttactcagaacagtataacttctgacacacacaaatgcttgcctctttattcatatgttcgttacctactctgtacatgtatctgtcatttagctgtttctcaagatgatgttcagcagttggctgcttagaaatctttttcaagccagtttctaaagacatttgtttaatgttctaccatagaataatgcacaccattgtcaaagatttgattattgtgttttatagtaagtccatttgacatttatttccctttcagtttattttccttccttattttgttatacatacccttccctttctcccctgcctttcgtacattcattcctcttcctctaccctccagcacatctacttactggtgctgtgctgtgtgtcagaagataaaacaggtgtattattgtataatgaattttgtatacatgtttatgaaatggtgagatcaactaaaggaggcatgttcataacagtgtttattatcagcagctatgtcccaggaaaaaaaaatgggaggggcaaatggctacagttgtaaatggataacatcatttagaaagccgaatttactgttcatctgagcggttacctggagtattatatctatgcactggtgagcatctcctgattccacttacttttctccctgtgaacagtttaccggtgccatgctgaagagaaagacatctaagtgataacatgaatgaagtcttaaaatttaaagtatttttactgctatataaactaaagactacattgtgcatattttgttaacactgtctcttgttatgataaacactgaaatagcatgttaaacagttgcctatactttaatataatcagttggggaaaactggccttttctcccccactgtatgattgtttcttgaaaggtaaattgctaattttatacagtgtaattctgttcttcacaaaataggtttcattattctatatttaaactgttggtcagaaaatgatctgcaattcaagtaagtctgcattacttttttctttaaaaagtactttaacatgccttatttattatattagcaaatgagctaataacagatgaaattttcattttttgacagatataaccttgcataagtagtatttagggtgattttgatactatctttagagttttgcattggatattaaaaaatatattggcacaatgtattggaagaaaatgagtagtatctggtttaatttttaatatttagggacattttaaaaaatcaatgttttaattagactaaaaattctttatattttttatttactttttaaagaaacatctgtcaaagtaatattgattccaaactgatgtttgtgtgaatttacatgtctattttcatgaactaagaatagagtttctttgagttgaggagaaaaaaatatatatgtgggtccatttattaggttaaagttgacccattcagtgtaaaaataaccatagtgtgtgagctaaagaaaaaaaaaagtaaatttctcctttatattctaagaagctttaaaagaacaattcaggggttattgataactgctactctgtcggtcattgtctctatatgcagtaaaattttatggtccctttataggaatataaagaattcaaaacagtttttcaaaagatttttttccttggacataaaaaattttgatgctattctatttttgtttttattacagcttaactgtatgctgttaaactctaggatgtatctgaatctttccttttttcccccctcctccaaatatataaatctgtgctctcacatgtaatgtatttaatttttggaaaatttaatgctatatagtaaatcaagtgtgtgatttaaagtaatcagatcactttgattcttttaagttttcagaatttcttttttccacaggtaattttggagaaaataattaccaattaactgataataagcacgctgtcctctgctgtaaaaagtctgaatagatactgtgtatgtttttatgtccatgaacttgagctactcgtgtgcaattatgtgtatgggaatggagtagtgttcatgatttgtatctacatcatcatatggatgtatatttattaataaagtcattactttaaaaccagc

SEQ ID NO: 7134 - DNA, 100 bp, Homo sapiens
gagacagagtctcactctgtctcctaggctggagtgcagtggcgcgatctccgctcactgcaaactccgcctcccaggttcacgccattctcctgcctca

SEQ ID NO: 7135 - DNA, 1555 bp, Homo sapiens
ggagaggagacatttgtttcacagcaaacatatgaataccaaataatagtgaaacccaagaaggccagtggtttatagaaagttgtaggaagtgaatattgaaatctgtaaatatgtaaatatatttagataaacataagatgaacaacacgttttacatgtgtgtattagtagaacattttttgtgcctcatattgcatagatgggtcaatgaaaacagaaaaaaaagaaacataaagaaagtgagagagagggagaaggaaagggagagggagagggaatgggaatgggagtgggaggaagggagggagggagagagaaaaagagggaggaagaaagggaggaaaatagttaaacaagcaagatgaacagaaacaaatatctgctatactctgaatgtcaaaatggaaatagcctgtgtaaagttctgcaaaaccataaatgtaatagatttattttaacaaggtaccaaagtactgtatgtttaagaaatttatcatttttcaacttcctaatttatttctggatggtgacattttaatttaaataaacagcagctgacagtatgacactggagttgttaatccaactattcttgtgcctcatgtgggtgttaggaattaaacttactatttgctaagcagcttacctgacaagagtcagattttttccccctaaagaaaggactggcactgtagctgtatgctttattataaatgatcaatttgttaccctcctataaaacagtgggcatttctccgtagactactctcatgtatctggagaattagcattgtttccatctaccagaataagacacaccacaccacacacacacacacgcacacacacacacacgttaaagctaaaattctaataataaaactgattaacttttaaacatctagccatgttctcatcaaagcattcagctttagtagagatataggtttatttttataatattctaacattagcttaaatgtttcctaattttatcatgtggaattaccccctatcaatcacacgttttgagcatcttcatttgtgatcctttgagaagggagtgtgtatatgtttatatatacacatatcaatacatatcatttacctaaattggtagattgagttgtcagagagagtttgatcaaaatatggcaggttgtttcaaagatatggttgttgtgtggaccagatcattgctgagataatgtagccaaatcacagactggtaagctagactttttcaatcacatagagtctgtaaaatacttcagaatttaaataaaactccattgctcatgcaaaactcatcagataagttcaaggagtcaatgacattgatatttcaaaaactcaacattggcttcacttgcgttattgacaagcatgtttcttggatctctgggaatttgtaggtttgccctgtggattttgactgttttcaaagttctaatgatttctcagtcgttcttcttaacttcagaaaaaaaaatgcattgttttctcatctttcctatgcaaaaccaaaataaaaaattgattctttgtttta

SEQ ID NO: 7136 - DNA, 1244 bp, Homo sapiens
gggagagagaaaaagagggaggaagaaagggaggaaaatagttaaacaagcaagatgaacagaaacaaatatctgctatactctgaatgtcaaaatggaaatagcctgtgtaaagttctgcaaaaccataaatgtaataatttattttaacaaggtaccaaagtactgtatgtttaagaaatttatcatttttcaacttcctaatttatttctggatggtgacattttaatttaaataaacagcagctgacagtatgacactggagttgttaatccaactattcttgtgcctcatgtgggtgttaggaattaaacttactatttgctaagcagcttacctgacaagagtcagattttttccccctaaagaaaggactggcactgtagctgtatgctttattataaatgatcaatttgttaccctcctataaaacagtgggcatttctccgtagactactctcatgtatctggagaattagcattgtttccatctaccagaataagacacaccacaccacacacacacacacgcacacacacacacacgttaaagctaaaattctaataataaaactgattaacttttaaacatctagccatgttctcatcaaagcattcagctttagtagagatataggtttatttttataatattctaacattagcttaaatgtttcctaattttatcatgtggaattaccccctatcaatcacacgttttgagcatcttcatttgtgatcctttgagaagggagtgtgtatatgtttatatatacacatatcaatacatatcatttacctaaattggtagattgagttgtcagagagagtttgatcaaaatatggcaggttgtttcaaagatatggttgttgtgtggaccagatcattgctgagataatgtagccaaatcacagactggtaagctagactttttcaatcacatagagtctgtaaaatacttcagaatttaaataaaactccattgctcatgcaaaactcatcagataagttcaaggagtcaatgacattgatatttcaaaaactcaacattggcttcacttgcgttattgacaagcatgtttcttggatctctgggaatttgtaggtttgccctgtggattttgactgttttcaaagttctaatgatttctcagtcgttcttcttaacttcagaaaaaaaaatgcattgttttctcatctttcctatgcaaaaccaaaataaaaaattgattctttgtttta

SEQ ID NO: 7137 - DNA, 6010 bp, Homo sapiens
gatgcggagaggttggcagagccaggggtaggttctggaggctcaagcaacaaggaggtgcaggtaaagggtgcagtgcagccactgagggacagctgggaactgggggatgcaagtgagaaagggatgtgggggagagttcaggatcaggctgcttgaggagtaatgggttacctacagcagagacgagatggctgtttgtcaggaggcggtagaaaggtagaaaggattcagattgtggaagggtaaacggatgagatgaccattaaggttttgttttactgagaggctgtaagtctgccagggacagctgtcagtaaggctgcagaagggctggggggctacacaaggaagagcagaactagggttgtaagctcaaatgacgagcaaacggtgagaaggaggcctgaagggctgtgtggggactatggctacctgaagagggcacaccctgttaaaggggccacagctgctcagctgttcttacagtgccggccctgtgttgccagattgtctgctttgtcagaggccagaattctgactttttatgtgaaataggatttttaaatgctggtgatcacttaaaaaaaacttaaaaacccaatactggcaaaagaggatgccagtttgcaatccctgaagtagagagagctcgtgctggggagaagtccaccaagatgctttgaggcgggctgtagcaaagtcctgtttctcagagctgggctgggctggggtaggatccttgcagctgaggaggaggaaaagccactgagtctcctcccagagcgggacaaaccagaggccctttgcagttgctgggtcaccagcgggggtggcgcatggagtacagacagtgtagctcttggcctgccagggagacggatggtgcctttgaagcaaagaggaagggaaggcagaaccagggatgcctttgctgatgagagtgcctgtcagggaaggcgccacaggctggcagctcttcaaaccagcagcgcttgacccagagccagatccagcatggcctggccagaggcaccctgggaggccagctggtcagtcccttgcctccccaagttccccctggggtcaatgagccctgggaggatgcctaacctaactccagccagactaataggggcatggtgacccttgactcaccatcccatcccagctttcagggagtgggggtagtgtggtctccatgttcctactatgcctaagaagagatggctcaccttgggaggtgccaggctgaaactaggtcctttccgggtctggatgctgccgctcaggagcaggggcgtggcctcagctgcctctgggagcttcccgggaatgacagggtttgaggggagtagatatgagagggagccgctcctggttctggagtcttaggaggttccaacttgcaggatcctttcccagagccctccatggagaaaacagcaaaatgaagcccttacctgcttgctgtctgcaagggagggagccgagccccagctgataatcccccagcactcacccttcctgagctgagacttcggggctgtggagaccagcacaggacatagtggtgctttttaaatttatttttaactgtttctcatatgtagcaacccctcctcccctcctgggcatgtttacacaggctctgctctgggggctggcctggctgtgaggtttctggggaggcagagaggcagggactttggggccttagtcaccatccatggtatcacctcatctcacttcctgtgagggacagggcctggctgatgtgatcccagctccccccagttcaggactgtctttcagctcctttgcccctggaggtgggggctgctggctgaggaggggtcaaggtgagttcaagaaagctacctgtggaaaatggaccaggttgggggggtgattgcaaagtctccccaaagcctggctcctcatgctcagtgccaggggcagaacactggggagccaggtatagagagccttcctgtcataactgccagtcctcttcctccaaggcctctgcatattctcatgttcccctcacccatcatgccagccacccctatccctcttctagcagggccaagatggggacagcagcagccctctggccttgggatgtgatgataaagcaagcctagggccagggtttggggagcagagagagccaagaagttgaccacgtgtgatttccagcccttcccactgggacttgacttcccaggtcaaggagtccgtctcattctggctggtcgagtgaccagaggcctgtgtgaatgtgtgcacctgcttttcctgcctggaatgttttctggctcagctgcagcaacatctgtgagcccagtgtctgccctgtgtccctgggctcgctccaagtgcaggaacatacatgcagggcccaacatgatgatggtgtgaagggcaggaaacagtcctctgaaggagtggggaggtgggcagtctgcccccgccaggtaccatcgcctcctgccagcttccttagaccaggcagggctgccatggtgctagctgcaagtccatcagtattgaccgtctcgctccatcttggtcctccggagtcccaagtttccttttcatcaaatctgacaagagagaagaaacatgggtgtgcttggcccacagggcctggtggtgatggacctccccgctccctcaagctctggatggctgcagtgttgtactagactttgttcaggctgttctcatctcagtattgccccttcctttcactttcacacttcatctcattcctgttgtcactttccccgaaacgaataaagtctccccagctcctgctgtgtaggctgggcagaaaccacaacacgtaagccttgtctcctttcctttggagctggggcccgagccctcccccagcccagcggcattagccccattggctctgggaagagcctgacctgaggtgagcctgaagccagggaacaggaaacctcccagcgcctgcagtcatgatgaaacttctggggttccagacttcctcagcctgctgaagcccctcaggccttgttaaccctgatctgtgagcagtgctttccccctcttcacacagtgggcctggcctccagaggctcaagttagcacccaggatgtattccaggaccctgctcttccagtctcagtccacagcagtccatcaggagcaaaggagaaatggggcatgttctcctgggagatgagtgtagctcaggaaaccgtagcaaccttctcatcacttgacatccagaacccatggggtggaaaacacttcgggtcccatccgtcaccccccactcttcctctctgttgtccctccagctctggacctcttcccacactttcagacaagcccaaacagttgaaaccagacttgcacagaaaatatcttttggatttcacagcatatttcacccataacccttcctgcccttgtctcagctctcctttcattcagcttaagggtaaaacccagacctgtgagagaggaaacagtgtatttcttacttttcatcccagccagtccccacaagatcgtggctagaagtgtagcttcgcaccgccaagaccccctcattttcagtggtgtggtagtgaccaggggaggaggaggcatggcagcaggaaaaggagaggtgacccgcaggaatccatagacatctgggactgtacaccagtaaacggaggcagttttgttacaggctcctttaaatccagctaaagcattacccaaaaaaagcacttcaaagtaaccagaatttatgaataccttgcattgcacaccctttcatagacgcagtgttgtaattttcatatttaagtccagctgatatgataccaagtaaagggcctcaggcttcaacaagacaggttcatacacagtggggcccctggcctgctcttgtacaaatgaggggctgggtaagtaagtgctggggtgagaatctacgtaatgagtcaggtaggctctttgtggacactggccattttcttagaaagcagaaggaaatgtcattgcagactcctggaggatcagaacccgacctgcttgggggtggaaggggttacctcatttcctgctgtcccattcctcaggctcacagcacgcacctgcctaatttaggcacctgactaactgggttagacctttgggtgcaggtggcccttctcagaggcctgacgatgaaggggttgaagctctgctgccccatttaccaggagctggcatttggaccactaccgtggaggtagtgacaggaagcagtcataccaagaaccaagcagaatggcccagaagcaggctgcctgtaacccttagtgtctgccagcaaggtgaggggaccagctgttgaggcctggcagaagatgaggagaggccacgtcaggtcagctggcaggtcacctctctgagccccgtccaaatgacaatgtgcacacagatatacaaactttttccaaccctgagcctgaaaggacttggttgttggaagcacaaaacctccaagaattttaagtgtaggctctgttctctccacagcgagctgaggcttcaggccttagggtcataggagctgactggggatgggacagaagtgcagagttccctccacaacccatgaagtccacattctcttgcttccagcagatctgcaccctcaccaccatgctgccatctggctggcccatacctggaacagtcttgtctagcacatttgctcaggagggagaggagaggggatggaccagagtgatgggagcccagggctgcagggcagctccccctggtggaccctagaggtggcccctcccactcctgggagaagagaagccacactgtgcatttcgcagccaatcaaaacacaaccctccaatagagggcggaatggggttaccagaagctgggaaaagcaggggaggagaatgaagagcaggtggatggtacaaaaatatggtgaggactaagttctagtatttgatagtacagtagggagactatagttaacaatttattgtatatttcaaaatagctagaagaattggaatgttcccagcacaaggaaaagataaatgcttgaggtgataaatgtccttaaatatcctgactggtcattacactttgtacgcatgtatcaaaataccatatgcagccccaaaatatgtacaactatcacatgtcaattttaaaaaggaaaaacaaaacaaccagaacattcctctagttagtagctacaacagggcaggaactggagagaaaaacaaaacaaaaaaagcagcagcctcctgactggccatttcccttcttggtctccagttaaaagctgcctctgagctcccccagccccaggcccccaccaccagcctctgccttccaagataacctgtcttgcctgatcctggaaaggcttgtgagaaacttggggtggtaagaaataaaccaaaggagattctcaaattctatctctgggatttctgtttcctcaggtgtaaaggtagaatctgaacaccacctaaactgccaccacacagtgccactgtctttgctagctgacgtggaagtactgtgcaaacttaacagaagtgctgtggagatgctaactgactgaggcaactaggaggaaccctccctgccaggaagaggttcttggggatatacctcaaagcttagggctttcaaatacttcctagccaatgggcccaactgtccagcctggctggggtaacgatctactcccaactcctaccaataattctctggaattcttagcacctttttcttgccaaagcccaaacaaagcaatttcagatctgaaaattcttcacaagtagaagtgattattaactttaatttctatttcaccaaggaatgtgaactgaaatacagagaggttaagtaacttacctacagtcaccagctgaacaggccaagaggacaaatgatgtttctaattcctagctgagttttctttcttttcttttcttttcttttttt

SEQ ID NO: 7138 - DNA, 2858 bp, Homo sapiens
gatgcggagaggttggcagagccaggggtaggttctggaggctcaagcaacaaggaggtgcaggtaaagggtgcagtgcagccactgagggacagctgggaactgggggatgcaagtgagaaagggatgtgggggagagttcaggatcaggctgcttgaggagtaatgggttacctacagcagagacgagatggctgtttgtcaggaggcggtagaaaggtagaaaggattcagattgtggaagggtaaacggatgagatgaccattaaggttttgttttactgagaggctgtaagtctgccagggacagctgtcagtaaggctgcagaagggctggggggctacacaaggaagagcagaactagggttgtaagctcaaatgacgagcaaacggtgagaaggaggcctgaagggctgtgtggggactatggctacctgaagagggcacaccctgttaaaggggccacagctgctcagctgttcttacagtgccggccctgtgttgccagattgtctgctttgtcagaggccagaattctgactttttatgtgaaataggatttttaaatgctggtgatcacttaaaaaaaacttaaaaacccaatactggcaaaagaggatgccagtttgcaatccctgaagtagagagagctcgtgctggggagaagtccaccaagatgctttgaggcgggctgtagcaaagtcctgtttctcagagctgggctgggctggggtaggatccttgcagctgaggaggaggaaaagccactgagtctcctcccagagcgggacaaaccagaggccctttgcagttgctgggtcaccagcgggggtggcgcatggagtacagacagtgtagctcttggcctgccagggagacggatggtgcctttgaagcaaagaggaagggaaggcagaaccagggatgcctttgctgatgagagtgcctgtcagggaaggcgccacaggctggcagctcttcaaaccagcagcgcttgacccagagccagatccagcatggcctggccagaggcaccctgggaggccagctggtcagtcccttgcctccccaagttccccctggggtcaatgagccctgggaggatgcctaacctaactccagccagactaataggggcatggtgacccttgactcaccatcccatcccagctttcagggagtgggggtagtgtggtctccatgttcctactatgcctaagaagagatggctcaccttgggaggtgccaggctgaaactaggtcctttccgggtctggatgctgccgctcaggagcaggggcgtggcctcagctgcctctgggagcttcccgggaatgacagggtttgaggggagtagatatgagagggagccgctcctggttctggagtcttaggaggttccaacttgcaggatcctttcccagagccctccatggagaaaacagcaaaatgaagcccttacctgcttgctgtctgcaagggagggagccgagccccagctgataatcccccagcactcacccttcctgagctgagacttcggggctgtggagaccagcacaggacatagtggtgctttttaaatttatttttaactgtttctcatatgtagcaacccctcctcccctcctgggcatgtttacacaggctctgctctgggggctggcctggctgtgaggtttctggggaggcagagaggcagggactttggggccttagtcaccatccatggtatcacctcatctcacttcctgtgagggacagggcctggctgatgtgatcccagctccccccagttcaggactgtctttcagctcctttgcccctggaggtgggggctgctggctgaggaggggtcaaggtgagttcaagaaagctacctgtggaaaatggaccaggttgggggggtgattgcaaagtctccccaaagcctggctcctcatgctcagtgccaggggcagaacactggggagccaggtatagagagccttcctgtcataactgccagtcctcttcctccaaggcctctgcatattctcatgttcccctcacccatcatgccagccacccctatccctcttctagcagggccaagatggggacagcagcagccctctggccttgggatgtgatgataaagcaagcctagggccagggtttggggagcagagagagccaagaagttgaccacgtgtgatttccagcccttcccactgggacttgacttcccaggtcaaggagtccgtctcattctggctggtcgagtgaccagaggcctgtgtgaatgtgtgcacctgcttttcctgcctggaatgttttctggctcagctgcagcaacatctgtgagcccagtgtctgccctgtgtccctgggctcgctccaagtgcaggaacatacatgcagggcccaacatgatgatggtgtgaagggcaggaaacagtcctctgaaggagtggggaggtgggcagtctgcccccgccaggtaccatcgcctcctgccagcttccttagaccaggcagggctgccatggtgctagctgcaagtccatcagtattgaccgtctcgctccatcttggtcctccggagtcccaagtttccttttcatcaaatctgacaagagagaagaaacatgggtgtgcttggcccacagggcctggtggtgatggacctccccgctccctcaagctctggatggctgcagtgttgtactagactttgttcaggctgttctcatctcagtattgccccttcctttcactttcacacttcatctcattcctgttgtcactttccccgaaacgaataaagtctccccagctcctgctgtgtaggctgggcagaaaccacaacacgtaa

SEQ ID NO: 7139 - DNA, 973 bp, Homo sapiens
cagccttatgcatggggaaggcggggctggtgacaaggcagggcaagaggctgcaggaagagtgtgttccagctcagccccccaagctgctctcgctcccactgagccaagccccctaactttgggcctagaggccgttagtattttatttggagtttttaactctacaactgaagtttaaggtatttggggaaaacttagtccaaatggatctgctgatggtgggaaggccagtgcttaacaaatccatgtgtcatggggccaggtgagggaaactgctggttctgctggtgcctctgcccctggcttctctctgggagttgggtgcatcttatcagtgggaaatctcccagccttaccaggcctgtgatggggggtgggggtggggtggagatgtttctccagttctgcctgccctggcagaatcttgacccagggaaagggaagcagggtaggagtccttctgagaaaggtctgtgtagcccattaaccaggagcttggcacaggccacatctgccccaagagcatgagctcgtggctcaggagagccttcaggcccttgaggcccccatgggcagtgctgtgtgggcagaggaggggtgatatgagagcgagcccagggaaggacctctgggcaaaaagttcccaggccctaactgcgtctacttgctcagtcccagctctgcctgttgctctagcccacaggctccctgcggagggtctgggcttggcggaggacccagaatggcactgaggccagcatggctgtgggagttgagcaaaccctgggtgccagtccaggagctgtggctggacatggggtgatggggcgggatgcttgggcctgggtctctccgccagcagtgccaggagcccttgctggggaaatcaagaccagactaggatgcttctgccccaggcctgccttccattctttaacagcccatcttggcttggggttgcaatgatggc

SEQ ID NO: 7140 - DNA, 973 bp, Homo sapiens
tttgagatggagtttcactcttgttgtccaggctggagtgcaatggcatgatctcggctcaccacaacctccgcttcccaggttcaagcaattctcctgcctcagcctccaagtagctgggattacaggcatgcgccatcacgcccggctaattttgtatttttagtagagacgggatttcttcatgttggtcaggctggtctggaactctcgacctcaggtgatccacccgcctcagcctcccaaagtgctgggattacaggtgtgagccaccgcacccggccgctaagttttctttttactaaatcaattgaggggatcgcaacccaggtagtgcaatggaagcaaccaagtggctttaaatcaatcagattctcagagactgattcagaggcctggtgtgggttctgggaacctgttcaggtaagacagaaaaccagatctggtttcagggctcccagtgggcatgtgggcttggctggtcttactacatagggaggttggaagacaaaagcaccaacagaggtaggcctaggaaggaagagacatttttccagcgacagatggcccactgctcagccctggctccagaatgcaaaagagatcagaaatagatgctcagcaagaggcatgtgccacccgcatcatgtctcatgcagctgccatagctttaatcaggaaaacacacatcttatcccactttgcacagaccctcctgaagtgcagaagatactaggaggaggcatggggggagcagatggaggaagaatgaaaagcagtccaaagaatcattctctcacttgggaaggacagaagaaagctgtaccccagcagtgtcaaggcaggaggcttcactcaagccctgttcctcccaggcctcacagcagtgggaatttacctcagctaatagagggagatcttacaacacatttctcaatctagattcatgtcttgagaccccaccccaagatca

SEQ ID NO: 7141 - DNA, 973 bp, Homo sapiens; identical to SEQ ID NO: 7139

SEQ ID NO: 7142 - DNA, 3500 bp, Homo sapiens
cctatgtgcagtcagcgggcgggcacgcgctgcccctgggtaccagccctgcgtccagccaggctggaacagtcacctcgtacgggcccacgagctctgtagctctaggcttcacctcgctggggcccagcggccccgccttcgtgcagcccctgctctcaggtgaggggcggcctggcaggcagtgctggggacccagggtggggctgaggcagtccgggccctaacttggtctcctgcttcttcttctctgtctttcagcaggccaagccccactgctggctcccggtcaggtgggcgtgtcacctgtgcccagtccccagctgccgcctgcctgtgcagcccccggaggtcctgtcataacagcattttactctggcagccctgcacccacctcctcagcacccctggcccagccatcccaggcccccccaagcctggtctacactgtggccaccagcacaaccccacctgcagccaccattctgcccaagggcccgccagcccctgccactgccaccccagccccgactagccctttccccagcgccacaggtaggtgtcagatcaacccagagcagagtgagttgggggacccaggggatgggctccagtcaggcctggctcagcaaacaattttctccccactagcaggttccatgacctacagcttagtggcccccaaggcccagcggcccagcccgaaggccccccagaaagtgaaggcagccatcgccagcattcccgtggggtcctttgaggcaggtgcctctgggcggcctggccctgcaccccggcagcctctggagcctggcccagtccgagagccaactgccccagagtctgagcttgaggggcagcccacaccaccagcccctccacccctgccagagacctggactcccacggcccggagcagccccccactgcccccacctgctgaggagcggaccagcgccaagggccctgagaccatggtgagcgcctgcaggccgtggggctcccactgccacttggctgtgcctctccattgacgtctttgcttttctgtcctactcttctttccatgcctgtgtgtctctcaggttaaagggtcccctctgtcccttctgcctgcctgtgttgtctcctctcccatctgaggcccctgtcttggccttcctgaggccgtgtgacagccttctcaaggggtctgctgggcgggctcagatccaactctttgtttctggcctttgccccagagtctgagctcagtgttcgccatctccctgcccatctccaccccaggccagcaaattccccagctcatcttcagactggcgcgtccctgggcagggcctggagaatcgtggggagcctcccactcctcccagcccggccccagctccagctgtagcccctggtggcagcagcgagagcagcagtgggcgggcagccggggacaccccggagcgcaaggaggcggctggtactggcaagaaggtgaaggtgcggcccccgcccctgaagaagacctttgactctgtggacaagtgagcatgggctggggccttggtggagcgtgttagggtggcgggagtgggagcagctgcaggctgaggcgggggaggtgaccctgccggccctccagcagggtcctgtcagaagtggacttcgaagagcgctttgctgagttgcctgagtttcggcctgaggaggtgctgccctcccccaccctgcagtctctggccacctcaccccgggccatcctgggctcttaccgcaagaagaggaagaactccacgggtaggcgagcattgggcacccagggtccttaggtggagggcagactggggccacctgcactgagtctgcttctgtttggccagacctggattcagcacccgaggaccccacctcgcccaagcgcaagatgagaagacgctccagctgcagctcggagcccaacacccccaagagtgccaagtgcgagggggacatcttcacctttgaccgtacaggtgccgtggtgggcagaactttgggggcctggggacctgcaagaggagtgggtctctggaaggcggttagagagtgagagaggtagggtgggtccatccaggctgggaggaagcacagcctgtcagtggtgggttctggagtctggcaggcccctaggttgccctgtgactgtgggcaggacccctctctgactcccctgtgaaatagaatgcagtgagggcttgggtgggcactcagacggtggcaggaaggccctgccgctgctgcagccttgccatgctgcctgtgccctgcacaggtacagaagccgaggacgtgcttggggagctagagtatgacaaggtgccatactcctccctgcggcgcaccctggaccagcgccgggccctggtcatgcagctctttcaggaccatggcttcttcccgtcaggtgagcctgtctcggagtcttggggtcactcgggtgggacttatctgtacatctcatcctgtgctccccaccgtttttctatctccagcccaggccacagccgccttccaggcccgctatgcagacatctttccctccaaggtttgtctgcagttgaagatccgtgaggtgcgccagaagatcatgcaggctgccactcccacggagcagccccctggagctgaggctcctctccctgtaccgccccccactggcaccgctgctgcccctgcccccactcccagccccgcagggggccctgaccccacctcacccagctcggactctggcacggcccaggctgccccgccactgcctccacccccagagtcggggcctggacagcctggctgggagggggctccccagccctcccccccacccccaggtccctccacagctgccacaggcaggtgagggacccctgagaagatgccaggacttatagtaccccctcaggacatggacagtatgtgggggcaggaaggttatctcctcccgggtaaagccatttcgtcctctccagtttggggcggaatgaggcctgctcctcttgtaaatacccccttccctcgaagctccctcccggtgctggggggcagctgaggggctgcaggggcagtctccctcctccaagcccctgtacataacctggagcgtgtgaccttcagagcttttcactttatgcaaaatggctcctgtgagggctgcaagctggagggtggtgcaggccttgggccacagggaggcgcctgtggaatagggggagttcatgcaccccttttttccccagaggggctggactcaggttagtttgggggtgggggctcctgcactttgccacaggcacggggagggttttctcctcaccccctctgccctcccaacttgggttgtactttctaagaaggtgattccccctgcccttgcccccttccccagaacaaaacatgttgatcatgtgcaatatttcttactgtgccgagaagccgcaatgagcgagattaaagctgtttaacacacctgtgtg

SEQ ID NO: 7143 - DNA, 632 bp, Homo sapiens
cagctgcacaggcaggtgagggacccctgagaagatgccaggacttatagtaccccctcaggacatggacagtatgtgggggcaggaaggttatctcctcccgggtaaagccatttcgtcctctccagtttggggcggaatgaggcctgctcctcttgtaaatacccccttccctcgaagctccctcccggtgctggggggcagctgaggggctgcaggggcagtctccctcctccaagcccctgtacataacctggagcgtgtgaccttcagagcttttcactttatgcaaaatggctcctgtgagggctgcaagctggagggtggtgcaggccttgggccacagggaggcgcctgtggaatagggggagttcatgcaccccttttttccccagaggggctggactcaggttagtttgggggtgggggctcctgcactttgccacaggcacggggagggttttctcctcaccccctctgccctcccaacttgggttgtactttctaagaaggtgattccccctgcccttgcccccttccccagaacaaaacatgttgatcatgtgcaatatttcttactgtgccgagaagccgcaatgagcgagattaaagctgtttaacacaattgtgtg

SEQ ID NO: 7144 - DNA, 174 bp, Homo sapiens
cccgtgcaggccccgcccccgggtggctcagcccagctgctgcctgggaaggtcctagtgcctctggccgcccctagcatgtcagtgcggggtggaggggccggccagccactgccactggtgagcccgcccttctcagtacctgtgcagaatggtgcccagccccccagcaag

SEQ ID NO: 7145 - DNA, 13789 bp, Homo sapiens
cactgaggaaggagagtttaatgttgtgggaaggcagcaggatgcttagggtgcgggctccagcaggggagcaccttggccctggtcttgggccagcagacgcagaagcagggagtgcagagcccggcaaacaggtgtgtagcccaggcggctcagatgcaggtaatcatacatgtcatgatggctgatggtgccatctgagtgcacaaagccagggtcggcatctaggaagtgggcccgagggtggccagccagtgccgcccgtaccagctcgttcacctgtcggttcttctcccgaagtgggttgggatgttggcctcgcggaagcaggccctgagcaggaacacgaggcgtagtaaggaaacaagcatttgagtatcttgttctctgtgccaacctgtcctccacccaccaccatgaagtttccagctgcagaaaacactagggatgggcaagtggggagggtgggagggtagttcctaaatatcacatcctagccctcatttagcaagagacttctgggttttaccctctttcgttttcttttttttttttttttgagacagagtcttgctctgtcgcccagactggagtgcagtggcgcgatctcgactcactgcaagctccgcctcccaggttcacgccattctcctgcctcagcctcccaagtagctgggactacgggcacccaccatcatgcccggctaattttttgtatttttattagagacggggtttcaccgtgttagccaggatggtctcgatctcctgacttcatgatccgcccgcctcggcctcccaaagtgctgggattacaggcgtgagccaccatgcgcggcctagcctctttccaagtatcacttagaaaaatgttgacattggctaggttcagtggctcacgcctgtaatcccagcatgatgggaggcagagctggataggtcgcttgagcccaggagttcgagaccaacctgggcaacatggtgaaaccccatctctaacaaaaatacacaaaaattagtgggacatgatggcgtgtgcctgtagtcccagctactcgggaggctgacgtgggagaatcacttgagccctggaagcagaagttgcagtgagctgagatcatgccaccgcactccagcctgggcaacagagccagatcctgtctcaaaaaataaataggccaagggaggttgctcacgcctgtaatcccagcactttgggaggctgagacgggtggatcacttgaggtcaggagtttgaggccagcccggccaacatggtgaaatgccatctctactaaaaatacaaaaattagccaggtgtggtggcacgcgcctgcagtctcagctactgtgaaggctgaggcaggagaatcacttgaacccaggaggaggaggttgcagtgaggccagattgcgtcactgcactctggcctggcaacagagcaagactctgtcccaaaataaataaataaataaaagatatcaacatcatggctcatgccaagggatcaatccgttttcagaagaggaaatatcctagctacctacaagtgatggagcctagatttaccccaggaatgcctgacaacttttggcctattcaaggttttttgagggtttttcttttgttttctggtgagacagggtctctgtcacccgggcgagagtgcagtagcatgatcacagctcactgttaccttgaattcctgggctcaagtgatccttctcctttagcctcccaagtagctggggttacaggttttgcgcaccatcatacccagctaattctttttttttttgagatggagtcttgctctgttgcccaggctggagtgcagtggcacaatctcggctcactgcaagctccgccccccgggttcatgccattctcctgcctcagcctcccaagtagctgggactacagacgcctgccaccacgcccggctaattttttgtatttttagtagaaacggggtttcaccttgttagccaggatggtctcgatctcctgactttgtgatccaccctcttcagcctcccaaagtgctgggattacaagtttacaggcgtgagccaccgcacccggcttttttttttttttgagacagagtttcgctcctgttgcccaggctggagtgcaatggtgcaatcttggctcaccccaacctccacctcctgggttcaagcgattctcctgccttagcctcccaagtagctgggattataggcatgtgccaccacgcccagctaattttgtatttttagtagagatggagtttctccacgtgtggtcaggctggtcttgaactcccgacctcaggtgatctgcttgcctcggcctcccaaagtgctgggattacaggcatgagccactgcgcccagcccatgcccaactaatttttttttttttgagacggagtctcgctctgtcgcccaggctggagtgcagtggcacagtatcagcttactgcaagctccgcctcccaggttcatgccattctcctgcctcagcctgccaagttagctgggactacaggtgcccgccaccacgcccggctaatttttttttgtatttttagtagaaatggggtttcaccgtgttagccaggatggtcttgatctcctgacctcgtgatccacctgcctcggtctcccaaagtgctgggattacaggcgtgagccaccgtgcctggcccgttttttagtttttcaatacccccaaagtcttaagccatccctgggcaaaaaaggctaattggtctcggagcatattctcaaccacagccactctgaagggtatagcaagctccaacgtgagattctgcctaaaagccactgctctatgtcaagctgcctagaactgtgccaactgtggctatatctgagggggtcccagaccactgccattcttcctttcccactctcccagcctctcaccagcaccacaacccgggcctggggctgtcgctcattcaccagttgcacaatggccttgatgccaccagtcacctgctctgctgtgtgtccgtggttgttggtgcccacccagaccaccacaatctgtggaaaaagagacatgaagcagcggtgagggggcagccaaaagatgttttagagccccacccaagccccgctcaccttgggccggatgtgttccagctccccattctccagccgccacagtacatgctgtgtgccgtcaccaccaatgccaaagttaagtgcatgcagaggagagaagagctcgcgccagatctgtgggcaagaagtggtgtgggcaagaagtggtaggggcacaagggcactgtccgcatggaccatccccctctgtccaggtgttaaccaaatgccattatggaagaaccttacttcatggaagcagtcttaaaattttacctggagcaaactccagcatggctgaacctcactttatagaaatctattagagtctctcacttattttattttattttatatttttgagacagagttattttatttttgagacagagtctcactctgtcacccaggctggagtgcactggcactatctcggctcactgcaacctccgcctccctagttcaagtgattctcatgtctcagcctcctgagtagctgggactacaggtgtacgccaccacgtccagctaattttttgtatttttagtagagatggggtttcaccatgtgggccagactggtctcgaactcctgacctcaggtgatccacctgcctcggcctcccaaagtggtgggattacaggcgtgagcccatggtgcccagcctatttattttttgagacggagttttgctcttgttgcccaggctggagtgcagtagtgcgatctcggctcattgcaatctctgcttcccaggttctggcgattctcctgcctcagcctgccaagtagctgggactataggcatgtgccaccatgcccagctaatttttgtatttttagtagagacaggatttcgccatgttggccagggtggtctcgaactcctggcctcaggtcatccgcctgccttggcctcccaaagtgctgggattacaggcgtaagccaccacaccctgcctagagtctctcactttaaaccaagccccaggctctgttgctcatgctgaggtgggcggactgcttgagcccaggagttcaagaccaacctgcgcaacagggcaaaaccccatctctacaaaaattacaaaaattagccaggtgcatggtgatgtgcacctgtagtcccagctactcggagactaaggtgggaggatcacttgagcccaggaggcagaggttgcagtgaacagagatcataccactgcacgccagcctgggtgacagagcaagaccctgtctcaaaaaccaaccaaccaaccaaccaaccaacaaaacaaaccaagccccatagaagcaagactcacttcatgaaaatccagtctgcttgagccatgcattgaatcaatggcattacagttgaaacttattttgatgaaacccattacagttggacatgctttgtggaaagatattattatgattgagtcctctttgtggagtgccattagagttgcccttcgcttcctgtaaagtgactatagctttgtgtaaacccaacagggctgcgcactacttaaagcaaacaagaaagagcctcactttaggcaagcctatggcaggaaagcctcattttaggtcttagtacattatacacaaatccaatctgataaaaccaaggcatacatttctttctcaatagaatgttgcaccttacaccaagattctcagagcctcgggctgcctgaggccaatctgggtactctcataatacctcacctggcctgggttctggtccagatgtgtcagcatggacacagggctggatggggcagggggagagggactgccctcacctcgcactggtgcatgagctggaccaaggagtccccgatgaagacgacttcgggttccttatctttgctgtcagccacgaaccgatggtgctgcgggagcgcgcgagagggagtcaatggcatgcacgctccagggcccgccccgccctgctcccttaggcagcgcctcctcaactgccctcagtttcccaatcaggtagtgagagtggcacgaaccagccgttctcctgagccaccccccgcgcccccggactcctcaatatcccaggtgggaacgctcaccagggacatccagcgcccgtcgccctgtacgtcctgcaccggcgtgggcttgctggctgggttctcctctccactcatcttggcgccgcagctcctgcaggatgagcgagtcgggtcggcccgggagtgttccgaacggagctggctccgccacgcccactcctacccctcgcggcaacaaaggaccgtcccaacgctagcacacccgcggaggacgaaggccgatacagggcgccgcctcctctccagggacggaagccttcacttaggaggtaggtggaatcaggaaccttcgcttcccccacgacggccgcacagtgggctcgcccggcgcttcccgctcgggccgctgactcccaggccgcgcacccggcacggggtggggggagggagaggcgagaccatccagctcccgaggcggggaggagggagaaaccacccaccggtcacggggaggggcgaactacctgaagagtcgagagtgggcggggaaaatctagccctctgtctagcaaatgggaagaaaccatttgctgtacagagtgaaatgtgcggaagggaccacctactgttgcgggggggggggtgacccattcacgtggtggggggaggggagcgagtggacgagtccattcttatattcccttgaaggggtggctcgaatgcacctggctgggggggacgctcctattttctactgatgtgggggacagaaaaggaagatgacaaaatgtgaaaattcgaggctcccttctaaggagccactctaaggccgcgccagggctttagtgagcctatctactcgtgggcttcccctactcaaaacaccgtgggtgtgtgtgtgtgtgtgtgtgtgtgtgtgtgtgtgtgtgtgttgaaatctaaagtacatatctttgcattcaagacatcacaggacccctactcaaaacaccgtgtgtgtgtgcgcgcgcgtggcataacatataaactacatatctttgcattcaagacaccataggacctgcttggagggtagaagaaggtgcagaaagagaaaggaaattagagacgcctccagggctcaggtccagtctggcgtccctccggcagatcatcttgcagatctgcagcctctacactctctctaaacccacaggccaactgggtatgtctgagctctgaaacctacatccatagccaaggccacctagggtcgcgcctctcccccaacgctgccccaaattaatctcagacctcagtgtcttctcagatctccctcttctctgggaccaggtggggggctcactccctgctaaacgtcctggtcatgttcttgtagcctcactccaggtgggaccttcccatgtattcattccttcgaggtggattgatactgagacagagatgagtgttattcattgtgtttatgttttcaatccactttcctggaactgggccgggcacacagtggttattccacaagtgcttgctgaatgagtagtaaatgagtgggtcagctcctgaccttgtcccaatgtgtttagggagacagatccagacacagaggtgtaggggtgtcaaagttgtgtttgagggagagacagggacctctggggaggaagaggagaaggactctgaggactatgggtttcctaggagtagtatctcagctgggtctgaaagataatgaagaatgggcaagcagaaagaaaagacacaggtaatcactttcttattaggtttggggaatatcgtggaatagcttgattttaaagtctgagggaggccagcatggaggctcatgcctgtaatcccagcactttgggaggctgacatggtcggatcacttgaggtcaaccagcctggccaacatggcgaaaccacgtgtctactaaatatacaaaaaaaaaaaaaaaattagctaggcatggcagcacacgcccgtagtcccagctacttgggaaggctgaggcaggacaattgcttgagtctgggaggcagaggttgcagtgagctgagatcgcgccactgcagcccagcctgggcaacagtggcccagcttgggtgacacagcgagactctgtcttaattacaaaaataaacaaacaaataaagtctgagggagccaggtgcagtgatgcatgcctgtagtcccagctactggggaggctgaggtgcgaggatcgcttgaacccagaagtttgagaccagcctgggtaacacagtgagaccctgtctaaaaaaaaaaaaaaaaaaaggctgggcgcggtggctcacgcctgtaatcccagcactttgggaggccgaggtgggcagatcacgaggtcaggatcgagaccatcctggctaacacggtgaaaccccgtctctactaaaaatacaaaaaattagcggggcgtggtggcaggcgcctgttgtcccagctacttgggaggctgaggcaggagaatagcgtgaacctgggaggcagagcttgcagtgagccgagatggcaccagtgcacttcagcctgggagacagagcgagacgccgtctcaaaaaaaaaaaaaaaaaaaaaaagggcaagtgcctgtagtcccagttagttgggaggctgaggcaggaggatagcttgagcctgggagatgaggtggcagtggcccatgatggtgtcactgcactccaggttgggtgacagagtgagtccctgtctccaaaaaagaagtcataatcagctaggcacggtggctcactcctataatcccagcactttgggaggctgaggtgggcagatcacttggcgtcaggagttcaagaccagtctgaccaacatagcaaaaccccatctctattaaaaaatacaaagattagctgggcaaggtggtctgcgcctgtagtcccagctacctgggaggctgaggcaggagaatcgcttgaacccgggaggtggaggttgcagtgagttcagactgtgccactgcactccagcctcagtgacagatttaaattccatctcaaaaagaaaaggaaagaaaagaaaagaaaagaaaaaagtcttaattatgccttcaagtcagtgatataagagagaattttttttttttttgatagagtctcgctctgtcgcctaggctggactgcaatggcgcgatctcggctcactgcaacctctgcctcccaggttcaagcgattctcctgcctcagcctcctgagtagctgggactacaggcgtgtgccaccacgcccggctaattttttgtatttttaatagagaagaggtttcactgtgttagccaggatggtctcgatctcctgacctcgtgatctacctgccttggcctcccaaagtgctgggattacaggcgtgagccaccatacccaaccgagaaaaaaatttttaaaaataaagtcttagaggataagttggagcagttcctgaagcaaagcttagtgagaaacaaagcttccaggcattcttcattcaccaggcccatttcaagttagacatattggtctagtttatccttctagcaaccaaatgaggaaggtagttttattaccaacccaattttacaggtcagaaaactaagtctgaccagttacaaacatttccaaggtcacacagcccagttgtgccattttgggcatttaaaccaagcctagctatgaatcacaacactacactaacttttttttgagatggagtctttctctgtcacccaggctggaatgcagtggtgtgatctcggctcactgcatcctccacttcccaggttcaagcaattctcctgccccagcctgctgagtcgctgaatatacagtcgtgagccaatgcatgtggcctaatttttgttcttttacagggtcttgccgtctccctcaggcgggcgtgatcatggctcactgctgcctccacctcctaggcttaagtgatcctcctgcatcagcctcccaagtagctgggcccacaggcaagagccactgcgcccagcttatttatttatttagagacggagtctcgctctgtcgcccaggctgaaatgcatctcggctcactgcaagctccgcctcccgggttcacgccattctcctgcctcagcctcccgagtagttaggactacaggcgcccgccaccacgcccggctaattttttgtatttttagtagagacggggtttcaccgtgttagccaggatggtcttgatctcctgacctcgtgatccgcccacctcggcctcccaaagtgctgggattacaggcgtgagccaccacgcccaaagctaatttattttttgtagtcagggtctccctatgttgtccagggtggtcttgaactcttgggctcaagccagcctcctgcctctgcctcccaaagtgctgggattacagacgtgagccaccacgcccggccaactgtataagttttctagggattatgtctgtggctgcttgggggacagctgtgcatgggggctaccatgacccttcttccctttggcacgcctggtctcaactagccctcgaaagaccgctgatagctatctgaaccaatcagcattcaggaagggggcggacctagtgaacctcacagccaattgagggctgggaggtgctgagaccaagaaagggagatttctgaaattgaggctgggaggggaggggctataaccggcgcttccctggcacgcgccgctaggtttccgtcctctcagagccacgaagccaaagggcatggaaagggcacgcgcatgcgtgtgggggagcccgaggcccggaacagcgccaggtgacttcgagagctggggtcaccgcggaaaagaagccattgcgccccacagctacgtgaagtgggaagggccggggttcgttggggcgagagaggtgcccttcccacaccctgctcctgccaaccgtaccccactcccttcactctgcccaccctgccctaccgcggctggccaccatgcttcctctcctaccctaggcccttcctttgtgatcaggccctgtccctgatcgcgcctctgtctcccttcctgttctcttgaggttttctcaggctttccagacttctcttgctgctctccctctcctgcttctctttctctactatctctttccactttctgcattcccctgtacctcgtctacccctggatttctccgtccagaatcactttctggtcccccaaatccctccaatctcatgaccccttcaccaccctccatcttttgttgttgttgttgttgttgttgttgttgagacagagtctcgttgtgtcccccaggctggagtgcagtggcgcgatctcggctcactgcaacctccgcctcccgatttcaagcgattctcctgcctcagcctctttgagtaggtgagattacagtcattcaccaccacgccggctaatttttgtatttttagtagaggcgaggtttcacatgttgcccaggctggtctcgaactcctgacctcaaatgatctacccacctcggcctcccaaagtgctgggactacaggcgtgagccactgcgcctggcccccaccctccatcttttttttttttttttttttttttttttgagatggagtctcgctcggtcatccaggctggagtgcagtggcgcgatctcggcccactgcaagctccgcctcctgggttcacgccattctcctgcctcagcctcccgagtagctgggactacaggcgcccgccaccgcgcccggctaatttttggtatttttagtagagatggggtttcaccgtgttagccaggatggtctccatctcctgacctggtgatccgcccgcctcggcctcccaaagtgctgggattacaggtgtgagtcaccgcgcccggctcaccctccatcttttaactgtttccccatgtccctgttcctaatagcctctctctgtttcctggcttatcttcccattagctgtgactccttcgacttcatcttacccctgtgattccttatctgaccaaaccttttccaatctctctctgctcacttattttctctcatcttctctctctcttttaagagacaaggtctcactctcttgcccaggctggggcacagtgatgcaatcatagctcagagtaacctccaactcctgggctcaagtgatcctcctacctcagcttccctagcagctgggactacaggtgtgggccaccgaatccagcttttttttttttttttttttttttttgagatagagtctcactctgtcactcaggttgaagcgcagtggcgcaatctcggcttactgcaacctccgtctcctgggttcaagcgattctcctgcctcagcctccagagtagctgggattacaggcgcgcaccatcacatacagctaatttttgtatttttagtagagacaggatttcggcatgttggccaggctggtctcgaactcctggcctcaagtgatctgctcgccttggcctcccaaagtgctgggattacaggcatgagtcaccacacctggcatcatccagctaatttttatttttattttttgtagagatgagggtctcactttgctgctcaggttggtcttgaattcctagcctcaagcgatactcccgcctcagcctcccaaagtgctaggattacagatttgagccaccatgcctggcctcatctggtcattctaaatagtattcccaccacaccccaaaacatctccctattcacttgttttgttttgttttgtttttgagatggagtctcactctattgcccagactgaagtgcagtggcacaatcgtgactcactgcaacttctgccttctgggttcaagcaattctcctgcctcagcctcctgagtagctgggattacaggcgtgcaccaccatgcccagctaattttttttttttttgagatggagtcttgctctgttgcccaggctggagtgcaatggcatgatctcagctcaccgcaacctccacctcctgggttcaagtgattctcctgcctcagcctcttgagtagctggaattacaggtgcatgccaccacgtctggctaatttttgtatttttagtagagatggggtttcactatgttggccaggctggtctcgaactcctgacctcaggtaatctgcctgccttggcctcccaaagtactaggattataggtatgggccactgcggctggccaatttttgtattttcagtaaagacagcattttgccatgttggctaggctggtctaaagtgacctggcctaagtgatcggcctgccttggcctaccccagtgttggtattacaggcataagccaccgcgcccagccctccctattcactttgctactccccttgacttatctgcatgctgatggccaccctatctttatattccaggacaccatggatacccagggaccagtctcccagccttttcagcagcctgagaaacctggtcgtgtccgtcgtcggaagactaggcgggaacgtaacaaggccctggtgggcagccgccggccattagcccaccacgatcctcctgtggccattcgggatccacctgtggtccctactgcctccaagctcgtggtcataacccagggccggctgagccgggagcaccggggtctcttcaaccacgaggtgaaatccctagatgttgcaaggctgcttagcagtgggaccctggtgccaggcagccccacactccccgccaagccctccccaagcccaggcagggcccaggaaccagccccacggtccagggacaaagagaaccaggtgcctggaggttcgggcccaggcccacccagttccccagagttgtctggcgtggggcagctgctggcagagctgcagtgtcagctgagtttgccacaggccttcccccggaggaacctgattcaggatgccagggatgccatcgtgcacaccttgcaggcctgtcatggttgtgtgcctgaccttgccctggtgcttcggggctgccagccacccttgccaggtgagcgtccctcctgcccctgtactcccctttcctttgtcggctctagctcagctagcctctatgcttctttcctctgtgccaggggccaagcctggggtctctgagagaaagatgacacccttctggattaatagccctgatcaagtcccagagcaggagaggcaaaggaagcaacaagggacaaaggagttcaccttccccatgccctacacctccagcatgcccactgcgcacagggggagtctggcaccgccaagaggtccctggccaccatactttccctcactgtcttcgccatctggaacagcctggggtcccccaacagcgtttgacttgttaaaaagcatctggctggtagccacgccaccccctcctcggccctggggggttggcctccctcagcccctgcctcagccttcatcacccctgttgccccgaacctctgtcctggactggagccccagccccccttccccactgcccagcctctcctgggtagtagcccagagcagtccggaagcctggtcttttccacccatgagactgtactgaggagaggctgaggctagggctggggacagatatcttgtactcccagtgacctcaataaagtacttttcatggtcctcttga

SEQ ID NO: 7146 - DNA, 2804 bp, Homo sapiens
gaggttggtaattttccacaattggattgtcattatagacagcagtgtgttttttagaaagataagagaatcacccctatgctgctgagatgtacatttgtaatttatctgttgcatacttagtttttagtcctgtaaatgcaaacacagcattttttacaactttctttgttcttggtacttatactttgaactatgatgtacatatttatggcttttggcttttaatataatggacttgcaagggctgccagaggttctgatatgtaagaaaactgcaaaaacaaatatagacaaatattttgattctagagaacgtctcagatgtgcttataaagcttccaaatacaactccagtaagacatccctttccctgcaggagtgtggtctatattctttagatagttgtttagtcaaaagaccagacaagttacaaactaagagaaacaatatttcacaacacagtaaagtgtgatgagaggtcaggggaacatcccagtaaaagagaagagtcacaggaagctcatctcctccctggattctggattaggagcttctgaatcttttccagggataggcaggtagctcactcttggtgcaatttcttgaggatgggaacatgtagagctgctggaaggagtaattctgtgcttgacaaaggacgatttctcctttatcgtgaccagtgctgccgatttcctgacagaggagcttacactctgagcaccttgttttagcgaactctagcaaaacttgtttagcttagcaaaaacaaacacacaaaaaactgagaactctgctgtttcagatatgccataacatacatctgaaacacatgtgtaacaatcaaaatggtgggctctagaatggttttggagctcgagatcttcatgggttagacttgctggtcagacccaggagcacctgtggctcacaccttctgttcccctcctggcctgtgcagaatgtaaacagcagactcatactcaatgggcactacaggccttatcagacgttttatacaagcctggattgcttagtaggggaataaggcattctctgagggggctttccacttagattgagaattttatttgaaaagaatctggtttaaatggcattgtggtccgaggtagctgctctccccactgagagctgagccgaaatataagaataatatatttgtgcttcgagttggtgtttctttcagtgtaatgcatgcagtggtcacaacccagttactcataatatttggattgtatttgttcgtagatatgcccagaagactagagaattagtgttatataccatatagaacttactgtcagtcaactataaacaggcccaattaaaaactgttccattactacgcaaacacatattagaggcctttgctgatgacacattagctggatcttagccaccccagaaagggtttgatttgaagctgattgttgccagatatgcatattggaatcccatctacccatagttcctctgaaggtgattttgtaatttgcaaaagggtataggaaaatatacctaaaagcgaatttgtggctgagaggataaacagaagctgtttgctcatgttctgtgccccacacccaccaatacctaaatctgttaaggaagacagaaaatgttttctttgtgctcattgagtagttccagacagaagaagaatatactctttaaaatgtatttacctgttagttggaagtacccagaattatcagaaacgaatgcaaaaaaaaaaaaaaaaaaaaaaagcttacacagcttcttagcaatttttttttttttgccgaaacaataaattgcctttagcagcagtttaaaatcctatcgtgaacaacctatattttcgccattttacaatggagagttgtgacaagtacaggttatcaagtttgcacttaactatgccaaaaaaagtttgaagcgctctattctcagacatgctgtattattacttctcattcaagattgaaaaatataaaggtatccaaactctgtcttaatgtaaatgtaactatttttccttcaagtgttgactagggagtcggtttctctcttaaagacactcactgtacaactgaaagcagctgtcatatttctggcaaaatgtgtttacgtatctgacaagttgtacatttgtgtatgaactgacataaaatgtgaaagcctgtaagtgtacatgtagtggtgtggtgttctgtctagaggatacaactgaatgtttttaatttgctgacttacagacacaggctgtttacaaaatgctagctggaaagtctgtaatgttcatgtcataacttttagttaattgccattgagcacctgttctgaggaggtgagatgtggacttgtgcttataaactggagagtttagtcataatccctcctggctttgtgtgaatagcttgctcactttgctggcctttgaaatgtgttctccgtgataagctatccatgtgtttgtgataagagtgcttgtcaaccatgaccatctttgagccttcctagtcctccacctggcacagtatttgaaatggcaaaggatgtgcttcatcctctaacagtgtacactcccagagctgatattctggattttgactgtgcacatttcctctagttcatgtctgtagtccctatagaatgatctgtaataaaatagtatactggactgtgcatcaaagggatgtaaaattacagtattccaaaggttgaagttctgctgttttgttataatgcctgatacacatcttgaataaagtcttaacatttttcttttaaaaaac

SEQ ID NO: 7147 - DNA, 7695 bp, Homo sapiens
acaaacctgaaagtatcactgtttatttcacatttaaaaaaatcatcggcagaaactaggtagctgtgaaaatagaatagtccactggtagagtttcaattgtgcaaacagacgtttggtccatcatttttcttctctgaacatttcttcatctgcaaatgggggagtgcctgtgcaggtgacaacagggtggtgaagggccacccttaaacctgctgcagcccttacctttcacatctgaacaggcagactcaaacttcattgggtggccacaaagacttggaagctcaaaatttgaaacatcaaaattaaacacagacccaatttctttgcatttttagtcctgtattctatgtttgacaaaatcactgtaaaataaagcagcagtaagaaaagaagcagattcagaggactaaaagcaggaacagatgggaaaaaaaggctggaaatccattcgtttatttactgagcctggtccaatgtcaacagaactaggattaactaggttaagagttggcaaaggacaggaaagcaaagtaataaaatttaaaagctgaattggtacagtgttatgaagaagtgtttatttagtatttatagtaccagattacagtcacttgttgatttagatatgaattttcatatgttagaagactcagggaaatacacaggatcccaaggagtgagactgagattctgggtcttattagctgtactttgggtaatttacttaaccctctctcagcttcagtttcctcaaatctaaattagggcttaactaatcattatgtcctttgtaagactggaaatgtggattagcagttagacagtatgtatgtacccagttttgtagatatgctgggacatagtaggtgttcaataaattatacatatacctgaataaacaaactatacataaatattttataaattatacatataatcgaacatcatttaggtaaactctttaatgaaagacatttattgtcagattataaaatcagtgttgatgataagccctcctacccacaaaacaaaaatcgtatgtatgaaattccctttcccgtaagttatgtgcctgtcagccatcccacttcagtccatctttggatgctgaggctctggttgccagtccttatctctacacctgtccctggtctagaggagaaacgaaggtgctctgaggcccctgtaacagagacccttgtcatccatatttgcaataaagacatcatggaggctgtgcaaaagtatccttctccccaacttctgcaggcaccatttccatctcactacccagaggtacatcagagagcaggagccaggcaggtgacaaagatgtggaaggcttctaagtggttggctttgccgtctcagaagtgcgaagaaatgaaaatccatcaaaacagaatgccattccatgtttcaggcttttacctcacctcaaatcaaatgtctgttctttatttattggtcccataagtagacacgcacttggacttctggttttagaacattctattgttatcctttctccttttaataaacacacactagtttcgaggaatctccctaataatcctggcctgacatgctgcagaacttcaatttcataattttactaacaacagaggaatttcatcttattattaccaactaccacattaaaggatctgaaacagtaattcatgcataattctatttaataatggttttcaaagtactttgctgtttgaaaatgcttcccagatgattctgatcggagagttgggaaccactgccctagactgtaaccactcaattgaactttactcagtgctgcttccctgcccacttcaagtaaacaatgcttaactttttcgtttctaaaacaactgagattactttctcccccttagtttctacaatgattgttgaaaatttgtgggaaaagtttatccttacaaatgaaaacatgaaatctgaagtggataaactaacttttaagaaatacatatccttactcagtaagctgaggcaggaggaccacttgagcccaggagtgcgaggcttcaatgagctatgattgcaccactgcactccagcctgggcaacagagcaaaactcctgtctctagaaaaaataaatacctatctttcaaaacttgcataaaaagcccttgtcttcacttgtacagcctcttctgtttcatgaatgagcatgctgaagggctatttactctcctatgaaaaaatgttgttacagtaaatgacaagtgttatgaacacaatgaacctggtgtgttagatgttaagtgtgctgccaccccatgtgaacctccaagtgaaactgctcacataactgtttttttgctgcatgcaaacctgctaatacaaagcgggctcctgacttaaggacagccaatccctactctagacaatgacccaaccagacctagtataaaaaggtagtctggcccagttaaattcccttggcaattggagactagcagcaggagctgaaggtcatcatgtagaaaagaacctcaaaggtgcaagttaaagttattacaaaggaacagaaactgtaagtatgcaaaagctgtgtagagaagttggtgaatagagagaatggagttaacaatgcaaaaagaagcaagtcacatgcatgcagagcccaagcctaaacatccaccttcccctgctgaggagcaccacccaatttctactcttcctgaggctgggaggtgatttctgagtgggagatggggttggtgaggtggttcctgaattccctggcacatatccttgaaataatgtcacattgcttgagctaacttgtagcttttgagtctttttatgtttgtcccacttgagattccttgcaactaaaagagcataactgaaacaactagttaagccaataccatttgttaaaaataatgcaccattctaaatttctgtttccctaaccaaatctggcaaagtctgatccattaagttttaaaacttttctaagtttaatgttgtcactgtatgtttacgtattcattggtacaatttacatcaagttttgtacttatccatttttgcaaagatatgtacacaaagatacatatccaataactgagaaacaagtgaaacttctgatctatactttcaggtttgttcgatcatgatacttctgataaggatcatcaacgtaccagtttcgcctcttccagaaggacgtcgtcattttatctaagagtttactctgggttttattgcagaatacaaattccctcaatcgcttcttccttgcaggtgtctttttccataattttttcttatagccagcctgtcagatattacaaagaaatgtaaaacatcatactatgtatgaaacaacaggtatcttcacaactcaaggtttatagacccaataagaacaaaaaccagacttccataggggctggactatttcttggaaagatgtgattctcaatggccgggggaagggagggtggcggggagggggatggagaaagcatgtgtagtttaaaaaagaattagtaataaatcatattttagaaaaaaattatttaaattaaactcacagaaaataaaactaaatgtgtgtggctgggaaagtacaagataatgacagaattataatcactaacttaacaggtatgatcttactatctcttcagcaatctttaacaacatactattattctattttacatctttaaaaaaagaaaccattgattagagaagtagcagacagaggtctgagggctaataagagttctttttttgtttcattttgagacagggtctcactctgtcacccaggctggagtgcagtggcatgatcacggtcactgcagcctctacctcctgggctcaagtgatcctcctgcctcagcctctcgtatagctgggaccacaagtgtgcaccaccatacccagctactttttaaatttttgtagagataaggtctcaccatcttgcccaggctaataagagttcttaaccactgtctttcctaatgtagaggaggatggagtgcaggcgaggtaacaacattaatatttattaaggaggctgagtattacaagagctgagaagcacagttctcaaatatattgcttcatttattattttcacacacaagggaccaatttttataggaagtacttttctaaggaattatgaatatggtaagactattattaggagtggtgaaggaatggttaacccacatatttaacccagaactttcatatacacccatacaggtattattcattttgaagaatttatttttaaagacaggaaaggaaaatttgattgattataaaaactataatcatagcctgtttaaactagaagggatcttaggtgccatccagcttaattaacatctggctaaaaccacacggtgagcccttgggtcctttcaagccaagggctctttatggcacaataccaactgaacaaaaccatggctctttgccgagaatgtgccttgcatttctgacatgtcttagtatcatcactgtgaccatcaacttctataaggacagtgatgaaataaggaaaggttatttaagagttctggttttagaatgctagaggttagatttttgctactcactgcttacaattttaaatgcaaacatttaaagccaaatctccacatttgtgtaataatttcatagtttgcaggccaaactgggttactatggatctctgacgtacaaacacctaatttattgccctgctcattaccaccagtatcctttaaagattattcacagaatggaaccactatgaaaatgcttgaaattttttagacaatctctagattcaaaaatggaaggagggaatgaacaataaataccaaggactgctggatgaaaccgtgtcatggaaaatactttgttttacacattagtttgaattcatctacccagattttttttttctctgaaaattagattttgaagaggcagggcattctatacagggtatactttcgggagccctgaactgaagctaggtattatgactggagagtatgatcgggtcctttacagtaacatgagggccccagagcccagtaagagggacatggaaaggaaggcaaggaaacccacccatttcattttacctagggctagaagaggacctggaaataactggtataaaaaccaaagggtggggctaggcgtcacggcccatgcctgtaatcccagcactttgggaggccgagacaggtggatcacttaaggtcaggagttcaagaccagcctggccaacatggtgaaaacccgtctctactaaaaatacaaaaattagcctggcatggtggtgcatgcctgtaatcccagctactcggaaggctgaggcaggagaatggcctgaacccgtgaggcagaggtcacagtgagccaagattgtgccactgcactctagcctgggcgatagagtgacactttgtctcaaaaaaagaaaaaaaaaaaaacacatacacacaaaagggaagaaatgtttccagtggtctcaaattcacaaaactcagaacattagacctttagtttagctgctttatggattatatgagcttctgctgactggtgtaggaaactacccaccacagtgtttcaatagagaaatgagctgagagttccaaccaacccatttatctactaatttagtactgtttataaaacgggagaatcctttcaacctttcaaacatcaagaaagttctaccaactattttatttttacagggaaccaaattttgatttttaaagatttaatttccaagtaatgaaagggaattaggatttgggcagttactaaatctcaaaaatggttttgcaaaactggtcttaagctgctttcttttcattttttgagatgaagtcttgctgtgtcacctaggctggagtgcagtggcgtgatcttggctcactgcagcctctgccttccaggttcaagcgactctcctgcctcagcttcccaagcagctgggattataggcacctgccacaacgcctgacctcaagtgttctgcccgccttggcctcccaaagtgctgggattacaggcatgagctacagtgcctggctgaattctgaattctgtttgattttaatctgctcacactccttttttcttttcttttttgagacggagtctcgctctgtcgcccaggctggagtgcagtggttcgatcttggctcactacaacctccacctcccgggttcaagcaattatgtgcctcagcctcccgagtagctggaattacaggtgcctgccaccacgcctaatttttgtatttttagtagagatggagtttcaccatgttggccaagctggtcttgaactcctgaccttatgatccacccgccaaagtgctgggattataggcgtgagccaccacgcccggcctcacattcctttttcaatttagtaacagtgtgaagactcacctttctcctcacccaaaggccacaatgaagtcgaagaaacctatcgatgacagctttcacggtctttctcttgccttttcttgcactgaagtatgttagagatctgactggcagcttcaggacacttggaagcacgggggccattctaaaaatatattttaaaatttttagcttgtaatcagactgattaaaggattaaaattcattatctatactgagaaatgagtaaagctgctccaatggactggaactaacttttcatatacaatattacttccaatgacccatgacattaagcataaattagaatagcaaccatcaccaactcgcaatcttctaaaacctaccccctcaatccctgtaaaataattcattctattatcatcgctttatttcttatccatcttcccaccagattgcaaactccttgaggacttcaatttgtttacccttatgtcctttttgccaagtacagtgctaggcacccaggggtatttaactgagtatttgctgactgaatgaccaacacatgcagcccatccttataagctgagcgtcttgtgcaccctccactttggatgacagcctccatgcaggaaagcacacatacaacatcagaagcatgctgtgtttggcattttcctgctgcaggcgcctagatacatggatgtcagtcacagtctcccactcaatcaagcagatgtctacataattaactgcaggtaggcaaagaataccacctacttctaggatacccctgcaggcatgaatatcttggaaagtttgtctaagcatcatgtttattgaaatagactctaccagccaggcacagtggctcacgcctgtaatcccagaactttccagctacttaggaggctgaggcaggagaattgcttgaaccccggaggtggaggttgcagtgagctgagaatgcaccactgcactctggcctgggcaacagagtgagactccgtctcaaaaaaaaacaaaaaacaaaaaacaaaaaaaaccccacaaagaaatatactctacctattaaggatcactgaggtatgcccacatgtcaggtttctctcagatgtggtaagtctgggagtggaggaaacaactggtgtctgaatatgactaaaacgtccagtggacaatgcagaaataagagaggcattcttgacacagttgcggtaggttgaagatgccaaaatattcaggggccgtaggattcctg

SEQ ID NO: 7148 - DNA, 3047 bp, Homo sapiens
gctggatttcatgtacaagtataaagcacctcgaaggatggaattgcccctggaggtacacagtgtctggggctgtgggttggagtgtgtttgtccaaaggctatgccctggagattgggggtcctgggagcagcatctcttggggcaccaacatctcctcaatacctggggtggaaagatctccttccatcaaacaagcagaaccagtcactggatagcatccagctacttgccaaggagaggaaatcctattaatttcatttagaaataggagcgtgagccgggtgcagtggcttatgcctgtaatcccagcactttgggaggccgaggcaggtggatcacctgaggtcaggagttcgagaccagcctggccaacatggcaaaaccccttatctactgaaaatacaaaaattagccgggtgtagtggcgcgcacctgtagtcccagctgcttgggaaactgaggcaggagactcgcttgaacccaggaggaggaggttgcagtgagactgcactgctgcactccagccgggatgacacagcgagactccttctcaaaaaaaaaaaaaaaaagaaaagaaaaacaaataggagagtggtaaagtatctaggtctttattgttttgttttggtttttccaggtattaacaactaccactctaagttgacgtacaagtgaaaaacaacccaaattgactgttttgggggaagaaaactcagaatgtgttatttgaaaagtttttataaataagaacaaggcttgttcatcgctgtatctccaagacacagcatatagtgcctggtataaagtagctattcatgaaatgttagtgaaggggtatagccctttagggttaccaaaaccaatacccttgacatatatgctattttcagttgtaggatgtggatggagttctggcagcaggagggctgagcctggagcctcctgggccttgctctgtgatgtgggtagggagtcaccagtcatgagcacaggtgcagggaccccagtctttctctctgcttcctaaggtctcctctcctattccccatctgctgagtatcacggcctgagaggccatctgaagcaaataggaagtctccgtacagacccttgtgagacttatatggggagatgccttgaaatgttcccttctgcagacactgagcagcctagcattcttatttgttaggactgtaattatgaccacctccatgtgcagttcatcaggttcctttgcaaggtgaggcacacatgcatcccttttaaagttagagggtttgggaaaggatgttctgggcttggacactgctggaggagtctggcctgggcaatctggcctgggcagcctcctgatggggagaggagcccagcctaaagaattctaaggcccaagggtttgtgctgttttgcttttgtttattaaagctgcacaaactgctttactgtttacagttcaccagcctgccaagaggcagattactataaaggtgggttccgttgtttccgttttcagtgtctgtccagaggtggctggtaagcatttcctagtggtaaggctgtagcatgaggactctatgagagggcctgagtcttgttttctggctcattcacttcctgccttgtatgtgcctgcccagcactgagccacttaccaggaaatggtggtgaatgcgacatgggcctgccctcaggaagtccccagtctggtggggagagagtgagcagggcccccacacactcccttcccactgggtgcaaagtcctctgctgggggacatgtacaaaacatgagagaacaaaggaggtgacgatgcctggttgtgcatggctgggcagtggcaggaggggctccgggaaacctttgcagaagtgacttttgagctgggtcctcaagaggcctagaaatatgcaagacagaggagggagggaagggcttccagtcagaaggaatagaggcatgaatgggcacagtgtagagaaagaagttctctgtgtatacagagaagtggacagacacgggggccaagggtaggttggggccagttgtgtgaaccccctcaagtgctgtgccagaaaatgttcccttcactttcattgaaataggaactcctcctgtgatctgtgtatcccatggaaggaggggtctcttgagagtcatttgtgggagagatgaggtggagcccttcatataagttgagcatccctaatcgaaaaatctgaaattctttgagtgtggacaagacgcacaaaggtcatgctcataggagcattttgaatctcagattttcagattggggtgctcaattggaatgtatatgcaaacatcccaaaatctgaaaaaaaaaaaaaaaaaatctgaaatcccaaacacttctgactccaggcatttccggataagggatattcaacctgtacttcaaggtggtgtttgcctttgtggtgtggtgtgctgtacattaagaggtttctcatccagaaaggggactggaaatttgatgatggaaatttgaggcatgtaccaaaacacattaggctggttcccaaaggaaataacaaaagcaaaggaagcatgcggaggtgtctctttctgctgaatcatttaagataattttgctcctcaggcagaaacaagaaagatgtgtcattctgcacaaccgttcccttgggagattgaggagcataatttaagagggaggcatcagcctctcaaagggctcagcttcatgcgatatgtgggatgggactctgatgattgcttcctgttgcggagattcagggagaccccagccctagccagctgcatttggccaaaggagctggaagtctcaacacaatgccttccaggtgctgacctcaaaagatcccacatttacaccaaactgagggacacctttctgttttctctaccaggcaccgcctagaatccttcgatctcgcttcaggaagaaaagtacctcatcctcggccaccgaaaccacgtgagtgagatgagccaacagcaccggatccacagaatgtttcttctctgccttaaagagctatt

SEQ ID NO: 7149 - DNA, 6455 bp, Homo sapiens
cggaggctgccgtggcgggtgggccgcctgacttctcctcccggccagttctcgagcgcctcaccgggcctcgccctgcagcctcgctctcgctggcgctgcgcggcctaggggactgggctgctggcctccgggtgcggggtgggggcaggctccgacctggggcgtcctggccgcgcgagccgcgggatgggggcccgggccgcggaggaggcgccgctggtgtgtcccttggtggagagggcgctgccggccctgcgcggtttccagccaggaagcttcgggaagcctggtgagagctgagtgcgcgaattcggatcttagagaaaggcaccccgttcacccacgacccttccgctcctgccgctgcttccctgagtcgctcaggctgtgggaagatgtttgtcggcatctttgaaaaattgatttcttatgctgcgtcaggtggtttccttgtcactgtggctgctcagcgggaggctgttctggcgggaggaggactgctcggttgtctggtgggcattccgcctcgtggtcctggtcccttgatacctgcaggggatcagcagcccgcgtttcgtggccactgtgttgtaactccaacttcccctcccgcaaattaagcgtagagtaaggggagagagtaacatgggtcggatttttctagaacggcccttgtgacagtgagctttttggtggcagggagcttctttggtccgccttcctggagaccagatgcagcaaaacgcagtctttttcttttcgagacagagtctcagttgcccaggctggagtgcagtggcgcgatctcagctcactaccacctctgcctcctgggttcaagcgactttcctgcttcagcctccagagtagctgggattacaggcgccagccactaggccagctaactttttttttttttttttttagagagacgggtttcaccgtgttggccaggctggttttgaactcctgacctcaagtgatctgcccgcctcggcctcccaaaaaacgcagtgtttatgtgatgctcctctgtggtgtttgcaagatttatacaaaattgcggtttctttttttctctaggacgtctgctcactggagatgacacgtgcgtggggtgttgggtaagttggtgcattggagctggaacagggtcaatcctccaatgtaactaagccctcctgtgcaacatcttaagtgactggagggaccagtcggtcttgtgttcacattgaggctagaagctgtctccaggggagtaaaaacggattatttagtcttcaacaggacactgcccctagaggcgttgcagctgtggctgccgtgtcacatctgtgtcattaggtggcagagattagagaggctatgtctacgctcagcgttctgccccgtgaacgtttgaatgtttgatagtctcacactcctgttttgtggacaggcatctgttttccttcgctggtatctgggagagagggtgggccctgtgagtgggctttctaactctcgcgctgggctaggctggcctctaggggtctgaagggatagtgggaaggtggagggtgccttcaccaggagcagccttcatgagtgagttttaagaacctgtgaggatcggtcaggtcaggtgaggtacgcgctggatcatgccgtacaccgtgtcaggatcacgcaggacaggactggggaagggtttgctggcgtctcggttaatagcagtaacggcagccgcttgtgttcttgattctttgccaagcattcttgttatttaacacgggaaggaggtgacttcgcctgtgatggacttccagtgtgagcactggccagagtgaccaggctgaccagcaccagccctgatccaggtaagaggtgaggcggaggcttgccctccttccctgcctgccgggtgcgtgtgagcggctgccctgcggatgctgtcctggacctgttggcaccacagacagttgctctgctgtgcctgtggcctcggggcaaagagaaagtggcgatttctacactcagtgctcgggaaccagtgggcactgagaatggtttatggcctgacattacttgcaaccaaagccaggcagcatttggattttcgcttttggaaaccaccttacctggtttgctccatgagggaggggcagcaacatcgctgggaaccctgaggtgtagatatgtataaatgagctgtgtgtgtatctgaagctcgggcacttgtggggttaccaggagtgtgcgtctcactcccaggcctcgttctggaaacgattctgtaggtctgtctgggaggccttaggcaagtttgattaagaacagtcgagctggataaacaggctgttccttgtccagcactagtcatcccaggggggcgggggcggggctgcaactcctgtgcacaaaggaagggccctgggtaggggtcaggagctgccttgcccagagatgtgtctgggtcactttggaaacaggaatcctctccccaaaatgggtagcaatgggggtacagaggccaaagacgcagctgcatgtcctgcagtgcctgggacgccccgtagtgaagagtgatgtggcccaaatgtcagcagtgccagtgtcagactcctgctaagagacagtatcaagaaagataacttcaaaatacactttctggaggcctggcgcggtggctcaggcctgtaatcccagcactctgggaggccaatgcatgtggatcacctgaggtcaggagttcgagaccagcctggccaactgcctgaaaccccatctctactaaaaatacaaaaattagccaggtgtggtggcgcaagcctgtaatcccagctatttgggaggctgaggcaggagaatcgcttgaacccgggaggcagaggttgcagtgagccgagatcgcaccactgcactccagcctggacaacagagtgggactctgtctcaaaaaaaaaaaaaaaaaaaaaagtacagtttcgggatttcataaattgggttccctgagggtcatttggtgaatccgggttaaagaaccctggtctgcatcactgtccttgtttgtttttcagatgcagaggccaggatgtgggcccagccctgtgccaggaggctggctggaataaaggtacagatagaggcctcaccccctctgggaccactggcactcagggtgtttgcagcctcagagcccacctgcccccagggccacagctgcatctcctgccctgctgtcattacagggatgggcaggctggcatgggggcagccgctgcccctgcctgggtgttgctgtgtattcctgccggccaggggccactgccaggaccacgcctcccttttcatatcccgattcttaagttctgctattgtggtattctggtggagaaaaaagaaccgcgtggctgtttttgaactgcctggaacctaagaccctgaattcttttcccccccaaggggaaaatctatatggaaaacatttattttaaaatacaggatgaagtgaattaaaagatttaaatgcacatttctttaaggataatatttctgtgttggcaaaatttgagagtaaattggtcttgaatggaatggattgtcttgactcacacattgcggagcagagcccgccctgaagaaaggtgttgctgtggtgggatcttcccacgagggtccttgcctgttctcctaggggatggttgctgggtgccctgggctactggggagagcgtacggggctggagaagatggccattcctgggctgtttcctagggaatgagttgtacatctcatggctggattttgtaaaatcagtttttaaaataccgcatatatctgttttcttactggaacacctttttcttggtctgttgtgcacagcccaggtttggggggtactggtcattgactgtttcagaagccgctgtgtttggggaactgccctggcggcttcagaggtgtgtgtgggttgaagggcaggcagctctgcaatagacctcaccttggactaacacctgagggctgcctcgccaggaaggattcaggggctcaaccccagcctgagtgcctgggctgggtggatccacagcggggcgaagggtcccacacacagcatcgatgggggctcagggtgctcagccctgggcattacataaaagctgtttattgacattacgttcttcagagtaacaaacccccttggaggactctcctgccgggatgtccatgtccgcctttgctccgagctggggtctcatgtctgtggtgctggaatccagagccctgacggtaggggagtgattttgcaacacagttgcatttcacatcttctgacaggattccttgagggagggttggaccctggcacctggccagctccaggaagggtggccaggcccctcactgccccatcaagagtacttggtgttggagatcttcttccagagcagagtcttgaggtggctgagcaccagcgagtgatgggcctccacctggctggccagcccgctcagcgtggtacaggtgcgcagctgtgtgcccagctcctcgcggaggtcggcgggcgcgccaggcagcaggtagccccgtagcagtgcgcacaccttggccaggttgggctggatgaggtcgcccttgcactgcctcatgagcctgtcacacggggccctgcagtcgcgcccgtaggtgcagtcggtgctgtgctcgcagcggcggccctgcaggaagcggcgcacggtggcctcgggtgccacctgctgcaggtcggccatcttgaagtcgtaggtggctgtgtagcccacgttggccagtgtggtctcacacatgtagaaagtcccgtaagagccgtggaagagctcctccacgaactccagcaggccgatggcgatcttggcccgccaaggccacgcaggccccagccactgctggagagcaccctgcagggcaggcggcagcagtgggcgcaacaggggtggaagggcggccgcgtgccaggcgccatgcggcacgccctcggtgaggtagaggtccccacagtagcccagcagtctggaggcgtgctccttctcctgcagggacagcagcagcaggaactcgttacgctgcagcagggcccacacggacttggcttccgccagggacacccggttgtccttgttgaagtcagccatgagcaggacctggccaaccagcgccggcagggaaggcaggtctcccaggttcgcctggcgtttgggaccaaaagaaaggaaaagccagctgatttgatgtctgggagcacgacctggcctttacctggtcctcctggcggggtggtctgccggccagaccagcacatctgccaggttaggggtcccagcccacagctacacgggtggaggacgcagccagcaatgtgtcagctcactctgctggcctgtgtggctgctgccagacagacctcccgcctcctggcagccttgggtgcacctggggagctcgggggtgggcacctgggcagagaagcctcagagcttccctgaggatgagaatcggcacagggcagagggcacgcactggctgaagccctgggaagcggcccctttccacaagccctggtctccattcggggcacctgccctgctggacacacggcccttgactgcaggagcctcccctcgacctcagctgccagcccaccggcgcccccaacccttgcccccagccctggagaggctccttccctggcagggctcatgcccaggggctgggggatgggaggtctgcccagggtccacttgggcccatctgtgcctttgcgctgggcatgttggtgccagggccgcctgctgggcatatgaccgtggtgtggactcctgccctgccccctaggagagctgcctgaccttgaggaagctgagggtcatctcccggaattccttgatggaggtgccccgggtgggcttgtcaaacagtaccagctcccgccggggggccgcatccgaccgggccttggagtcgagggtctcctcaatgccacacttgatggttacatccttgtcccgccagagcccgctgtacacctggacagggccacagaggtcctccgtgcagacatccccctcccactgcacgggcagtatcagccccaggcccacccgccctgccagtggctatacctgctggcccggggccaccgagaggcaggtcctccactccaccatatgcagctcacacaggtcctggcagacggagcccgagatgatccccttgcggtactggtcacactgaggagacaggtgcaggcgtgccgggcggggcagccacacccctgccccactgagcccctgcccacaggcccgaagctggcaggggcctccacttgctgcagttggaaagctgccagcccctcacacaggcagtgccggggccctgggtcatgccattggtggctgcaggatggggctgtcggctgcaggggcagccccgc

SEQ ID NO: 7150 - DNA, 14471 bp, Homo sapiens; identical to SEQ ID NO: 6620

SEQ ID NO: 7151 - DNA, 122 bp, Homo sapiens; identical to SEQ ID NO: 6621

SEQ ID NO: 7152 - DNA, 2688 bp, Homo sapiens
gatcccctttctctatgtcgggacactcattagcaagaactttgctgctctacttgaggaacatgacatttttgttccagaggatgatgatgatgatgactaacaggtaagacttgctttaccctagatggagcaggaagcagggtggagcatctgtctgtgatgcagtctggcctggtagcagcatttggacactgggggcagaagcattaatgaattggcccacttggtggctaatgttttcgtttgtttgttttttgagacggagtttcgctcttgttgcccaggctggagtgcaatggcatgatctcgactcactgcaacctctgccttccaggttcaagcgattctcctgcctcagcctaccgggtagctgggattacagacatgcgccactgtgcctggctaattttgtatttttagtagagacggggtttctccatgttagccaggctagtctcaaactcccgacctcaggtgatccacccaccttggcctcccaaagtgctgtgattacaggcgtgagccactgcgcccagccaacttcatgtgctctaatatgtgctgcatggcattctgtcaagagatgaggacactcctgttccttagcctggcattcaaggcttgccataatctggtcacacctcttattccagtctcatcttccatatttccagccacacaccgattcccagtattcaccatttcttgagttttcacactcatacccacccccaaacattggctcattgttcctcccacatggaaggctccttcccagagctctgggtcttaattccacccattctacagtgtctttgaagtcttcgttcctcctttcatttgaaagttgacggctccttcctctaagcaaccagtacctctcttcaaatactcggtattatgtggctaaacacacacaaagcaaaattttactagactctgagcttcttgctggcaggggacgttttttatacattgcggcccccagtgcctggcctgtggtgaatgcccagttaacgtgcgcatgaacaaccaaacgtgctcaaagctgcctttctcctgccatgtttgatagaagcactttgtggaattctttcagtctgcggatggaagactacgctgttgcccagttcactgctgctttcctttcttacaggaattacagaaaggagaaagcactaactgaagaaatggtgatgctctcagtttctctgccttccctatcagcagaaaggctcggggaaggccctcagcctcccagtctggtgaagcttcctgtatggtccatgaccgtattccaccccaggctctgggaggctccctgagatgtgctgtccactaagcactgcacaaacaagcaatcaaattatgaataaacataataaatatcagccgtgcgtgactgagtgatggctgcagtttctcagtatccctaggttctagttggtgcagttgtctctgctgtcctttatttatgggagaaacataggcccaggctatccaggctgcagtggagcctggtgaactattctgggggccctgggaactattttcattgtttacaaaagcccaacagaaactgtgcattttcccttaagaaagcttcatgggctaactaaagcctcatgccattctgtgttcagtgccagtcatgacagctctgcttgttagcatactacttaaatataactagaatgattcaaaactcgggttctgtgatatgaggatatagataggttttcatctatttcctggcttataactcccaaaacccttgttttaggcttttgttataatgttgggcacttcgggcctcagaaaacagcaggctgtttctcagatcttctcctgacctcctttcacctgctgctttttctccccaaggcaggccatagaaactaaaagtataatcttcctttgcccgtcttccagttggccataaaaagaatcctctgacctaccttgtctgattttaggtcatgagacccccatttcagaagggattctgccccatacctgagaggaagaaatgtagacaggccttgttggacttccccactccatctgtattagattatgcctcttttgtccaatcccatttctccagtgttgtccatgcttcaatcatccctatccaatgaggtctccataaaaggcccaagaagacaggtttagagagctttcggagaacagaacacttggctttgcaaagtggcacgcctggagagaacttggaagctccacgccccttctatacctcaccctatgcatctcttcagctgtatcttttgtgatatcctttataataaaccagtaaacggacctaagtgttcctctgagttctgcaagctgctccagcaaattaaaaagaaggggtcagccaggtgcggtggctcacacctgtaaccccagcactttgggaggccaaggcgggcagatcacaaggtcaggagagcgagaccatcctggctaacacagtgaaactctgtctctattaaaaaatagaagaaattagccgggtgtggtggcgggcacctgtagtcccagctactcgggaggctgaggcaggagaagaatggcgtgaacccgcgaggcagagcttgcagtgagccgagatggcaccactgcactccagcctgggcgacagagtgagactccatctcaaaaaaaaaaaaaaaaaaagaa

SEQ ID NO: 7153 - DNA, 35 bp, Homo sapiens
ggtgacagagtgacactccatctcaaaaaaaaaaa

SEQ ID NO: 7154 - DNA, 98 bp, Homo sapiens; identical to SEQ ID NO: 5449

SEQ ID NO: 7155 - DNA, 101 bp, Homo sapiens; identical to SEQ ID NO: 6749

SEQ ID NO: 7156 - DNA, 193 bp, Homo sapiens; identical to SEQ ID NO: 5245

SEQ ID NO: 7157 - DNA, 153 bp, Homo sapiens; identical to SEQ ID NO: 5246

SEQ ID NO: 7158 - DNA, 193 bp, Homo sapiens; identical to SEQ ID NO: 5539

SEQ ID NO: 7159 - DNA, 136 bp, Homo sapiens; identical to SEQ ID NO: 5560

SEQ ID NO: 7160 - DNA, 359 bp, Homo sapiens
gctgatgcctgtagtcccaacactttgggaggcggaggcaggaggatcacttgagcccaggagttcaagactggcctgggcgcggtggctcacgccagcactttgggaggccacggcgggtggattacttgaggtcaagagtttgagaccagcctggccaacatggtgaaactccgtcttttctaaaaatataaaactagctggatgtggtggtccatgcctgtaatcccagctacttgggaggctgaggcagggagaattacttgaaccaggaggtggaaggtgcagtgagccaagatcacaccagtgcactccagcctgggcaacaacagcgagactccatctcaaaaaaaagaaaa

SEQ ID NO: 7161 - DNA, 131 bp, Homo sapiens
ttttttttttgagacggagtctcgctctgtcgcccaggctggagtgcagtggtgcgatctcggctcactgcaagctccgcctcccgggttcacgccattctcctgtctcagcctcccgagtagctgggact

SEQ ID NO: 7162 - DNA, 4802 bp, Homo sapiens; identical to SEQ ID NO: 5618

SEQ ID NO: 7163 - DNA, 3093 bp, Homo sapiens
tccatggcttttcgtgtggacaaatcgggaggtggtgtaaactggtttttggtgaaattcggctcggcctcatgcgaacctatctaggtccgtctctggagtggcctgtcatcgatcgcgccctccatcgctgagcgacacaagtggaaccccccaggactgcattctgcgtaggtgacctgtgtggcgcgggccgggcggggcctttttgtccttgggcaaacgtggtatactttctcagtggtggttggaaggaaatttgttgccctgtcatttcgcaagtatggaaaaagacctaaaggagaatttagcagctgcagccgctgtttttattgcgtactttactagcgccaactctttaataatcgcttgttagttgttacccctgttttatgggtcaagagactcaatatatcagtactttggtaaggccaggcagcaggtaagttgtaaaaccagtaaaaaaacacaggtcattagtcaaaagagtgcttcaggtctcctgactccaaatccgagaatcctttcactgtagcatgtttactgctcaaatatttctacaaccctattgcttaacaacaggaatgaattatttcaccatttgttgcaaacgtatgggtcacgttttgtgccagcagcagaaaatacagaaattagtaagaattacctgccctccaggggcatcaccaacctggattcccctctcggcccagtttttccacccttattgccttctcccttcaggaataatgaactcgtcctggaagcgtaccttactttttaatatctctgccttgtcatgtgctgttcgtcttaccaggaaactaccctgcttttcccccagttttggtctgtgaacacatttgggaaattcttctgatcctaccgctactctcttgaggtacagtaaattgtctttgacttccatcaccttttgtaatattacaattgccatctactgagttcctatgatctgcctggcattgtactaagtgctttatattttcttgttcatttttttatgccaacataaatgagtttgactcaattcttattataacctgccaaaataagtattcctcttcctttttacagagagagaaacaagggaaaaaaaagttaattgcctgaggatatactgctagtgttgcgggacaaatagagacgggagaggccaaacagaattcaggacaaccctttattattaaggtgatcactggctcagtcggactggggtccagaaagtctgagcccggaacaaagggatcaatcaccttttaagcaatttgtggcgggagtttggtgctacaggaagcctacttgcagaagcaagaacaaaggcagttaattattcttttacatttgttacaccacatgtcttacatccttgggaatgcatgcttttgtagcaattgcttatcaaccttgtgactttacagcgcgctagggagggaagcaggaactcgtggtgcctcaaggaacgtgaaacggtggaacacagataagcctctccgtgcgtagaggagaaataagcggttaatattctctcttaacccaggcctccggagggtggggggctatatttcattctacctctaaggaaaagaataaacttcttgactaatatacttataaaattcattaattcccccttcactagtaaataataaatacctgacttaggattccaaaataggtcttgaatttttctgcaggagctcctcaaagtctctgaattcccacaaccttttattagatcacttatcccattgtattataattatctgtttaacaatttttcctcacccctaaaggaccctgagcttctggaaggtagggactgtatcttaaaatcttggcatttctgatgtctagaatatttcatttaagagaagggcttagtaactgttgtgtgggtgggttgatgagttaactgtcaggcaggtgaactaataggctgaagataaagtttttcactgttggaagtgaatttgggattagtcatcctaatcccctcacttttagagatggggcaactgagtcatgcgcggtggctcacgcctgtaattctagcactttgggaggccaaggtgagcggatcacctgaagtcagggatttgagaccagcctggccaacatggcgaaaccccatctctactaaaaatacaaaaattagccaggcatggtagcaggagcctgtaatcccagctgttcgggaggctgaggcaggagaatcacttgaacctgggaggcggaggttgcagtgagttgagatcgcgcaattgcgctccagcctgggcgacaagagcaaaactccacctcaaagaaaaaacaaaacaagacatggggcagctgaggccttttgtataccaggcatttatcgagttattcatgtgggccagtttctgtgataaatgatttgcaaataatacccaacttaatctgtattgttatttttatttttacagatgaagaaacagctcagatttgaccaagatcacacaagtaggagttgaggaattggaacccactatgactgactccaaattaatatagtgtttatagccacttacataataatggtaaaggttttatttttttcactatacaatatgtagtagataaatttactgaggaaatgagacagcacgtgacaaatccttaaaggatacacacatgacaggaaggattagaagaggaaacagaaacaggtaacagagaagcagaaaaagtaaaatctcccaaaataaaaatagaaggaattaaaaataaaagcagactccgggtgcagtggctcatgcccagcactttgggaggccgaggcaggtgaatcacttgaggtcaggagtttgagaccagcctcgccaacatgatgaaaccctgtttctactagaaataaaaaaattagccaggtgtagtggcgtgcacctgtaattctggttacttgggaagctaaggcagaagaatcacttgaacccgagaggcagaggttgcagtgagccaagatcatgccattgcactccagcctgggtgacagagcaagattataaagtcttctcaataaaatcgtctcaaaaataaaaaaaaaaatcc

SEQ ID NO: 7164 - DNA, 3186 bp, Homo sapiens
tccatggcttttcgtgtggacaaatcgggaggtggtgtaaactggtttttggtgaaattcggctcggcctcatgcgaacctatctaggtccgtctctggagtggcctgtcatcgatcgcgccctccatcgctgagcgacacaagtggaaccccccaggactgcattctgcgtaggtgacctgtgtggcgcgggccgggcggggcctttttgtccttgggcaaacgtggtatactttctcagtggtggttggaaggaaatttgttgccctgtcatttcgcaagtatggaaaaagacctaaaggagaatttagcagctgcagccgctgtttttattgcgtactttactagcgccaactctttaataatcgcttgttagttgttacccctgttttatgggtcaagagactcaatatatcagtactttggtaaggccaggcagcaggtaagttgtaaaaccagtaaaaaaacacaggtcattagtcaaaagagtgcttcaggtctcctgactccaaatccgagaatcctttcactgtagcatgtttactgctcaaatatttctacaaccctgattgcttaacaacaggaatgaattatttcaccatttgttgcaaacgtatgggtcacgttttgtgccagcagcagaaaatacagaaattagtaagaattacctgccctccaggggcatcaccaacctggattcccctctcggcccagtttttccacccttattgccttctcccttcaggaataatgaactcgtcctggaagcgtaccttactttttaatatctctgccttgtcatgtgctgttcgtcttaccaggaaactaccctgcttttcccccagttttggtctgtgaacacatttgggaaattcttctgatcctaccgctactctcttgaggtacagtaaattgtctttgacttccatcaccttttgtaatattacaattgccatctactgagttcctatgatctgcctggcattgtactaagtgctttatattttcttgttcatttttttatgccaacataaatgagtttgactcaattcttattataacctgccaaaataagtattcctcttcctttttacagagagagaaacaagggaaaaaaaagttaattgcctgaggatatactgctagtgttgcgggacaaatagagacgggagaggccaaacagaattcaggacaaccctttattattacggtgatcactggctcagtcggactggggtccagaaagtctgagcccggaacacagggatcatcaccttttaagcaatttgtggcgggagtatggtgctacaggaagcctacttgcagaagcaagaacaaaggcagttaattattcttttacatttgttacaccacatgtcttacatccttgggaatgcatgcttttgtagcaattgcttatcaaccttgtgactttacagcgcgctagggagggaagcaggaactcgtggtgcctcaaggaacgtgaaacggtggaacacagataagcctctccgtgcgtagaggagaaataagcggttaatattctctcttaacccaggcctccggagggtggggggctatatttcattctacctctaaggaaaagaataaacttcttgactaatatacttataaaattcattaattcccccttcactagtaaataataaatacctgacttaggattccaaaataggtcttgaatttttctgcaggagctcctcaaagtctctgaattcccacaaccttttattagatcacttatcccattgtattataattatctgtttaacaatttttcctcacccctaaaggaccctgagcttctggaaggtagggactgtatcttaaaatcttggcatttctgatgtctagaatatttcatttaagagaagggcttagtaactgttgtgtgggtgggttgatgagttaactgtcaggcaggtgaactaataggctgaagataaagtttttcactgttggaagtgaatttgggattagtcatcctaatcccctcacttttagagatggggcaactgagtcatgcgcggtggctcacgcctgtaattctagcactttgggaggccaaggtgagcggatcacctgaagtcagggatttgagaccagcctggccaacatggcgaaaccccatctctactaaaaatacaaaaattagccaggcatggtagcaggagcctgtaatcccagctgttcgggaggctgaggcaggagaatcacttgaacctgggaggcggaggttgcagtgagttgagatcgcgcaattgcgctccagcctgggcgacaagagcaaaactccacctcaaagaaaaaacaaaacaagacatggggcagctgaggccttttgtataccaggcatttatcgagttattcatgtgggccagtttctgtgataaatgatttgcaaataatacccaacttaatctgtattgttatttttatttttacagatgaagaaacagctcagatgtgaccaagatcacacaagtaggagttgaggaattggaacccactatgactgactccaaattaatatagtgtttatagccacttacataataatggtaaaggttttatttttttcactatacaatatgtagtagataaatttactgaggaaatgagacagcacgtgacaaatccttaaaggatacacacatgacaggaaggattagaagaggaaacagaaacaggtaacagagaagcagaaaaagtaaaatctcccaaaataaaaatagaaggaattaaaaataaaagcagactccgggtgcagtggctcatgcccagcactttgggaggccgaggcaggtgaatcacttgaggtcaggagtttgagaccagcctcgccaacatgatgaaaccctgtttctactagaaataaaaaaattagccaggtgtagtggcgtgcacctgtaattctggttacttgggaagctaaggcagaagaatcacttgaacccgagaggcagaggttgcagtgagccaagatcatgccattgcactccagcctgggtgacagagcaagattataaagtcttctcaataaaatcgtctcaaaaataataaaaataaaagcagaagttaatgaaatagcaaataaaattgatgatagtaattagctggtgtttgaaaagaacaataaatagaaactcaacaaatctgaggaag

SEQ ID NO: 7165 - DNA, 3186 bp, Homo sapiens
tccatggcttttcgtgtggacaaatcgggaggtggtgtaaactggtttttggtgaaattcggctcggcctcatgcgaacctatctaggtccgtctctggagtggcctgtcatcgatcgcgccctccatcgctgagcgacacaagtggaaccccccaggactgcattctgcgtaggtgacctgtgtggcgcgggccgggcggggcctttttgtccttgggcaaacgtggtatactttctcagtggtggttggaaggaaatttgttgccctgtcatttcgcaagtatggaaaaagacctaaaggagaatttagcagctgcagccgctgtttttattgcgtactttactagcgccaactctttaataatcgcttgttagttgttacccctgttttatgggtcaagagactcaatatatcagtactttggtaaggccaggcagcaggtaagttgtaaaaccagtaaaaaaacacaggtcattagtcaaaagagtgcttcaggtctcctgactccaaatccgagaatcctttcactgtagcatgtttactgctcaaatatttctacaaccctattgcttaacaacaggaatgaattatttcaccatttgttgcaaacgtatgggtcacgttttgtgccagcagcagaaaatacagaaattagtaagaattacctgccctccaggggcatcaccaacctggattcccctctcggcccagtttttccacccttattgccttctcccttcaggaataatgaactcgtcctggaagcgtaccttactttttaatatctctgccttgtcatgtgctgttcgtcttaccaggaaactaccctgcttttcccccagttttggtctgtgaacacatttgggaaattcttctgatcctaccgctactctcttgaggtacagtaaattgtctttgacttccatcaccttttgtaatattacaattgccatctactgagttcctatgatctgcctggcattgtactaagtgctttatattttcttgttcatttttttatgccaacataaatgagtttgactcaattcttattataacctgccaaaataagtattcctcttcctttttacagagagagaaacaagggaaaaaaaagttaattgcctgaggatatactgctagtgttgcgggacaaatagagacgggagaggccaaacagaattcaggacaaccctttattattaaggtgatcactggctcagtcggactggggtccagaaagtctgagcccggaacaaagggatcaatcaccttttaagcaatttgtggcgggagtttggtgctacaggaagcctacttgcagaagcaagaacaaaggcagttaattattcttttacatttgttacaccacatgtcttacatccttgggaatacatgcttttgtagcaattgcttatcaaccttgtgactttacagcgcgctagggagggaagcaggaactcgtggtgcctcaaggaacgtgaaacggtggaacacagataagcctctccgtgcgtagaggagaaataagcggttaatattctctcttaacccaggcctccggagggtggggggctatatttcattctacctctaaggaaaagaataaacttcttgactaatatacttataaaattcattaattcccccttcactagtaaataataaatacctgacttaggattccaaaataggtcttgaatttttctgcaggagctcctcaaagtctctgaattcccacaaccttttattagatcacttatcccattgtattataattatctgtttaacaatttttcctcacccctaaaggaccctgagcttctggaaggtagggactgtatcttaaaatcttggcatttctgatgtctagaatatttcatttaagagaagggcttagtaactgttgtgtgggtgggttgatgagttaactgtcaggcaggtgaactaataggctgaagataaagtttttcactgttggaagtgaatttgggattagtcatcctaatcccctcacttttagagatggggcaactgagtcatgcgcggtggctcacgcctgtaattctagcactttgggaggccaaggtgagcggatcacctgaagtcagggatttgagaccagcctggccaacatggcgaaaccccatctctactaaaaatacaaaaattagccaggcatggtagcaggagcctgtaatcccagctgttcgggaggctgaggcaggagaatcacttgaacctgggaggcggaggttgcagtgagttgagatcgcgcaattgcgctccagcctgggcgacaagagcaaaactccacctcaaagaaaaaacaaaacaagacatggggcagctgaggccttttgtataccaggcatttatcgagttattcatgtgggccagtttctgtgataaatgatttgcaaataatacccaacttaatctgtattgttatttttatttttacagatgaagaaacagctcagatttgaccaagatcacacaagtaggagttgaggaattggaacccactatgactgactccaaattaatatagtgtttatagccacttacataataatggtaaaggttttatttttttcactatacaatatgtagtagataaatttactgaggaaatgagacagcacgtgacaaatccttaaaggatacacacatgacaggaaggattagaagaggaaacagaaacaggtaacagagaagcagaaaaagtaaaatctcccaaaataaaaatagaaggaattaaaaataaaagcagactccgggtgcagtggctcatgcccagcactttgggaggccgaggcaggtgaatcacttgaggtcaggagtttgagaccagcctcgccaacatgatgaaaccctgtttctactagaaataaaaaaattagccaggtgtagtggcgtgcacctgtaattctggttacttgggaagctaaggcagaagaatcacttgaacccgagaggcagaggttgcagtgagccaagatcatgccattgcactccagcctgggtgacagagcaagattataaagtcttctcaataaaatcgtctcaaaaataataaaaataaaagcagaagttaatgaaatagcaaataaaattgatgatagtaattagctggtgtttgaaaagaacaataaatagaaactcaacaaatctgaggaag

SEQ ID NO: 7166 - DNA, 840 bp, Homo sapiens
gagttgagtccaggcccctgatgctgcggcggtcttcacttgctctcacccacgagccactgcagcggcagcggccctcttctccgtcgtcactaggacggggcccaaggtcctctcttgctctctcccagaagctgcagcggaaaccttcgtcttcactttctctctcccaaaagccactgaagcggtagctggcgtcttcactgccgctcacaccagaggagtcgctggctgcgtagccgcggtctccacttacttcctcccaagaactaccaacgctgtggccgccttcgacactccctccctcccaggagccactgaagcggcgactgcgatcgtcactgactctatccccgaagtcactagttcgcgggtcccgaatgtcactgactccctcccaaggaccactgaggcggaggcctcggtcttctctggctgttcccctggagtcggtagtttggtggcctccaacttcactaaaattcacgtcgctgctgcagaaggtgctgtctcccctaactctctcccaagagcagctgtgactgtggccactatctcccctaactctctccctagagacgctgcggcagtggccgaggttttcactgacccttctcaagtcactgcgggagaagccggcgtctgcacttaggcttcctgcagcgaccctggagcggcggtcgctctcttcacattttctttccccgtcgtcgctaactctttccctagactcggcgccggaatggccgtgtagaccgtttatcctccacacgtggtggctagtgcggcggccaccgtcttcgtctgctactccctgcgaatcgccgtagcggcggccgc

SEQ ID NO: 7167 - DNA, 108 bp, Homo sapiens
ctcacaccagttagaatgacaatcattaaaaagtcagggaacaacagatgctggagaggatgtggagaaataggaactcttttacactgttggtgggaatgtaaatta

SEQ ID NO: 7168 - DNA, 840 bp, Homo sapiens; identical to SEQ ID NO: 7166

SEQ ID NO: 7169 - DNA, 1663 bp, Homo sapiens
attacctttccatctactctaatagcatttttcaaatgccattcctcctcttcttcatcccagtattgttcaaattgttcttgacagatttcacaactctaaaatagaatcatataaaatgaaatttacataatagaccatatttaaccccattaagtaaaaatatacaaacactgttaagtggagtaaagaatttatgagtgttccaaaagtttgaataatgtccaatatacagtatgattcaaaatacatttatgggattctgtcaatctttccagtaaaaagagtaaacatttcactgcttttggccactgtagttatgaaactcaaagctagattgtaagagtaaaattgaagagtagagctttcaagaagtcttaaaatcattaaaacagggatataaatatagtgatgtgtttatgagtatttacataaaggaagtgagggacactcccactgtgagaaaacttaaacgttcttctctcacctcaactgctccagctggtccagcaggtacactttggaactctttttctttagcagcctcttgagttttgagcacaacttcttcatgcaccttttcaaaaaactggctctttgcccgttcttccagatcagctatctcctcaaattctatccagtccttaaaaggagttgatttttaaaagattattccatttatttctaaatttttactgtgtatcttcaatataatgccatttaaaggtaggggtatactattttctacattatgctctaatattatttaaaattatactttgaaacatataactaatgacaacatgaaactaataattaagatcttttccattaactctatagttacaactactaattcaaaaaagacaagcttcaagtatatttttttttttacaaaaaacagtcctagagcctgggaattttagagctagaacaagcctgtaggctacactctaatcttaattaaaaaaaaaaaaatttcccttcaaaattcattttttaaaaaatgtgtttatattccaggggtcaaagcctgggacttttagagctagaacaagcctgtatgctatactctaatcttaatttaaaaaaaaaaatactcttcaaaattcattttttaaaaaatctgtttatattctaggggtcaaattttattcaggaaatttcaatgttagattccagcagttattaaaattattaaattacttaattaaaattaaattttaataattattaaaattaatatacttttagaatgatataatttaagcctaaaagatactatggaggcacatgggttacttactgttaaactgtagtaccaacgtctatgagtgacttttcggctaacatccttttcagttctattttgccgataatgccagtccaaatgatctgcataaacatctgtctgtgatgttgtaaacctcattccacaagagtaacactgaataccagtgtacagtcgatttataacactgtcataacgtctattttgaaaaagaaataatctttagtgttgataatatggcttaatggcctttaaaagccaattacaaatatttcaattttccatactgtaacaatggtgaaaccaagagctggctgaaacagttaatacccaaagatcagtattattctctaacaatgtgattgaccctct

SEQ ID NO: 7170 - DNA, 1265 bp, Homo sapiens
ttttttttttgagacagagtctcgctgtgtcacccaggctggagtgcagtggcgcaatcttggcttactgcaagctgcctcctgggttcactccattctcctgcctcagcctctccgagtagctgggactacgggcgcccaccaccacgtccagctaatttttttatttttagtagagacggggtttcaccgtggtctcgatctcctgaccttgtgatccgcccgcctcgtcttcccaaagtgctgggattacaagcgtgagccaccgcgcccagcctggaagaagtttcttaagtgaaacagggttcagaatacatcctggagtggtcatctcagtattctagagaactggaaccttttgtgagtaggaaggaaggtatgattccagttagtaaatatgactagtcctccacttctacctcagtttttctaaagtggggtgataaagcaggatatcataaatcagctttttatatcttgtttcagagaagggagcagggccaaccccaggcaaaaacaaaaaacgaagtggatattggtgacagtctgtactcctttctgcctatgtgccattttctgttatttcccagtcattcttgttcttcttttggtgctcactcccaaatcttcacaggggtactccttgggtaccttttggctcttatttagctactcttccccacctgctcaacacaatgcccattatctctgggagctgaccccatttaggattaggaaaaaacttcccaattctacaagagtgcaggtctttcttgataatagtctttattttccatttctacctccatttaggcagctacatttttccacctgcagcatggttagatgcctcctcagattttcctgaatattttgtgtaaacctccattaggttgcttacttggtactaaattgtaaggtcagtcatataaaaaatatgtatatactaagctgttatatgagaatgttttaattttttatatgtaattccttatttttcttcccaaagctttttatttttagctgaattgcaatgagattgctttctattttccaaagcatcaaagttggacattttcagtgggaaaattacactaaaaccaggaggatataaacttaatgaaatctttagattttaggaaacacatacttttccttttacttgttctctcaaacttcaatttaaaagaaaatgttccatcatctctgaggcttcatttaattttccttactgcactttacagtgttagattactacttctagc

SEQ ID NO: 7171 - DNA, 840 bp, Homo sapiens; identical to SEQ ID NO: 7166

SEQ ID NO: 7172 - DNA, 603 bp, Homo sapiens
gtttagaagtgtttgtttttattatttgtatataatgtgttgttttcagtcttgcactggtgtttttaactatcgtgtaaagatgcaaacagcaggccagaaaactgccttgatatatcacattggcaaagaccaagcgcaccccggaccctagtgggtgagccggacccattggcagtggcctttgtggtgcctccagggagcctcacgatgctcacgcctctgaccagtggttctgcgctcagggcatgaccggagatgtggtctgggagttggttgtgtggatgtttgcgttgccagcgtttacaacaacagaggggaacagcccacagcccagcagtacaatgaggatggtccttgtgataaatgggatgctgtgattagattgtttctgaataagctaaaatgctcaaaatgtgatctttcttttataaaaaggccaggtatggtgatacgtgcctgtaaccccagcactttgggaggctgaggtgggaggatcccttgagcccaggagttggagaatgcagtgagctgtgatcacaccctctagcctaggcagcagagcgagaccttgttctaagaaataaaaagagaaaaagaaaa

SEQ ID NO: 7173 - DNA, 921 bp, Homo sapiens
ggacagctggcctctgtgcagtgggtggcgggggggtgctggacggctggcctctatgtagtcggggaggctggatgactggcctctgtgcagtgggggcaggcgctggatgactggcctctatgcagtgggtcggggggcctggacagctggcctctgtgcggtgggttgggggggcctggacgtctggcttctgtgcggtgcgggggccggcctcgggccggtgggcaggctggaaggtcagccaggccctgtggtgtctttagtgagaaacaggaaataaatcaaggggatgttgtagaagttttaccgctgctggtttagaagtgtttgtttttattatttgtatataatgtgttgttttcagtcttgcactggtgtttttaactatcgtgtaaagatgcaaacagcaggccagaaaactgccttgatatatcacattggcaaagaccaagcgcaccccggaccctagtgggtgagccggacccattggcagtggcctttgtggtgcctccagggagcctcacgatgctcacgcctctgaccagtggttctgcgctcagggcatgaccggagatgtggtctgggagttggttgtgtggatgtttgcgttgccagcgtttacaacaacagaggggaacagcccacagcccagcagtacaatgaggatggtccttgtgataaatgggatgctgtgattagattgtttctgaataagctaaaatgctcaaaatgtgatctttcttttataaaaaggccaggtatggtgatacgtgcctgtaaccccagcactttgggaggctgaggtgggaggatcccttgagcccaggagttggagaatgcagtgagctgtgatcacaccctctagcctaggcagcagagcgagaccttgttctaagaaataaaaagagaaaaagaaaa

SEQ ID NO: 7174 - DNA, 586 bp, Homo sapiens
atgtttgtttttttaatgtgttgttgttttctttaaaatcaagaccagttgttacaaagaagtaacatgttttaatgtcattgtcgtttaaaaaatatttttacttcttaaagtagactagccaaaaggtcccgaacttggtatctaaaatgaatatggggaataaggattttgaaaaatagctgttgctctcattctttttttttttttttcaatatgagacagggtcttgctgtgtcacccaggttggattgcagtggtgtgatcatggcttactgcagcctcaacctcccaggactcaagcaatcctcacagctcagcctcctgagtagctgggactatagatctgcatcaccacatctggcaaattttttgtattttttgttgagacaggatctcactttgttgtccaggctggtcttgaactcctgggctcaagcgatcctgtcaccttcgcctcccaaagtgctgagattacaggtgtcagccatagcagccggcctattctctcattcttgaagaatgaaagctccatgttatgtttgaagttttacgagttgactgctttgtaagaaaaaaaaaaaaa

SEQ ID NO: 7175 - DNA, 597 bp, Homo sapiens
aatacttttaaatgtttgtttttttaatgtgttgttgttttctttaaaatcaagaccagttgttacaaagaagtaacatgttttaatgtcattgtcgtttaaaaaatatttttacttcttaaagtagactagccaaaaggtcccgaacttggtatctaaaatgaatatggggaataaggattttgaaaaatagctgttgctctcattctttttttttttttttcaatatgagacagggtcttgctgtgtcacccaggttggattgcagtggtgtgatcatggcttactgcagcctcaacctcccaggactcaagcaatcctcacagctcagcctcctgagtagctgggactatagatctgcatcaccacatctggcaaattttttgtattttttgttgagacaggatctcactttgttgtccaggctggtcttgaactcctgggctcaagcgatcctgtcaccttcgcctcccaaagtgctgagattacaggtgtcagccatagcagccggcctattctctcattcttgaagaatgaaagctccatgttatgtttgaagttttacgagttgactgctttgtaagaaaaaaaaaaaaa

SEQ ID NO: 7176 - DNA, 280 bp, Homo sapiens
attttcatatttagatttatttttaacatagattttatttattttttatttttttggagacaggatcttgttctctcgcccaggctggagtgcagtggtgcaatatcggctcactgcagcctccatctcctaggttcaagtgattttcctgcctccacctcccaagtatctgggattacaggcacatggcaccacgcccggctaatttttgtattttttagtagagatgaggtttcaccatgttggccaggctggtcttaaactcctgacctcaggtaat

SEQ ID NO: 7177 - DNA, 8025 bp, Homo sapiens
ttgttttctgtccatctttattgttattgctggatattaaatgctgtaatttttggcataggttttttccaaagactggtctcttgggtcaagttttcctgaacttgcctggtattgggcaagttcacacagaaaatatgagtcatttcacaaagtcctgggcttgtctatctacttgaaggaataggaaatggacttcacttggagcatgatggatgaggcttgggcttttactaatgaaataagtttcaatcttaactcagttaaacctttaaagacaggagaaaactatctggggatggattcaggccagtgagatcacgttgcacaaatctccccttaagggatctttactgacctagaattgtttcaaaataagattccaaactgtcgagggagtttgaagccttgaaacttggtgtaggtttgcttaaaacaaaataacgaatatactacatttcccaggaggcttcgcggtgagcctccgcactcggctggttctctttaccgcgaggaaagctgggaaatgtagtgccacaggcaaccctgcacgtgacgcttgcggaggaaggggagagagaggcgcgcgggaggtcgtctagggaatcgaggtgccggctgctccttcctcacaatttggtttgtgctgcaaggggagggtccccatcatctggccccagtggtgtaaggagctgactgggattcagtcactgacttggagccgctcgggggaagtcccggtgggtgaggttccgcggcgcctggtccagtttctcggcagtcaggccaggagggggtggggaaggtgcgaacagccgggggctcggagctcgcgccctgcgccccacccaggttgcggccgcccggggaggaagcgcgtataggttgagtgcaaagtttccttttttgctttctcgtcagagcagcccagacaggcggtgggtgggaatgcctcacttcagtttgaagagggtccggatccaaaggggttaaaacgagcgaaccccgatccccgaccacacttcccgcctccctaaaacgcacaccccgctagccatgggcagccgcgaccacctgttcaaagtgctggtggtgggggacgccgcagtgggcaagacgtcgctggtgcagcgatattcccaggacagcttcagcaaacactacaagtccacggtgggaggtgagacgtctcgggggtggggagggggagggggaggaggaggccccgaccgcggactcgagctggggacccaagtggggtggggatttgctgtcggttgttgggtccttcttcgggtcaggaagtactgtctgggaacctagatggtgtaattgccgggtgtttggtttacacgcctctcttgagtttcccgttagattttcccaaactgagcccactgccaggagaaaggtaagagcaaaggcgtgaagatgagaaatagggaagggaggatgaggatgagcaattgctgtttatggcaggcgtactgtgaacttaagtctccagcctttcagctgtccggcaaatctctccaatcagcagaagcagctgagatcctctgtggggcctcctggttaggtgccggctggggctgtagtcctgcccctctgttgagggaggaaccgcaaggtgtttaacctggcttcagtgggagaacgcaggaagcggaactggtctgaaggactgtagctttgttgtggggctgtgggtgggagggaagacacaaaatccccgaacgagccccttggctacgcagtcagatgcccatgagggctgatgagctgtgtttttgtccgttgattgcttaaataaaggtaaccaaggaattcttccaagaatgtgaaatataccacttctctgacctatcttcccaccacttttttcctcaaactggagaaggtagggaggaaggggacaccgagttcattcatttctttcccgggtgtggcctttggactcaactattttttcagaggcagaaatgccttattgttaattagaaggtatttagctaggaagagctggtgatgggggagagtaacttaaaattttatttctctctgttaaaagaacttgtttcaaggggggaaaactcgtaccaatggaaaaattgaaaatgtgtgctcctgttcatatggaagtttaaaaagaaattaacaaacatttacattgcaattaaaacattctccttaagaacccccagtagggcccagtaccgtggttcatacttgcaatcccagcactttaggaggctgaggcgggaggattgcttgagcccaggagttcgagaccagccatgggaaacatggcaagacccccacctctacaaaaattaaagaagaaagtagccgtggtcccagctactcgggaaactgagacgagaggattgcttgaactggggaggtcgaggcttcagtgagccccgttcgcaccactcactgcactgtagcctgggcaacagagtgagaccctgtctcaaaaacaaaggaacaaaaaatttaagtctggcaaaattaaaggttcaaagtttcagacactctatcctgaccgctctgccctcccactcctaaataatataagggtccctatttcacggatttgggttaaaagtggcctgctattaatagttaatttttaacaattgctgtagttttcctttagcaaagaatataattggctaattttttttcagtgtttagtctaaatttcccttagctttgattcctgtcacagatgtgaaagataatatttccaaacctcagaaattactctgtttctctccttagccaaaaggctttccccatggaatacttactcagccttaaggagtctcagcacctgcagacttggtggtagattccagcaggactcttcagcaacatccacacagtgtcttcttcttgggactcctctgggaccttttccatttattccattcttgcccaagataatacctgcaaccttatggtggatgtagagttccccagggtgtgttcttttcataatacaatttgattagaaaccaacagtgaaattgaatgtggaagatacgaaagcaaccacacttgtctcatttcccccttctcccccatcaccccttccctgagaaaaccccctaaatctcccagaaactatttaacctgagaatgagaattgttttcatagttactcccacccccagtcttggagacaaacagtagcaaataaatgagcttgacagtagagtaaaagctggaaacccctttggagagtgagtatgaatcatccatctcacactaaatacacgcatgtggactcatctcagtgaattgagggcttaaagataaacatatgggattggagttgtgtgtccatagggtttcactgcctatttgatttgagtttatccctattaattttttacagtgaaattttattaaagtataatgtacatatattttcagtggattttgctctgaaggttctccagtggtctgactacgagatagtgcggcttcagctgtgggatattgcaggtaaagtgggagggctagataggaacaagggaagaaattttgatttaactagaaagctctgaggaaaaaatggggcagcaaagccagaaattgtttttctgaagctggaatgattgagctgctctgaggacacatgagctgaataggtgcagagcttttgtagatgttttgccctgaatagatctggagcagtctctgtgtggatggaggggctggcaaggtggtggattgtccagactataggtggacactcccacagcaggggagggtgctttttctaggtttaaggctgaccttggtgaaaaacaagatccccagaaaatagatacagtaaaaatagtgaatccttactatgtgccaagcattcttctaagtattttaaattcactgactcattaatcctcacatcaaccctatcataaaagctactgcttttggagaattgcttgaacctgggaggtggaggttgcagtgagcctagatggcaccactgcactccagcctgggcaacaggagtgcaggaaactgtttcaaaaaaaaaaaaaaaagcgactgcttttatcttcactttacaaatgagaaatctgaagcactgagagcttgatttgcccgaagtcaaatagtatgcagcagagcagggatttggactggagcaatctgggtgcggaatctgccttggaaataattgggcttcattatccctttatgggatagaaaaccaagagtcagagggggaaagtgagtggccccatctgacacatatgcttactgccctcttctacaaggaatggggagaggccggctcttgggtcaccttgagaactctcccctttctccccagggcaggagcgcttcacctctatgacacgattgtattatcgggatgcctctgcctgtgttattatgtttgacgttaccaatgccactaccttcagcaacagccagaggtggaaacaggacctagacagcaagctcacactacccaatggagagccggtgccctgcctgctcttggccaacaaggtatgtggccaatctcagaaaatggtccctagcctctatctgtggttagaaaggaagtaaaatgctctctgattctgggcatccatttccccttcttaagttggcaaaatcatctctacctccttcaaaggatgttgagggtgagtgagactttctttcttttttttttttttgagacggagtctcgctctgttgcccaggctggagtgcagtggcgcgatctcggctcactgccagctctgcctcccaggttcacgccattctcttgcctcagcctcccgagtagctgggactacaggtgcccaccaccacacccagctaatttttttgtatttttagtagagactgggtttcattgtgttagccaggatggtctcgctctcctgacctcatgatctgcccgcctcagcctcccaaagtgctgggattacaggcgtgagccactgcgcccagccaagggtgagactttctttgggaagaatgttgattatagatttccgatgctggtgttcttatccattggtggaaatatgtttaaaatccacagtatctgagccatattctttcttagttgcaggaagtttatgatactgccttttattttttctctttgctagtgtgatctgtccccttgggcagtgagccgggaccagattgaccggttcagtaaagagaacggtttcacaggttggacagaaacatcagtcaaggagaacaaaaatattaatgaggctatgaggtaagtagctcatgctgataggcatgcagatgtatccatcttccactgtggccctgtggaccctcttttcttatttctgagccaacaatgacagactgagccattggaatgctagcccctaaaggtcagggatactgtctttcctgagataactggggacaaaggggcatttaaaccttctggctttaccaaatactctctgatgataagtcagactacatctgccatttctgcttttcctccaaaataagcttctcaggcttattttttgtcttttagagtcctcattgaaaagatgatgagaaattccacagaagatatcatgtctttgtccacccaaggggactacatcaatctacaaaccaagtcctccagctggtcctgctgctagtagtgtttggcttattttccatcccagttctgggaggtcttttaagtctcttccctttggttgcccacctgaccattttattaagtacatttgaattgtctcctgactactgtccagtaaggaggcccattgtcacttagaaaagacacctggaacccatgtgcatttctgcatctcctggattagcctttcacatgttgctgactcacattagtgccagttagtgccttcggtgtaagatcttctcatcagccctcaatttgtgatccggaattttgtgagaaggattagaaatcagcacctgcgttttagagatcataattctcacctacttctgagcttatttttccatttgatattcattgatatcatgacttccaattgagaggaaaatgagatcaaatgtcatttcccaaatttcttgtaggccgttgtttcagattctttctgtcttggaatgtaaacatctgattctggaatgcagaaggaggggtctgggcatctgtggatttttggctactagaagtgtcccagaagtcactgtatttttgaaacttctaacgtcataattaagtttctcttgtcttggcatcaagaatagtcaagttttttggccgggcatggtggctcatgcctgtaatcccagcacttggggaggccaaggcaggcggatcacatgaggccaggaattcgagaccaacctggtcagcatggcaaaaccccgtctctactaaaagtacaaaaattagccaggcgtgatggcacgtgtctgtaatcccagctactctggagactgaggtgggagaatcgcttgagactgggaggcagaggttgcagtgaaccgagatcatgccaccgcacttcagcctgggtgacagagaaggactccgtctcaaaaaaaaaagaaaaaagaatagtcatttttaaactacctatctcatgcaatgaaagcattttcttccacaaagagcttaatcctcatgataggattgcctagtgtctcccatttgcaggtttctgggttgatgtcttaatgcataatactgcaagtgacatcagctggctgtgatgcttcgaaataggtctgctcctcacagctttgggaatctgaatggaagaagaaaagagagaagttaacaacctccactggggcaactttgtgaacatgtaggcacttagtcataggaaacatattatgtgcaggtcctagcctggggtaggaaagtagatagacagaaaatcattaggtaatttaagtactaaattgggcagggctttttagtatcaaatcactactagaccgtttaatttgttaaattatctctaggatggtgatttataacctacccaaagttatcgatattcttactaaactctgaggcctgaagttctgtgatagaccttaaataagtgtcctaagtcagtggttcccaaatctggctggtcgggaatacctgggaagtttgttaaaattttttaaaaatgttttaagatttttgggtcctgagccaggcgtggtggctcacacctgtaatcccagcactttgggaggctgaggcaggtggatcgcctgaggtcaggagttcaagatcaacctggccaacatactgaaaccccgtctctactaaaaataagaaaaattagctgggcgtggtggcgggcacctgtaatcccagctacttgggaggctgaggcaggagaatcacttgaacctgggagttagaggttgcagtgagctgagatcacaccattgcgcttcagcctgggcaacaagagtgaaactccatctccaaaaaaaaaaaaacaaaaagaaaaagatttttgggtcccgacctcaaacctactgaatcagaatttctagggatgaagcctaggaatgtgttgttgttttcagagcttccctggtgattgtgataagcctggtttggaaaccattgctggagaactttgtaaagatacagagacccagaccttttgtatttacatttaaatacaaatacaaatcctgggtttctatatgttctgttagcttttcaggtgattctgctacacagacgttgaaaaccactgccctaagaaagagatcagaggccacatatcagagagaaaagggaccaaaccttcggtggtttgttgtgtgtcgttttaatgccaattattttaacttgcacagtcttctgaaaccttgtattaatagttctcttttgtattaccattttcaggtagggttttgatcactatgattctgaagataatagtgaaatagtgaatttcattgatatgaagagataattgattttcattcattggtttgaacacctgcaaaatcacaaataaatgagaactaagtcttgta

SEQ ID NO: 7178 - DNA, 7307 bp, Homo sapiens
  SITE (7): n equals a,t,g, or c
  SITE (154): n equals a,t,g, or c
  SITE (843): n equals a,t,g, or c
gaatagnaaatggcttcacttggagcatgatggataaggcttgggcttttactaatgaaataagtttcaatcttaactcagttaaaccttaaagacaggagaaaactatctggggatggattcaggccagtgagatcacgttgcacaaatctcnccttaagggatctttactgacctagaattgtttcaaaataagattccaaactgtcgagggagtttgaagccttgaaacttggtgtaggtttgcttaaaacaaaataacgaatatactacatttcccaggaggcttcgcggtgagcctccgcactcggctggttctctttaccgcgaggaaagctgggaaatgtagtgccacaggcaaccctgcacgtgacgcttgcggaggaaggggagagagaggcgcgcgggagggcgtctagggaatcgaggtgccggctgctccttcctcacaatttggtttgtgctgcaaggggagggtccccatcatctggccccagtggtgtaaggagctgactgggattcagtcactgacttggagccgctcgggggaagtcccggtgggtgaggttccgcggcgcctggtccagtttctcggcagtcaggccaggagggggtggggaaggtgcgaacagccgggggctcggagctcgcgccctgcgccccacccaggttgcggccgcccggggaggaagcgcgtataggttgagtgcaaagtttccttttttgctttctcgtcagatcagaccacacaggcggtgggtgggaatgcctcctttcagtttgaagagggtccggatccaaaggggttaaaacgagcgacccccgatcccgatccacacttancgcctccctataacgcacaccccgctagccatgggcagccgcgactcacctgttcaaagtgctggtggtggggcacgccgcagtgggcaagacgtcgctggtgcagcgatattcccaggacagcttcagcaaacactacaagtccacggtgggaggtgagacgtctctggggtgggtaggggtagggggaggaggaggccccgaccgcggactcgagctggggacccaagtggggtggggatttgctgtcggttgttgggtccttcttcgggtcaggaagtactgtctgggaacctagatggtgtaattgccgggtgtttggtttacacgcctctcttgagtttcccgttagattttcccaaactgagcccactgccaggagaaaggtaagagcaaaggcgtgaagatgagaaatagggaagggaggatgaggatgagcaattgctgtttattgcaggcgtactgtgaacttaagtctccagcctttcagctgtccggcaaatctctccaatcagcagaagcagctgagatcctctgtggggcctcctggttaggtgccggctggggctgtagtcctgcccctctgttgagggaggaaccgcaaggtgtttaacctggcttcagtgggagaacgcaggaagcggaactggtctgaaggactgtagctttgttgtggggctgtgggtgggatggaagacacaaaatccccgaacgagccccttggctacgcagtcagatgcccatgagggctgatgagctgtgtttttgtccgttgattgcttaaataaaggtaaccaaggaattcttccaagaatgtgaaatataccacttctctgacctatcttcccaccacttttttcctcaaactggacaaggtagggaggaaggggacaccgagttcattcatttctttcccgggtgtggcctttggactcaactattttttcagaggcagaaatgccttattgttaattagaaggtatttagctaggaagagctggtgatgggggagagtaacttaaatttctatttctctctgttaaaagaccttgtttcaagggggaacacctcgtaccaatgctaaaattgaaaaatgtgtgctcctgttcatatggaagtttagaaagaaattaacaaacatttacattgcaattaaaacattctccttaagaacccccagtagggcccagtaccgtggttcatacttgcaatcccagcagctttaggaggctgaggcgggaggattgcttgagcccaggagttcgagaccagccatgggaaacatggcaagacccccacctctacaaaaattaaagaagaaagtagccgtggtcccagctactcgggaaactgagacgagaggattgcttgaactggggaggtcgaggcttcagtgagccccgttcgcaccactcactgcactgtagcctgggcaacagagtgagaccctgtctcaaaaacaaaggaacaaaaaatttaagtctggcaaaattaaaggttcaaagtttcagacactctatcctgaccgctctgccctcccactcctaaataatataagggtccctatttcacggatttgggttaaaagtggcctgctattaatagttaatttttaacaattgctgtagttttcctttagcaaagaatataattggctaatttttttttcagtgtttagtctaaatttcccttagctttgattcctgtcacagatgtgaaagataatatttccaaacctcagaaattactctgtttctctccttagccaaaaggctttccccatggaatacttactcagccttaaggagtctcagcacctgcagacttggtggtagattccagcaggactcttcagcaacatccacacagtgtcttcttcttgggactcctctgggaccttttccatttattccattcttgcccaagataatacctgcaaccttatggtggatgtagagttccccagggtgtgttcttttcataatacaatttgattagaaaccaacagtgaaattgaatgtggaagatacgaaagcaaccacacttgtctcatttcccccttctcccccatcaccccttccctgagaaaaccccctaaatctcccagaaactatttaacctgagaatgagaattgttttcatagttactcccacccccagtcttggagacaaacagtagcaaataaatgagcttgacagtagagtaaaagctggaaacccctttggagagtgagtatgaatcatccatctcacactaaatacacgcatgtggactcatctcagtgaattgagggcttaaagttaaacatatgggattggagttgtgtgtccatagggtttcactgcctatttgatttgagtttatccctattaattttttacagtgaaattttattaaagtataatgtacatatattttcagtggattttgctctgaaggttctccagtggtctgactacgagatagtgcggcttcagctgtgggatattgcaggtaaagtgggagggctagataggaacaagggaagaaattttgatttaactagaaagctctgaggaaaaaatggggcagcaaagccagaaattgtttttctgaagctggaatgattgagctgctctgaggacacatgagctgaataggtgcagagcttttgtagatgttttgccctgaatagatctggagcagtctctatgtggatggaggggctggcaaggtggtggattgtccagactataggtggacactcccacagcaggggagggtgctttttctaggtttaaggctgaccttggtgaaaaacaagatccccagaaaatagatacagtaaaaatagtgaatccttactatgtgccaagcattcttctaagtattttaaattcactgactcattaatcctcacatcaaccctatcataaaagctactgcttttggagaattgcttgaacctgggaggtggaggttgcagtgagcctagatggcaccactgcactccagcctgggcaacaggagtgcaggaaactgtttcaaaaaaaaaaaaaaaaagcgactgcttttatcttcactttacaaatgagaaatctgaagcactgagagcttgatttgcccgaagtcaaatagtatgcagcagagcagggatttggactggagcaatctgggtgcggaatctgccttggaaataattgggcttcattatccctttatgggatagaaaaccaagagtcagagggggaaagtgagtggccccatctgacacatatgcttactgccctcttctacaaggaatggggagaggccggctcttgggtcaccttgagaactctcccctttctccccagggcaggagcgcttcacctctatgacacgattgtattatcgggatgcctctgcctgtgttattatgtttgacgttaccaatgccactaccttcagcaacagccagaggtggaaacaggacctagacagcaagctcacactacccaatggagagccggtgccctgcctgctcttggccaacaaggtatgtggccaatctcagaaaatggtccctagcctctatctgtggttagaaaggaagtaaaatgctctctgattctgggcatccatttccccttcttaagttggcaaaatcatctctacctccttcaaaggatgttgagggtgagtgagactttctttcttttttttttttttgagacggagtctcgctctgttgctcaggctggagtgcagtggcgcgatctcggctcactgccagctctgcctcccaggttcacgccattctcttgcctcagcctcccgagtagctgggactacaggtgcccaccaccacacccagctaatttttttgtatttttagtagagactgggtttcattgtgttagccaggatggtctcgctctcctgacctcatgatctgcccgcctcagcctcccaaagtgctgggattacaggcgtgagccactgcgcccagccaagggtgagactttctttgggaagaatgttgattatagatttccgatgctggtgttcttatccattggtggaaatatgtttaaaatccacagtatctgagccatattctttcttagttgcaggaagtttatgatactgccttttattttttctctttgctagtgtgatctgtccccttgggcagtgagccgggaccagattgaccggttcagtaaagagaacggtttcacaggttggacagaaacatcagtcaaggagaacaaaaatattaatgaggctatgaggtaagtagctcatgctgataggcatgcagatgtatccatcttccactgtggccctgtggaccctcttttcttatttctgagccaacaatgacagactgagccattggaatgctagcccctaaaggtcagggatactgtctttcctgagataactggggacaaaggggcatttaaaccttctggctttaccaaatactctctgatgataagtcagactacatctgccatttctgcttttcctccaaaataagcttctcaggcttattttttgtcttttagagtcctcattgaaaagatgatgagaaattccacagaagatatcatgtctttgtccacccaaggggactacatcaatctacaaaccaagtcctccagctggtcctgctgctagtagtgtttggcttattttccatcccagttctgggaggtcttttaagtctcttccctttggttgcccacctgacaattttattaagtacatttgaattgtctcctgactactgtccagtaaggaggcccattgtcacttagaaaagacacctggaacccatgtgcatttctgcatctcctggattagcctttcacatgttgctggctcacattagtgccagttagtgccttcggtgtaagatcttctcatcagccctcaatttgtgatccggaattttatgagaaggattagaaatcagcacctgcgttttagagatcataattctcacctacttctgagcttatttttccatttgatattcattgatatcatgacttccaattgagaggaaaatgagatcaaatgtcatttcccaaatttcttgtaggccgttgtttcagattctttctgtcttggaatgtaaacatctgattctggaatgcagaaggagggggtctgggcatctgtggatttttggctactagaagtgtcccagaagtcactgtatttttgaaacttctaacgtcataattaagtttctcttgtcttggcatcaagaatagtcaagttttttggccgggcatggtggctcatgcctgtaatcccagcacttggggaggccaaggcaggcggatcacatgaggccaggaattcgagaccaacctggtcagcatggcaaaaccccgtctctactaaaagtacaaaaattagccaggcgtgatggcacgtgtctgtaatcccagctactctggagactgaggtgggagaatcgcttgagactgggaggcagaggttgcagtgaaccgagatcatgccaccgcacttcagcctgggtgacagagaaggactccgtctcaaaaaaaaaagaaaaaagaatagtcatttttaaactacctatctcatgcaatgaaagcattttcttccacaaagagcttaatcctcatgataggattgcctagtgtctcccatttgcaggtttctgggttgatgtcttaatgcataatactgcaagtgacatcagctggctgtgatgcttcgaaataggtctgctcctcacagctttgggaatctgaatggaagaagaaaagagagaagttaacaacctccactggggcaactttgtgaacacgtaggcacttagtcataggaaacatattatgtgcaggtcctagcctgggggaggaaagtagatagacagaaaatcattaggtaatttaagtactaaattgggcagggctttttagtatcaaatcactactagaccatttaatttgttaaattatctctaggatggtgatttataacctacccaaagttatcgatattcttactaaactctgaggcctgaagttctgtgatagaccttaaataagtgtcctaagtcagtggttcccaaatctggctggtcgggaatacctgggaagtttgttaaaattttttaaaaatgttttaagatttttgggtcctgagccagccgtggtggctcacacctgtaatcccagcactttgggaggctgaggcaggtggatcgcctgaggtcaggagttcaagatcaacctggccaacatactgaaaccccgtctctactaaaaataagaaaaattagctgggcgtggtggcgggcacctgtaatcccagctacttgggagactgaggcaggagaatcgcttgaacctgggagttagaggttgcagtgagctgagatcacaccattgcgcttcagcctgggcaacaagagtgaaactccatctccaaaaaaaaaaaacaaaaagaaaaa

SEQ ID NO: 7179 - DNA, 218 bp, Homo sapiens
aaggaacacctggcccgcccagggtggaaaaccgcttaaaggcattcttaagccacaaacaatagcatgagtgatctgtgccttaaggacatgctcctgctgcagttaactagcccaacctattcctttaattcggcccatcccttcgtttcccataagggatacttttagttaatttaatatctatagaaacaatgctaatgactggtttgctgtta

SEQ ID NO: 7180 - DNA, 33296 bp, Homo sapiens
gtatgaagtgtaacagaacagactttaccacctgaaactgctgcttcaagttcagatcaggcaaggaacaaacctcgtaacaactaacaagaccaaagaagagtacacttaagttgaagacacaacacttgatctgaaacaagaagtttgtgcctactcaacagctttgaaagagcacttcccaacgctgctagtagtctttgttttcttcagtgctgtactgtgagattgcccggtacagcagcagttgtattctttattagcttggtagatcattttctctcgctcttttttttaatactagcaactttcatcctttgaaacgtgtgctgaaaaagaagaatcagcaaatactactgaaagtgcaatatttgagtatcactgcgaggtaggtttgtaatttcctattaagaatcagttccataattctagatttcctgattatttggtcaaatataaaatctttatttgttcttttctaaaggtattcagaagacagtttttctattctcaactagtatgaaatatcaacactatctcttgttagataaggacagtatttatggtcaaacatttttcataccagattatattaatacatgctgatctctcgacttgctggtctcttagagaagctccgtctgtactatttagaagttaggatttcaaataagaatgtgcattgcagtctttctatgagggtctgtgaaactttggtgatatttgctactgacgtctgtttctttctctctactgtcttcaatgttagcttcttgaggaaagaaccttactttatatccatgcctacatttgcagtgcatatttgtgaacggtatacagtgcacatttgtaaatggttgacatgcctactgtattgttaggcattgctagtgctgaaatataacgaatgaataagatactaatggacttaatgatttagaacaatttgttacacaatatcacaatataggctaaaagatactaataaaatattaagaatataactgaagctgttcccttggaggtaaggaggagggtaaagaaagcctacagaaaagggatatttgaaggtgagtagtaccttgttaagaggtagaagagacattggtagaggtatagaggtaacagaattagcagattcagggctacgtgaaagcacatggtatatattaagttgttcattatgaacagagtagagaatataattttgcgggagagttatgaaagggaagtttgctggaggcttggcccaatgcatttgtctttattccgtaggagagccatcagatgtctataagcaagggcttaagggtttttcccccaaaagtaagatagctttattgcttcacattttaaagtaatattcagaagtgtacctttaaaagacaaatggtgacacttttgagggaaaggctgaggatgggaagacctgtcaaaagcagtggatcaagtataaggaagataaaagctaaggtgtaggtagagaaaaaggtaggtgctaggtgttctgatgatttagaagtgaggacttggggaccaattgaatctgaagataaatgtggagagaatggctttatcaaatccagttgtgcaaactagaaaccttcattgttcataggaatagggaagttagagtagtaacttactgatattaaaatatgttatggaaatctattgtgttcattagatagcaatctgaagttgaaggaaatacactagtatggaatattgaacagtggttaactttgagggtaggcttatgaagagcaattttcctttttaatctttagtttccagattttctaaagttagacataaaggaattcagaaaggagtcatcagtgtataggtaataaaaggaagaagcaccaatgaagagagcaaagacatagaagtcaggaaaaagcaccaacgataatttcaggaagtcaatggtaaacatttttttagatgctacagaggtcaaataaaatgaagaatgaaaataagtcattcagttacaaaagcttcactgctatttcaagaagcgcttaggactttatttccaatttattgaaggattatgtaatagtgtcagtgaccttgctgtgcactagaattattccttaacaactaaaaactatagtaaaattatctatgtctcataaacagacactgttatttaattttaaggtaattgtagcatttagtttttctatttgtttcttcttaccttagctgatttttaaaaaataattttagactaattgttgtggattctgttggattagatagggaagattaacacaaattgaaaccacaattttatgttctgaagcataaaagattagatttttttttttttcctctctgagacagagtcttgctctgtcgccaaggctggagtgcagtggggtgatcttggctcactgcagcctctgcctcccaggttcaggtgattcttctgcctcagtctcctgagtagctgaaattacaggcgcgcatcaccatgcctggcttatttttgtatttttagtagagacggggtttcaccgtgttggccagtctggttttgaattcctgaccttgtgatccacccgcctcggcctcccaaagtgctgggattacaggcatgagccaccgtgcctggcaagattagatattaaggctttcatttcattgacatgatttatagaaatagatttaacgaagtcctttttgtttagtgtaatctttgtattctgaatattagtttactacatgaacattttaatatataaatgcatccatagctgtctaaaaattacatgtttacatatgtacaaagaaaccacaattgggatgaagattattggcagtaaaacatggctgtggttgtacagttgtgaaatagttcagttaaagggggcacacagctaagaaaacagatttggtaatgcaatggaacccccagattttaaaggggggttttgtaaaatcagtaaaaatagtacgtaattaggaacaaatatatatagaagggtagaattagccataaaatggcaagaaagaataaggcttataaagcatttgtttgagatgtgaaaatagacctgaattgtttggtgaatgatttgatccaggttagtctaaaggtgacagacaagagaaaagcaaaactagaaaattcctgtcgcgctcctagttttttctgctgaatgcaataattttcatacttgaaacatagcaaagcaagagaaaactgaggccccagatgagtgagaaaataacaggattacttggcggttgctagggtgctagttgctaggtgtgtgatagtagtcaaatagagacctatgacaggaactgtaaatgtcctgatttttcagtcagatgtgggaactattgagcttacttttcatccctagcaaaaaccccagagccagtgaataaataacttggcagactagctcatgatagcataatggtcaatatggagaaatgttggatggatagcagttagtaagagactgattttagagaagtctccaggtgtatgctgccagatgctatcctcgccctgcttttttcagagacctaatgagtagttctgtgagtacctatgtgctacgtaagcacttattttaggctttttacgtgcagcaactcatttaaccatctcaacaactctgtgagacaggtgttaaggtaggagaatgaatgattaaaagataaactacaaagagtctgataatttaaaattagtcaccaaattggaatactagattaaccaacagaaggcattttaaaagcattaggttatagtttttttatttgggaacaaacgatccattacggaggaactgaaagaaaacctgatttcgctaatgtgatttgtgaagaaatgatggggatgtgttttagttttacaaagttataaaacttcagtctacagaatcaaggagtgtaatcactcagtactttatattggtcgggtacattaagaatagtagtgaaatgcactttaatgaataattacttagaacctatccagaagacagcaattagtgttaaaaatggttgtgttcagaaaattggaagaaacagtggaagtcaaggggaggtatgtctgagaatacagagtagttttctaaagatcttatggtgaaataggctaccttttccaaattgattgtcaatcagtagaagccaagcagaccagattaggggggaaaaacaacttagatgttgtaataaattacaaagcatagatttccaccccctctccccaaaggaacttggaaaccagttaggtgctcccactttacttttgaggaaaaaatcccagagatgttaaaagtacttgagagtcaggactgaaagccagtcttttgacttttatgttcttcagggaactttaatcaatttcttgagttacaaatgaagtttaaatttgacctgagatttgttccatttctgcttttattaaaggaggactaattttgtcaatgactttttcagtttaaaagtaaatatgtagaaaagggtagaaggtctaaactttatgaggctggagatatttgtctgttgtgttacctactatatgagtagaacctaaaataatgctgatgcattgtatgaacttaattgtggttgaatgaataaggcagtggttaagaatggagtcagaactggattctgttcccacatttgccatttttagcgctgtgcccttaagatggctaagtgttttctcatctgtgaacattagattttctggtctttaaatacatttgaaatcatactgtataaatatcttatgtctcatttcctattacagaataagcattttccacatattgtttccaatgaccacatagcattacataagttacaatgacgtcttgagctataaagtgtgttagactttatattatttccaggaatttgctacaaaaatatatttgttaaaatacttgtgtataaagcttttttcacatttcagatttccccaggagagcttttctgcaatgcagttattaagaaaaatatctccacattttgatacatgttgctaaattgcatttctaaaaggttgtaccaatttactaccataaaagtggtgtgtgtgttgttcttagctcactttttcattattttaaaatcttacgtctttgctagtttggtatatgaaagtattaatttgctttatctggattttttattgcaaaaattcaagtttttttttaatgtttaatgttttagcttttgtgtataaagtttaataattgatattcaagaatgatttatttgctcacttaatcagtaattcaacatatgagtgcctgctctgtgccaggcactgtttatctaaaatctagggatttagctttgaattgaaagttctgcccctcaagaagcttatattctggtaatttaattgtactgatttgccctatctactctggtgtatttacacttttcccccaggtttgagtataaaagcttgtgctttttgtataatcagatatcagtcccttgtgatttttttttaattgatttcaaatctagaaagttccgcccttgcaaagattttacaaatatactcatccatgggggtgtgtgtgtatgttttggggtttttgtttgtttgtttttgttgttttgtttttgtttttgttttgagacagggtctcactctgtcacccaggctggagtacggtgtcaggatcatggcttgacctcccaggctctggtgaacctcccaccccagcctcttgagtagctggaactataggcatccagctaattttggctaatttttgtatttttttgtagagacagggttttgccatgtgcctaggctggtctcaaattcctgggctcaggtgatctgccacctcggcctctcaaagtgctaggattacaaacgtgaaccactgagcctggctggtttttaaatattttttaagacattaaactcggttcatttgaatacatttttacatgctgttaggcaagcaactaaattgtggatttttttcccccctatttaaagaagaagtcaagtaacatttacctactgggtccttcctaccaccacctttgttagcatctttaattttttataaacaaggttctgttaaattatctacttccatttgtcctatactttcatgtaattgtttttgtgataacttccattttgcttgttttttgatggtgctgattaagaaatatttgcaatgccattaaaatatagtttagccaaattattaggaattctttgaaaagtattaacatgtcacatgtcacatcaacttatctaaagttgtttgagtggtgtgtttccctttggaaaaataaaataaaggcttcctccaaatggataaaggctagggaaagagagctctagtcagcaaagattctgggagaaggggaaggctttttcaactcttttggtatgtgtctagggatgagacggagactcgaacagtagagcccagattccaacattcttgttggggaacaacttagagtcttaaaatgctagctttgatgctttctaattctggttcagtctccctttgggtgagaaaaagaggatttctatctcctacctgcagtgatgtgtggcaggattggagacttgagaatggggatattttgcagctttaaggcatatatatttcagatcatatcattgtgttcttgtttaatagtaatcagaactatagtctaaacatgaggccaagtgcagtggctcacgcctgtaatcccatcactttgggaggccagggcgcagtgcaggggccggatcacttgaggtcaggagttccgagaacagcctggtcaacatggtgaaaccccgtctctactaaaaatacaaaatttggctgggtttggtggcgcacacctgtagtcccagctacttgggagactgaggcagagggatcacttgaacccaggaggcagaggttgcagtgagccaatatcgtaccactgcactccaggctgggtgacagcgagactccatctcaaaaataaattaattcagcctgggtgacagagcaagactgtgtctcaaaaataaattaattaattaaataaacaaacaaacatgaaagaagcacagcttgaaagtccctcagtgatctagaataatggttctcaagttaattttatactgcttgtcagttaaaaacatgtattttcgatatgtgtatatgtttacaaattgtgtaattataattctgtgtctgcattgtaaaacacagtggtacaaataggaaaaatgtgaagtgagggatattataaaaagtttacttgtgcagaaatgttctgttagaaatactatgttctggattgctggtttttaagtgtttaattttaaaaagctttataatatcatgaattagtatcagggaaatctacatttgtgtgttgtattgcaactaatttaagtccatgtcatagtcttgatcttaactgtttggcatacttaccatatctcgttagatggtttcttaatgtggaggttgaagaactagtactaggaatagaaatgtcagttcccttgctctttgcatgtgcttgccttatcttccatctgaggttcttctgcgggaatctttcaaccatttgtctatttgggcttttttgtttttctgggatggagtcttgctgtgttgcccaggctggagtgcagtagcacaatttcggctcactgcaacctccgcctcctgggttcaagcaattctcatgcctccccctcctgagtagctgggactacagacccatgccaccatgcctggctaaattttgtatttttggtagagacaggctttcaccatgttggccgtgcttgtcccaaactcctgacctcatgtccaccccggcctccctgtgctgggattacaggtgtgagccactgcatccggcctcatttgtcttatttgtgaaggtagcttagttacactagataactaaatttatatatctccttatcgggcatacggtaatacggtaagagcaaatgagtgaggacttcactgttggcctcttttggagttctccactctttcctcagaatacctgagtaatacatgatactcatagaccatctgacataccaactcggtgaaacctagactataaatacatagtaaatatttataaaagctcatttttatctctgggcagaaaaatagtcccagttattttcttctgcaccccattgggttatcagtgtgtactctagggagactagtgactaaaaatgataggttctatttaaagttgatcggcattgaaaagaaattggactgaatagtctcactccaacaaccatcaagagtctttgtggcattttcagaattgttgatgtcatcgtatgttttaatggctttaaaaaaaatacatttcaccttttatagtaatgttaattctatgtatttcctgtcaatagaaatctaatttatatttcgctaaacccaagctaaaaatatatattgactgtgaaatgtgcattaaattgttattgatcatagttatcaacattatgctatgttataacagctgtttgagatggagaacgtttttactgtgtcatcagatcctcatccctctcctgcagcccctccttcactttctttacccttatcttcatcttctacctcatctgggactaaaaaacaaaagaggaccccaacttatcagagatctgtaagtcaggaaagcagtcatctcagcttaccttgctttgtgttaagagcatgacctaggattgccactcattctggttgaaatatcttgccgactcaccttctaacttcccgaatcatttttttcaccttcactcttgaaagataacttcagtagattagggtcttactgcccaaagtatatctaagaatcagaagcattattatcaccttggatcttaataaagatggaaaatttcaaatccccatacctactgagtctgattttatattttaacttctcatttgagaagccctggtttacagccagaccttcttggtttgaatcttctactatttgactttggcaagtcatttaacttctctgtgtctgttttctcattggtaaaatgaggcgaatacaatactttcttgtgggcttttgtgaaagttaaatgagttaatatatgttaaacacagaacagtggctagtgtagaagaattaggacgtaaccacctacaggtgtggtggctttgatttacgtgatttgaccatcacacatatcgttgactcaaactttggtttatctttctagaatttgttactcttttttcctagtgaaaatatatcctttttattaataatgcccaacattccacttaaatggaaatacttataaatcagattttcagtgaaagggtctaaaacataattgtaatgatttagaaatgtcattactgtggtaaattatagacctaggctttgctaaggatttcgtcctgttttgtgcttcacttatagtttttgttgttttactcaaagaagggaaatggaacatccaatgtgatagtattttatgacctaggcagattccattatattgcttttaaatagctcctatttcactaaagaatgggaacgaagtgatagttacagatttcatcagtatgtaaaaagtgaagggtttcttttaggtaaagatttctttaaatgtacctgtgaaatgattcagcatttttaaaatggaaatgcttttgctgtcttggagttttgttgtttcagaagttttctactgcactattttggatagtctttcattaaaggacctaagcatgaattactctgaaattttctagtttaagtattgcatagaaagttcattttattgtgttaatctctactaacttgaaatatgccttccaaatgcatgacttactaaacagtattaaggtattggctgaagtttcaaaatagcgttaccaaatctcttaagagtctttggtagtttgtggtcgctgtctcttaatattaattacctttgttctgaaattgttgttttagtaattttcacttcatgtaaaggcagcatttgctaatgtagttgctataccttaatattaaaccccagaaattctatttttgtctgataagtggaaattctaccataatttggggcaattccccaatataataagttgtttcctctgaaatgttttattagctaaattaatgctgcagtaataaagtctataatcttcccttcattttacttttttttgcgtttttatatggaagatttagtgacttattaaccagacttaatatgctatggagataatgtacagatatgtatatattctttttctttttaaaacagatgagctttgatccaaaccttctccacaacaatggacataatgggtaccctaatggtacttcagcagcactgcgtgaaactggggttattgaaaaactgttaacctcttacggatttattcagtgttcagaacgtcaagctagacttttcttccactgttcacagtataatggcaacctgcaagacttaaaagtaggaggtaatctgtcagttctcctttgtaaaaatgtaatcacaaaatttgtcttgcatatcaatttgttcatgagtgtttttcaaaaagttttatgtaaattaaaacattttggacttttagttgtactgtttagtgaagaatatctgtataaaccagcagaatccttgaaagattatatttgcatatatttacaataaatgcttggaagatttcattgtttttccccataatgatgactgtttacccgtaagattttaagccagtacgaatattgaacttttgtaatgttacttatgattattctgtcaggtactattttgggtagtacctgaaaaaagtaatccttagagtgtcacctcttagaagctgggcgcggtggcttacgcctgtaatcccagcactttgggaggccgaggcgggcagatcacgaggtcaggagatagagaccatcctggctaacacggtgaaaccccgtctctactaaaaatacaaaaaattagctgggcgtggtggcaggcacctgtagtcccagctactcgggaggctgaagcaggagaatggtgtgaacctgggaggcggagcttgcagtaagccaagatgccaccactgcactccagcctgggcgacagagcgagaccccgtctcaaaaaaaaaaaaagtcacctcttagattatatggaaattcattgtggctgacaccatacaaattatttcacaggcctggcatggtggctcatgcctgtattcccagcattttgggaggccagggcaagtggattgcttgagctcaggaattcaagaccagcttgcagcctgggcaacatggcaaaaccccatctctacaaaaaatgcaaaaattagctgaggaacgtgacatgtgcctgtagtcccagctactaagtagactgaggtgggaggatcgcttgagcccgcaaggtagaggttgcagtgagctgagatcgtgccgctgcactccagcttgggtgacagggagactctgtctcaaaaaaaaaaaaaaaaaaaaaaaaaaaaagtttttacatgtgaagtgtttggcttactaaaggactgaaattatgaggcctctgtgcatttttaaaaaacgtttgagaaaagagtcagtataatagctaacaagatgcatgctataggaacattgttttggttaatcctcatggcagtcctgttaggaattattctccttttacataagagaaaactgaggtacagaggagtttaaaaaaaaaactcgccaaaggttatgattgttaagtcatctcatttgtagtatgtgtaaatgccataaaaactaagattaagacatggctatcttagcataagatggtggttctgaaacatttgtgtgtatcagaattagtggaaggcttgttaaaacacagattgctatacttgatccccagagtttgtctttggctaggactagagttaggcccagtatttcttttaagctcccaggtgatgttaatgctgctggtccagggaccacactttgaaaaccactggtctaaggcaattcaaatgctatgttaagtatagcttggaagcaatatatcgtttcgcaaaaatcagttcaacaaacataacacattatttatttttagatgatgttgaatttgaagtatcatcggaccgacggactgggaaacccattgctgttaaactggtgaagataaaacaagaaatcctccctgaagaacgaatgaatggacaagttagtgactttgatgctttgtgtttttttagggccctgcatttgcatatctttcacattagaaaaggaagattctccccatctcctcagtttgcacgaaagagagctatagtatataaagattactattttaaaattaatcaaaagcactggcatttcttgacctgaaataaaaatatggtcaagactcaattgggtttttacatataaccctgagtcaatgcttacagtcaatttacatactgtaagtttgaaacttggcagcatgacatcctcttgtggatcatattaaaatgcatccctgtatatagtatagaggatattaaaattcagtttatattgcacagtgctgctcctgaaatgattagcaatggaaatttttttttttttgactggtaggttgtgtgcgctgttcctcacaacttagagagtaaatctccagctgccccgggtcagagtccaacagggagtgtatgctacgaacgtaatggggtaaacttgtgtatttttcttaaacctttgcctgatccaccatgtgatctataagcgtactttaaaattcaaaatagaaaacgtaagctgcaattgttaaaatcagttttaaatttggtttctaagaggcttcaaatgcagcataatcaaaaaatttaaaaagaaaaattccataggacttccaagtgtcttagtttgcccaagtatgaccttagttagaacattaaggtaaaatgttccttttaatcacttttttgggggttgtgggggggatctttttctggtttcttttaagcactaacaccagctttttttgtttggaatgccttatataaaattgtttttttgaaatgtaactatagtctctgggcaaatgcttccacgtgtgtaagctttttgaagttggattgctgctcagctgtggactcgcagaagtcatcagcaccatggaggggaagtgtgtgtttatatgaataaagtgacttgtcataaagcatttaattttaagaaatttggcttaaaatgccagtataagaggtttttaagtaagtaaatcacagtatacagtgaatatgcatcctgccaaaatagtaataatgatttattaattcacaggaagtgttttatctgacttacacccctgaagatgtcgaagggaacgttcagctggaaactggagataaaataaactttgtaattgataacaataaacagtaagttctttttttttaaattttctcacctaagcggtttttttttcccccctccattaagaaatttgaatagagttaaaaacctaacttgtaagtctggatagttttcatgaactttcaattcatcaactaatgctttgaggtctatgaatattgtattacagccatgatgcagggtctcagaggaagatgataattaaaacattgttaggcattttaaggacttgttctagagatcagtgaaggtttttcaaaaaatagtgctttgaggtaagttttgagggaggggtatagtcactatagagaggtgagaaaaaagcattatgattagaagtatcatgacatgttgggggaaaatggccaaaagtttggtcgaactgaccagaaggtaaagtttgagcattcttctatgtaggaatctgcgttgtttaaaacaaggaagtgtgattggtttagatctttggaggtggtggaagtggtagacttttgaaaggtggggatgctgttgaccagaggcagtgatgtgagagttaacgtgaaagatgaccgcctgatatggatagactaagaggatggggtggaggagtcaagtcatattgagaagatagaatcatcaatcttaattgatttgataaaggtggggttggaattaaagggagtcccaaatactgtttttctggcctggcctactgggcagatgatggtaccataaactgggctaaggagacataaggagaatgttcaaggtgggaaaagaatcatacttatcttggcaatttttgagtgtgagatgtttgtgatatatctgggtagagatatcaaatctacagttgcgtgtataggtctgagacttagacctattaagtctaaggtctatttcctgcctataggggaagtatatagagctgtagaattcatcagcatacacagttaaggaaaatgtagttaagaaagcccagggagaatattatttttatcttggcataggagagatgagagatgcaagaggagaaggaaattaaaatagaaagttggagaaagtgctagtaatgtaccttccagtagcatgtggagggaaaagtcctaagagcatgtctgggattatctgccttgaaccttatctctttcttggcaagccttgaaggaatcagattgtgttgtaggtgtggttattattagttacagtctgaaggcctcaatttatatagttgttaatctcagaacagccttacctggtaagtttcttcatctgtaaaatgacgtataagttctcacaaagttacttgtcgatgttcatactgcttttaaatagcaggcatttaaattcccatctgactctaaagcgttttcactgcagtaagttacaaaaacaggtagaatttttctggtgtctttgttagtctgtaacatttttttaaataaaaagcacattttgggttatttgtctgtgaaaaattaagggaagtaattgcttggtgtataggtcttttcttaaaacatttagactaacagtaccattatgtcttatacagtctatgttatcttaaaaacaaaattgaatttacatcgctgctacacaaatatgaaggcataaaagcaacatgtggtgtctctaacttgtttccattctccaatggaggtggatatcattacttttaaaagcatagcaagttctcttaaagtcacttcatttactcaacttttatggctgtttactcagaaataattaatgagatagctactaaatttagcactcactgaaaatagagaccatctcctatttatctctgtatcaccagtaccttactttgccgcagattatacctacacaaatgtttgtttaatgaataacctttataagactttagtattccccacctttggtagcattcgctttgtggctttatttcagttattttgttgaaatagaaaaacagagtagaacatcacgcacccatgtgtaagtttgtaaaaaagcaaatcttccaacaacagtcccagagaaagatgacctatatatatatttgccaaacgtagaaggctaaggagttaaagtcctttgcatataaagccatatgaaaataatcaaatgtcataaaccctgtatttattcttagtgatgatagaattcttaaagccccaggaaactagtttctttagactcatatctaagcaggccaatacatttttaatccctgtttcattcctcctccctgcaattattttttttctagtactggtgctgtaagtgctcgcaacattatgctgttgaaaaagaaacaagcccgctgtcagggagtagtttgtgccatgaaggtaagtgttaaatttgagaaacttgagttttctttggccacttgaaatgttgtacttcaaactccagcctttgtttttttttttcttttttatcttacccttttaaaatatttcactgttaacctcaaaagtagtctcttaaaattccttggttgctaatacattatcttctttaaaattggctgtttaattgataatattaggttgtaccaaattatattattgtgactacagtataattttacaaaaattactggttttaagttgtaatcataaatttgtacagagtggtaataatgttcttggttttttattttgcttcaggaggcatttggctttattgaaagaggtgatgttgtaaaagagatattctttcactatagtgaatttaagggtgacttagaaaccttacagcctggcgatgatgtggaattcacaatcaaggacagaaatgtaagacagtcagttaacttgatctttggccttttaagatcagagttggtttatgtttttaagaaacacttaaaattatgtgattcttccttcctctgtccccccaccacctccaaccccttctgatttagggtaaagaagttgcaacagatgtcagactattgcctcaaggaacagtcatttttgaagatatcagcattgaacattttgaaggaactgtaaccaaagttatcccaaaagtacccagtaaaaaccaggtaaataatctttttcaggagagtcctatttcgcctcagtagtaatagaataatatggtgtggtatactgagattttatcttattcagttaatataatgtggtagtggaacaactaaggacctcttgttacgtatatttaaactaaaagagaaaccagatttatatattcataaatatggtgtttttttttttttttttctttttttgtgacagagtctcgctctgtcgccaggctggagtgcagtggcgcgatctcggctcactgcaacctccgcctcccgggtttaagcgattctcctgcctcagcctcccaagtagctgggactacaagggcatgccaccacacccagctaatttttgtattcttagtaaagacggggtttcaccctgttggcaaggatggtctcgatctcttgaccttgcgatctgtccaccttggcctcccaaagtgctgggattacaagtatgagccacctcgcccagccaaatatgtatttttttttactgggtgatgaaaaaaggccaaagaagaaaatgctaattaaattggaaagcacctgattggattagactgcagttcaggtgtacatttgttccctcctctgcccctgccctacccctccagtttgtggggaaggtgaggacacaagtggtgtcattcctggaaaaattccttaaataaaatcttttggtaccagagtgctgggtcttaattgcattgttgtaattttatggttgactcgtgtgaccatagaccatgaagctttcacattggacttatgttgtcaacaccttttttcgcttcagggaactaagttaaaaataacatgggtttactatgtgttcttcttgtttgacttagaactaggaaggatgagaaatctccagctaaaatcgtttttccttctcatcagaatgacccattgccaggacgcatcaaagttgactttgtgatccctaaagaacttccctttggagacaaagatacgaaatccaaggtgaccctgctggaaggtgaccatgttaggtttaatatttcaacagaccgacgtgacaaattagagcgagcaaccaatatagaagttctgtcaaatacatttcagttcactaatgaagcccgagaaatggtaagtgttggatattactggatatgtatctaatatgcgaaagccaatgttatattcaagtttatactactaaattaaaatttttcttaagttaaatgaccctaatgggcatttaccttgttaaggtgattaagaatcatacacatttgagtcagtctgggttatctctggcagttatcttggaaatatatgtgaaaaaattttttgaatggaaatctggacaggattactaagatatttttagagtcagtgattctcaggcccttaatatgaagagtaagaaaattcaagttcatcattgtagaaagtagattttcccaaactatttcctaagacatttaattagtggtttctgtttttaggaaacacaattcttcctccagtgtggtccagggaagccaaaagattgaacacccatgatctagacactagatcacacataaaatacactaacagcaatgatagctgatgagcttttttaaaaaaaaaatcataggcacggtggctcacacctgtaatcccagcactttgggaggctgaggcgggtgatcacttgaggtcaggagttcaagaccagcctggccaacatggtaaaaccccgtctctactaaaaatagaaaaattagccaggtgtgacggtgggcacctgtaatcctaactactcaggaggctgagacaggagaatcgcttgaacctaggaggcagaggttgcagtaagccaataccatgccgttgccctgcaacctgggtgacagaggaagactgtctcaaaaaaataattgcaaaaacatctcatcatgttttaagaaggtttaacaatttgttgtgttgggccacattcagagctgtcctaggccatggtttggacaagcttgcaattaaaccagagtcaaaaaggttttgttttggcagaacttcacaaattgttttttaagagtttgtgtctgggagtggcataaaccaaccagattttttcccaaacatgttttatgaactcattttctcagacataatttgcatttagttacgtttgggatcatatcatctacactataactcagtgttgccagtggaactgggtacattgaatgaaaatttaagtttcttgagttttttttaatcctttgcctttgaagaactggttgtatttgacacagtgtatttaactttaaaagtttgtaagtctgaatgtgtgatttttttttttttttttacattttcaaaggcaagatctgttttgctttacggtatggaaaatataacttggctactgtcaggacttggcaaggattaaatgtcaaaatattgtttaggtcatatttaaaacttacagaatcacttctgcagtgagcagatatgtagtatgtaatacaatagcagattgataatttgtgttcattgtttcattaaacatgagtatctaccatgttccaggtactcttgatacagtaagccttacaaagctgataatttagtaagaaggaaaaaaaaaaaagagaaaagattgcatatattttattcttcagatgtaaattttaactctttcctgggcctaaactcatgcaatttttgaggtagagactggagaagtgcctttgtctactttggaattatggtctgtaaattagtgaagtttctggagattatattgtcattagacttgggcttttatgaaatacattgtgttcacgtgtttacgttcacatgtggtaattttttctagtgcatatttgccaggaagtagcaattggagagtcttagaaaattgctcaggttaagttactttgttgaaagcaatgagtttgtacttaagtgagaacagttcaaatgtggatacagtatttgtgtcacatcagagaaaattcctgatgaatttaacttgatggtggttgtaaagttgaatgttgccttcttgacaagtttcacagccagtgaaaatattatttgggtttcagggtgtgattgctgccatgagagatggttttggtttcatcaagtgtgtggatcgtgatgttcgtatgttcttccacttcagtgaaattctggatgggaaccagctccatattgcagatgaagtagagtttactgtggttcctgtgagttgtttctgagaaaagttgggaggtgtttcttgatgctttctttttcaattgaaagttaattttgttttatcatttttaggatatgctctctgctcaaagaaatcatgctattaggattaaaaaacttcccaagggcacggtttcatttcattcccattcagatcaccgttttctgggcacggtagaaaaagaagccactttttccaatcctaaaaccactagcccaaataaaggcaaagagaaggtaggttttgcataatccaaatgatttttgtagctgtttatttctcttctgctttaacagcacatagtaatagagtacatataatcagcggaagtttgtctctttcagaatttctgtcatattaacagtgaactaaacaaagtaaggtttcttaaccttgggattattgacattttgggatgaatgattctttactgtgggggatgggatgtttagcagcatttctggcctctacccactggaagttagtattctgaccccttttccctgcctcccattgtgacagccaaaaatgtgtccagacattgccaaatgtcccctgggaggcaaactcattccaagtagagaactagttatataaaatgatagtactgtcttccaggcaatttaaaactttcaaagttgggtgtatcctcagttcacacatttaaatttcatttattgaaaaatccactaaataggaaatagaaagatgtctgagatgaattctcctttcaagttaataacaaattgagagttttatagaaacaagtaattcatatagaatataaaatattgctattgaaggtcagcgatagtgctctggtgaaaattaactggtagggtatgtgatggttttactaacagatggagacaggaaagagcattcttcacagagtaaaagtatagatgagaaaaattcagggtttctttaggaagcaatgagtaactagtccgacaggaatttttttttttttttttttggttttgtgtgtgggtttttgttggtgagggaggttaggagaaataaggatgaaaaatcaggatccagctagactgggagggtgttgattgctgctctaaagaatttagaccttattgtcaggtgcggtggctcacacctgtaaacccagcactttgggaggctgaggcgggcggatcacgaggtcaggagattgagaccatcctggctaacatggtgaaaccccatctctactaaaaatacaaaaaaattagccgggcatagtagtgggcacctgtaatcccagctactcgggaggctgaggcaggagaatggcgtgaacccaggaggcagagcttttagtgagctgagatggcgccattgcactccatcctgggcgactgagtgagactccgtctccaaaaaaaaaatttagaccttgttctgtacttcaaggaaaagatttcttttggataatgacatcaggtatgtgctttgggagagtaatggcagcaatatgaagcctagatgggatggagaaagacaaaagatgaaaaggattactatgaaattacttggatagttaaggtagtccttgaactaggcacacagatagtgactatagacaagtgaaggtacatgagagatactggaaagtcatgttataatttaataattgctattagccagaaagagcaaggctagtatcttgcttatcacttactgtagcttgggaaattatttcacctctgagcttcagtttttaaatttcaaaaatgattgtgtaatagtttaaaaagccctcgaagtacctagctcataataggaatttcgcatgtgacagatgatactgttaacaaaaataaaaatacacttcagttgggcttatttttaataacttttaattcttggaatgctctgcttcccaaatgtgtctggcaaaactggcttgatgaagagagcctttgtgtgagactttccctgccattttttgtttttttttctttcttagtccaacagtaccctagtaaatcctctgtcatcatgcttcttacagtatataacatttacctgttaatgaatctgtctctgctgcactggactccctcagggcagggattctcctatctctatttaatatatttgatgtatagtatattgtcagctgttgatgttgaagttggtgagttaagagcaaaaggtgaacagtaagcttttgagtttggttgtggaaaagttgatgacattggagtcagacctgagttcactgacattgttcttaaccaaactcaaatcctctggattattttgcgctgggttttgtaaccttggtaaggtttacttaattcctcagatttccccaatttgtaaaatgagggaaaagagaaactatggagatgattttgtacaagattaatttgataatacataatacctggtaatgttgtaagtgttcaataaattattatatagcagttatggaaggaatgtgattggtagaagaggaaaatgaattggttttgaatatatcgtagtttgtaatgaggactggagtttaggaaggaagtcagggctagagtagggacatgggcattatcttcatagaaatgttgaaaccataaaatcagtataatttatgtagttgctgtacactgtcattacttaacggtgtgattcaatacgacacacctgaactttcttagacttttatttttttagtcaagtgcagtagtgagaaggggggaaagaggagaacaaggaagttcgatctgtaactgactgaacaatcgagataacccactaccttcagaccagcccttagattttttaagagttaatcattcttacacgtacgatgactgaaatgttgtttctccttgaagtctggtattaaaaaaaattgttgaaatactagtatgtcataatttttaatcatctactttatgtcaagtacttgaactgtgctagatcatacaccaaattatcctgcattgttaagtatattgattgacattatatattaaatactgtgcaaggtgctgtgtgctactaaaagaggatacttcagcagcttctttaggaaatactaaagcttcttgcccttatagaatttccacttccttggaagtaacatgcccagtttaatttctgattggctatgaggagcgcaggtgtattaaacattttcagtaagcttttttctcctcaatagcaaaaattagattcttaagattgaaagaccaattaaaaattacagcagactgagctaggcttaaggcaagactaccttttattcatatgaataatcttttagaaaatgctggaataagacatttttacagctgtaccaatcctttggcacaagaatatgtaagaactatagttgtttttattggtttttgttcttgagattgttttcattctgtttttgactgtatctctttaggaggctgaggatggcattattgcttatgatgactgtggggtgaaactgactattgcttttcaagccaaggatgtggaaggatctacttctcctcaaataggagataaggcaagataattctgctcattcgagagagggttaagagttgtcatcttaatcataaatcctgcaggatgggttcttcaaattttatcaagttttgctgaaatatattttgtgtttaagagaaatacatgaatatcttgtatttgaaagcagcttattaaaagtgtctgtcaagctctttgttaatcaaagccttgttaatctagctgtttaaacgttagataaaacatgcttaataaaatcgttattggtaagaaagttaaaacagttactactgaaacattatcaaagtaaaagcacaccaaagattttacgttgttgttcattttttctcatacttaatatgtttggtttttggatagccctctagagaaattcagaatctataaggaatacagactgaaagataaaagtttgatcctttgtgaaaagtgggatgagacataaatgttttggtgaaaatcaatttcattgaagtaataacaaaggatatttggaatgaaaagcatgcgctgggggagttataggtcttgttttctgagttaaggagattggtgtggaagtgatatggtgttaatgagcatccttaattttcacaggttgaatttagtattagtgacaaacagaggcctggacagcaggttgcaacttgtgtgcgacttttaggtcgtaattctaactccaagaggctcttgggttatgtggcaactctgaaggataattttggatttattgaaacagccaatcatgataaggaaatctttttccattacaggtaaggcgtgactttcaggaactttacagctaacttaccatccattctttggtgttggaataaaaaacatttagtattgattgattatacttgttgaggttcagatttcatattggtagaattatggcaagatataaactgaagttaatcactgatcttactatatacagagcctgtggccaaaagaaatagaaaggcctgtgccaccttattttttgtgttggtaccatagagttggccatttggtgtataatgtagtgtaagagtaaggggtctgactgggtgtggtggctcatgcctataatcccagcactttgggggctgaggcaggtggatcccttgagcccaggagttcgaggccagcctgagcaacacggtgaaactccatctccacaaaaattaccaaaattagcctgacatggtggtgcatacctgtagtctcaccaactcaggaggctgatgtgggaggaccacttgatcctgggaggcagaggttgcagtaagctgagatcgcaccactgtactccagcctagccaacagagtgagactctgtctcaaaaaaaaaaatagaaagtaagggttcttagaaccagacagttcagtttttgaatccaggccctgccactttatacctgtgtaatttttaccaaataacttcttggtatcttagtttcattatcctgaagttagggataatgttacctcttcatggggcattcttgaggattaaatgagtcaatacatagaaattacttaaaatggtgtctaatgtaaataagcatgccatgccatgactgttactgtaaaataaagactgcctgttactgttgatgtttatggtaatgtttagttaaatgtcatttcctttctccttagtgagttctctggtgatgttgatagcctggaactgggggacatggtcgagtatagcttgtccaaaggcaaaggcaacaaagtcagtgcagaaaaagtgaacaaaacacactcaggtaataaattgtgacttcttattcagcctgtgcttttaagtgggagataaaggatggagtagtagagggagatgaggcctaattattctacatcagtcattctcatgtgcgattccatagaacagcagcatcacctggttgcttgttagaaatatacgttctctgaccctatcccatacccactgaaactctgtgagtgggcattcttttttaataaatcctttaggtgattctggtatacactgaagtttgagaaggattggcctagatattttaggaaatttgctttatattttcaattcattgtcttcttttgaaaaataaacccaggatagccagctgtggtagtggatgcctgtagtcacagttacttgggaggctgaggtgggagggccgcttgtgctggtaggttgagactgcagtgagccatgatgatcctaccactgcactccaacctgggtgacagagcaagactgtctgaaaaaaacaaaaataaccccaagatatgtatacatcaccatggagtagggaagagaggcatttccctagaagattgttttgaagaagaatgaatctaaatgtgaaaaataatgggaagttaaaaaaattaattgtaatttaggatcttggatctctgactttaaaagacctgcaacttatttttggctctcatctgaactcttaagtgtgtgttatgttttagacactggggatacagcagtgaagaaatcagatacatccctgtattcattgaccttattttttggtggaaaatatggggcagactagaggagtaaaatactgtatatgatgtttagaaagacaacaatacatgtaataaagatgaatcaggacagtatgtaagtattgtgatttacattttagagaccaggaaaggcttcttaaaaaatgacatatggtcacctggaaaaagtaagagatcaaggcatgttttatttatgaatacttattaattccttaaacaattttatttaaacaattctatttaggaaaagcaggcattttggtagtttagaagtatttaaagtccagcagctgttctaaaaatagaacttggcttcaggttccctaccccatttcaatagcagccagccaacctaccctgttaacatttgtgctgttattttttgcttacttgtctttctatgtagtagagatgaaataaaattgaaagatgtacctgcctttgttttgtagtgaatggcattactgaggaagctgatcccaccatttactctggcaaagtaattcgccccctgaggagtgttgatccaacacagactgagtaccaaggaatgattgagattgtggaggagggtaaggatcatcactatcaggctgtttgaaatttgccataacttcagatgagcacctataaagttttaaaatatggtgcttattgcagttgtttttaggtttaaaactgaattaaggaaaagtgacctctctcatgcttgctttttatttttataccccttgaaaatgaggtcagtctgggtttaaatagtgaaaacgtgactgctttgtgagcacatgactgatacatgagcaactatgagttatattgagatagacttaacaacaaactctgataaccaaagcttttactgttgagtgtatgataatcaaatattcagttccttcattagtatttaaatcagtaagcattcagttctgtatttttgcttcctgtaaaagtttactgtttttttcccccctacactacacatatgtacataatctgtttcttaatagctagagttctatgaggatcctatttctcgtttctagctcaggcttcctttcattctctactttcttcttcttttttccccatctatcttcaagaattcccagagttccagtgccgctgttcccccaacagtcaccatcagaaaggccaactttgtatgatctgtatgcataaaataaatacatgatagaaataggagagaactctgtagatgattaggatagcagaattacatgatgtggagtagatgagagggcttgagtattccaaccaaagatgatggcttggtaggccgggcgtggtggttcacgcctgtaatcccagcactttgggaggctgaggcgggcggatcacgaggccaggagttcgtgaccagcctggccagcatggtgaaaccccgtctctactattaaaaaaactaataataaaaaaattttaaaaagaaaagatgatggcttggtttacaaagagaataaagtccttgcatcatctaagagtcagcgaacataaagtgctgaatagcaggtcatttgggagaaggaaatgaaccttgataacctattcctttaccacatgggattcttagaatttctgttctacataaaaccactgttctcccacctctaaatatgaatttttaaacaaatgccatgacatcacacccctaaaaaggccatgggagtatggactactaactttaactcataatatgatatcaaattgcccttccatctcctaacgtgctgcttttacttccttttccatccccacttcccagtccactcattcttcagcactggctgtgggatatagtccaaagcaagggttttatttaggcatctctaagcctggtgggatatagtccaaagcaagggttttgtttaggcatctctaagcccgggactagacagattacattttcccacttggtaagaactagctcttttattcaggaacacaactgtaacttatactaagactttgaagttgggcagacctagatctggacaccgttctagcatataatcttggacaaataacttaaatctttgctagctcagtttcttcatctttaaaatggtaataccttcagccttagatggttctataaagtatgaatcagtatgtgcatcataaatggtaattattgatattgcatgaggtcagaccagcttcctctaatcactcttcccatgacttgatctctttggattatctcctcaaagttttttggttcctgtatttaaaattaaaagtcagctggggtcgagagtaggggctcacacctgtaatcccagcactttgggaagccaaggcaggcagatcacctgaaggtcaggagttcgagaccagcctggccaacatggcgaaaccctgtctctcctaaaaatacaaaaattagccaggtatcatggtgggtgcctataatcccagctacttcagaggctgaggcaggagaatcacttgaacctgggaggcggaagttgcagtgagctgaatcatgccactgaactccagcctggttaacagagcatgactccgtctcaaaaaaaaaaaaaaaagtcaggtgtggtggctcacacctgtaaacccaacacttcgggaggccaaggtgggcagatcacttgagcccaggagtttgagaccagcctgggcaacatggcaaaaccctgtctctacaaaaaatgcaaaaattagccagtcatggtgtgtgcctgtagtcccagcgactcaggagctgaggtgggaggatcacccgagcccaggaaatcaaggctgcagtgagccgttgatcgccactgcactccagcctgggtagcagagcgagaccctgtctcaacaataacaatgacaaaaattcttcacttaccctgtaatcatcaagaggatggttagaagcttctgcttcccacctgtttttctcatgttttccactattgttgactgagtacatttgcctggatgctgaaaattgttaggcagctgaattctttggcatagtttttatctgtagcctgcaccgggctccaggcaacttcatactgtagggcagggctcagcatatatggtggccttttcttgtgatcacagccacaaccatttgtttacatattgtttttcgttgctttctcactacaacagcagagttggttagacaggatgacttgcaaacctaaaataatactctccggccctttaggaaaatggtttttggtctctgatctggaaaaaggaacctatgtgagggagccagaattcgaacaaaaaaaaaggaggtggggtgtcaaatttatctaaattgtttttgcctgtgcccgcctagttgtttactggctcattgagtatgggacaaaagtatttttggttggctcatattgtgaacttgggaagaagatagtcctgtgaatattggcaacccatagtgcttaaaatttaggcaatgggattgtaaatgacagtattttttgttttaatttataaatgcagtttaaaattgttcatcagctaataaagtactgatgggagctgtgacattctcatttggttccatggtagtatttaacatttaggatttcatttaagctttaaggtgaaacttctgagtactgaaaatgtaaatatattttaagtaacataacacatttttagcagttatataaacttcctagggtcatcagcagaggactgttgtgaaatactagcttttagactttgtacctgttttacaggcgatatgaaaggtgaggtctatccatttggcatcgttgggatggccaacaaaggggattgcctgcagaaaggggagagcgtcaagttccaattgtgtgtcctgggccaaaatgcacaaactatggcttacaacatcacacccctgcgcagggccacagtggaatgtgtgaaagatcaggtaagtgccagcatctctgtatctgaatttgatccttctatgagttggtaaccaaaaccttcaaatattttcagccaaggggaaatcatcaacattcattcgtttttttatttctacttcaccttttttcagtcatttgaggtagcttaataaaaacagaaaactacacaaaaagtgactatattagcaatgagaaagtaagattggtattagtaactaatattatgcaatggggaaaataagttaggggtgagatttccagaatagaaggactatatggttttgtacacttttgcttagagcttcttttgcatatcacacaaacacagaaaccacgttcaaaagtacttaaaaaataagcttagggcaaacaaacttagtcttactcctgagatctcagggaaatctgagtcctcagaatgtttttcatcagtacagagaataataacattttgtatggctgctactataacccagcttaattctagaggggatccaaacaatatatatgttgaagtaacagcttcctgatgagtttgcttaattcaaaaagcttagttcataatatacgaaggaacaaggcaagttttatttgtttggttcaagtttgtgatatagtgaatggcactttcagagatacatttcttccctgacaggttttgccacaggcagctggactggagtatcaacattaataccatgttttatacatccttttagataggggcaggcattgtgcttcattcagagtgaggtgtggcatgccctctcttttttacctacttttttttttcagtttggcttcattaactatgaagtaggagatagcaagaagctctttttccatgtgaaagaagttcaggatggcattgagctacaggcaggagatgaggtggagttctcagtgattcttaatcagcgcactggcaagtgcagcgcctgtaatgtttggcgagtctggtgagttttgttgttgtggtttgattagtaactaccctggagtgtctcaactttatagtctctgttttgtcacatcacttttctgtgccttgtcttctgccacttattatttcttgatacttcctacttctagttgaatacaaaaagattgtttagtacatgttttttaaaatttttgccaaattcttcttcttccattaagtcatttctaggttatatgctacttaaaattctaatagtttagccatgctgattcataatgccgctttgcttccccagagacagtctcacagtctgattcggttacccaggcgctatcacgactcactgcagactcaaccccctgggcctaagcaattctcccacgtcagcttccccagtagctgggactacaagcatgcgccaccacatgcagccaattttattttttgtagagacatggtcccactgttttgcccaggctgatctcgaacttctgggctcaagtgttcctcctgccctgtcctctcaaagcgctgggattacaggtgttagctaccacatctgctaccttgtttttttatgcatctgtggaactggtcactcttgattgcattcaagtctagggtctgcaaatgattccttccattcctattaagttgggaccttgagttggggataataatacataaacaaacttgtctgtcctgtctttctagctaggtatatgaggcaagagtcccatcataaaaagtgagtcatttgggcagttaggtggaaaacacactcctttgcaagtgcttgctgtctgcccaccaagtgtggtttcttctcatcttttgacttaattacagtgagggccccaaggctgttgcagctcctcgacctgatcggttggtcaatcgcttgaagaatatcactctggatgatgccagtgctcctcgcctaatggttcttcgtcagccaaggggaccagataactcaatggtatgagggcatacaaggcttgggggaggccaactgatagaccaacataaaatatgtggtcctatttaaacaataggtcaggaaacttaatgaagcagggagacttccatattgcttataactagttaggactttctacacattggttcagccccctaacctaatggttgcttacagtaagaagcacatttcttttcttgatgctttgaagacagtttaggtaatgaatgggtcaggagtgcttactgtggattttctcctctaggaaagaattagtactgcataagatgattaaaaataatgcttttgtagtttcatttcggaatagtgaatgtactatgattgttgtgcgctcaaatcattaactgcagggttttttttttctcccccccacaggggtttggtgcagaaagaaagatccgtcaagctggtgtcattgactaaccacatccacaaagcacaccattaatccactatgatcaagttggggggaatctggtgaagggttctgaatatctccctcttcatccctcccgaaatctggaatacttattctattgagctattacaccagttttaacaccttcctcgtgttatgtttaaaaaaataaataaatttaagaaaaccattttaaataatgcacagttgcagcctggaaaaacttaaggtggcgccttatagtatcaattttaggagctttatttggtgcatttaacgcaactggtaattgcagaatccactttgcctgtgtaagtgaaaaatatagactgttatcttgttggccctatgaaattctgcacttttcattatatactctaccttcattaattacttctggcaagatgttctgccttagcactcagttgcattcttttcctttttcttcctgttcattatgctttaattctgaggaccatatgagggtagaatatattatcttttaaaaattacaaaaatttgtataggcaaaccatttcttaaagttgatggccaaattttaaaatgttatttttcatatcatttataatcttgtcacaatccacttaaagaagtttggttatatttcagtgaaaattttcttccagagtaggttttttttcgtgggttggggggtaactttactacaattagtaagtatggtgcagaatttcatgcaaatgaggagtgccagcagtgtgataatttaaacatatttaaacaaaaacaaaaaaaatgaatgcacaaacttgctgctgcttagatcactgcagcttctaggacccggtttcttttactgatttaaaaacaaaacaaaaaaaaataaaaaagttgtgcctgaaatgaatcttgtttttttttataagtagccgcctggttactgtgtcctgtaaaatacagacacttgacccttggtgtagcttctgttcaactttatatcacgggaatggatgggtctgatttcttggccctcttcttgaattggccatatacagggtccctggccagtggactgaaggctttgtctaagatgacaagggtcagctcaggggatgtgggggagggcggttttatcttcccccttgtcgtttgaggttttgatctctgggtaaagaggccgtttatctttgtaaacacgaaacatttttgctttctccagttttctgttaatggcgaaagaatggaagcgaataaagttttactgatttttgagacactagca

SEQ ID NO: 7181 - DNA, 625 bp, Homo sapiens
gggcttagaaaatcatagaatgcatggtcgctgctctgaagaaagaatttagtggcatattctcgcttgacttatgtgctgtttcatgcctagaatactcagctattttctttctcctagaattctgcctgattttccaggttcacttcaaattccacttatttaaaagccttggttgctttgatggacatgcagttgtggataaacaataaataatatttctagatagtctgtgacataatagatacctagatactaattgagcaaaataatttttggcatttttgtcctatactctgttttttttttccatgtttacatcttgtcttttcagcaagattgtctatgctctcatggcagggacttcttttatgttttccacagagctagatccttataaaatacttgcactaaattaaacattatgccatgtaactgagcttatttgggggaagaggtcaataaagactatggaataatttgaggtcttgggtatgagataccaaaggaggtagttgctagtacttgagagattgctccaaataacatcagatgagcatgcttccaagtttcctgcattacttgcatgacccatgattctaagttaatgaaatgagtttgtccc

SEQ ID NO: 7182 - DNA, 12301 bp, Homo sapiens
cgctccttggtgggggctgttcatggcggttccggggtctccaacatttttcccggctgtggtcctaaatctgtccaaagcagaggcagtggagcttgaggtaagtttatctcatgcatagtgttcggctttgggctgtggaatgttcaggcgtttcactgatgccagaaatggagcagaatctatcagctggagacaaaggccttgggcgggggtccttccatttggtgcctacgtggggagatctttggagacagaagggagaatgggaaggagttgcggcctggaggcttcctgctagagctgagaagccttcggggagtaataggaagggggatttccattgcttaggctgagggcggggcccaaggactgttgaaaaatagctaaggatgggggttgctagaaaactactccagaagtgtgaggccgatattaatccggtgtttttgcgttctctagtcactttaagaaccaaatggaaggtcacactagggttttcatttccattgattatagaaagctttaaagtactgtagatgtggctcgccaattaaccctgattactggtttccaacaggttcttgctggtgtgaaatgactgagtacaaactggtggtggttggagcaggtggtgttgggaaaagcgcactgacaatccagctaatccagaaccactttgtagatgaatatgatcccaccatagaggtgaggcccagtggtagcccgctgacctgatcctgtctctcacttgtcggatcatctttacccatattctgtattaaaggaataagaggagagaaagtaaaaagttattttgggtatacattcagttatgcaataagcttaacgtgtttatagagaacagttcatttttattagctgctgaagtttctaaaacctgtccagtttttaacagttctgtaaactattgcaaactcagtgttgagttcattcatgagtttcttcatatataacagctctattacatgagaaacacaggccatagtagcgagactgtctgattgtatgggagataataggatggagataaaggattcagagatgagtgttcttcaatatttatttattagctagttgaagcagctgagaccagatgattggagtagcaagaacttgagatttttagtctttatgcctaggattttggtccctgtttgcagtttatttagttgtgtgatattgagcaactgaatctctcccaacctcattttcctcatgttttaaattaccataaacttgtcctgcctaccacacagggatgttatggaaagttaaataatatatttaagttatttatgaatggtaaagcactatgtaatagtacttagggattctattgttattatgagagttcatggtacagattgtcttcagtaagtggcacctaaggctctttaaataaagggttttgccggacacggtggctcacgcctgtaatcccagcactttgggaggctgaggcaggcggatcacaaggtcaggagttcaagaccagcctgatcaacatggtgaaaccccgtctctactaaaaatacaaaaattagctgggtgtggtggcaggcacctgtaatcccagctactcaggaggctgaggcaggagaatcgcttgaaccagaggcagagggtgcagtgagccgagatcacaccacagacctccagcctgggcaacagagcgagacttcgtctcaaaaaataaataaatagataaataaataaagggttttgtaattttgttcagtttagaaatgcctaactttagagattattttaatcaacacctggcctccctaccatctggctactcgtgtttaattgatgaaaactaactctaatgtagccactataaaaaattggttgctaacccttggcaaaatctttattttgagcttaacagctttaatattttacatgaaatgtttaatattttaattaaatatttttaaatgtttgatttattgagcaatttacataagtaaaatacataaattttatgtctacagcccagtgctttttgcgtttctatatagtcatgtagctaccacccagataacagtatagagcacttccagtactccagagagttctccaagtgtgatgacattaaaatacaagtaaaagtcctgttgccataaaaccaaaatgaaagtattttttatatgatctatgcatgtttgtcttcctgagaaattaaacataactataccttgtttggaacctttaagaatttgattcaggaatatttcccaaaggtacatctgtcatgataaaaaaaaaaccttctctgaaacaaaggtatttgtatatttagtcataaacacaaatgatgtatatagggccaggttataattggtggaggtatgtttagatttctttaagtaaaataaacagcacaaataaaacagtccagttcatagcttagtgaaatacactgggtacttaatctgtagcctcctggctgcagtagagttgtcatttgagttactgtgttttcttaatcttttccaggaacacagtgaccatatttcttttctgcaggcatatagaatttggtgggttttcttttatgtagggtgatattggatactttttgtttgtgattatatattagcaatttgagggacaaaccagataggcagaaatgggcttgaatagttagatgcttatttaaccttggcaatagcattgcattccctgtggtttttaataaaaattgaacttccctccctccctgcccccttaccctccacacccccaggattcttacagaaaacaagtggttatagatggtgaaacctgtttgttggacatactggatacagctggacaagaagagtacagtgccatgagagaccaatacatgaggacaggcgaaggcttcctctgtgtatttgccatcaataatagcaagtcatttgcggatattaacctctacaggtactaggagcattattttctctgaaaggatgatctttgtgttctgaatctttatggggaaatgaggttaccacactagggaagatagagctttttaattatgggaagagttggttttaggttgtttgacattgagaatctagggtaattactgaaagttaatactggaatttattttacataatatactgttactataaagtttgataatacataagtgaagcttgctactgggaatgacttggaaccagagttgttgtaattagagatcacgaaggaatttcagagaggaaaacatctccaagaaacatctttcagtatgtaatggaaaagataggccaggcacagtggctcacacctggaatgtcagtgctttgggaggccaaggcgggaggatcactttcagcccaggagttggagaccagcctgggcaacagagcaagaccctgtctctacaaaaataaaaataaaaaaattagtcacacatggtggcagctactcgggaggcagaggtgggaggatcacgtgagctcaggaggtcgaggcatgctcactccactgcactgctgcactccagcctaatcaacagagcaagattctgtctccaaaaaaaataaaaaataaaatgataggagtaagcaaataggaagtccataaagatgaaaacaaagcaagggaacataaagatagactttgtccatagaaccataaagtttcaaagctagattggaccataaaaattctagtacaatattcttattttgcagaatcagaaacagagttcagaatgtcgtttgttaggttttggagtcaggattgttattagtagcagagccaggaccaaaaacccaaagctcctttttcttagcacagtgttcttaaacagaataatataatggttaagaatgagaactctgcctggattgaaacctagctctgtttattagcgacgtgactcaggggctatgtggctttcctaacctataatatggaaataataatacctacctcatagagttgtgaagattacagttttaataaatacgcaaatcactcagaatagtgcctggcacacagtaaatgctacttaagtgttctgcctaaaggcttgagtcttggcttattttctatccatgtgaagatgtctgctctcaaaagcagattggtccaacactgaattcaagtgttcttttcctaacctgttgtacttcccattttttttttgtctaaaagtaatagcagtacttaataaaatgcccacacttggcatgcatctaataaatgttttttgaatttctagaagtcatttttcttctttcttacaagaaatttattcatttttctatatgccttagctcaaaccaaagagtatttaaaacatcttatgaaaatgcatatagtagagcaagataagattaatgaaaaataggcttaagtgagaccaaaaaaataagggtaaaataaacaaatttaggagtgagcatattctgtgattgtgcatgaagttccagtggctttctaaaggtggactacaaatttggtcactgttgtgaaaaggaaagtagccagctgaaagattcagtatctgtatgctgaaagccgttaagttgctcggactagaaggaaattttcccatggatcctcaaagaggcttgtttaatgtaaaaatcagtagtaacctgacagtgacatggtccaggtactttaggctgtcttatcccttaatgtaggctattaccatcaagcacagttttgcaaatagccagtggaatgtagttcagatacatgactttgtgggtaatccaggggtagagactaaaacagtactgtgcagtatgtggttatttacagttaattaagattaaataaaatttaaaaattagttccttgactaccaaatgctcaatagccactagtaggtaccatgttgaacagtacagatatagaccatttccatcatcacataaagtactgttggattgtgttggtcaagacaatctaaagcaattgtttcccaggtgtgctgtgtggtgtgccttacatgtcattgaaaggggtgctgtcaggagttctagatgcttcagcctccctttactaagagcagttcttatgttttctattttatcgcttgggcttccagatacaatgttttgttttaggtttgttttttttgtttgtttgtttttttttttttgagacggagttttgctctggttgcccaagctggatggagtacggtggtgcgatcgcggctcactgcaacctccgcctcccgggttcgagagattctcctgcctcagcttcccgagtagctggaattacaggcgtccaccaccatgcctgactaattttttttgtatttttagtagacttggggtttcaccatgttggccgggctggtttcaaactcctgacctcaggtgatccacccgcctcggcctcccagagggctgggattacaggtgtgaaccaccgtgcccggcctgttttagttttttagagatggagtctccctctgttgcccaagccagagtgcggtggcatgacactctcagggttcaacctctcagggatcaagggatcctcccacctcagcttcctgagtagctggaaccacaggcacatgtgccaccatgcccagctaatttttgtattttttgtagaagcaaggtttcaccatgttgcccaggctggtctcggactcctaggtcaagtgatcctcccacctcaatctcctagagtgctaagactataggcgggagtcaccatgcccagcttcatctacaatttatttgaagaaaatgtttgagcaccacccatcttgaaaagtgatagactgccttccattaaatactgtcacacctagttatttagcagcagtgagcttcactttttatactttagaccttaatctaaagggtgatttctagttgccagttaaatccagagccaagctctttggagaatccaggagcctcactaggtcatgtatcaggataaaatacccatccactcccattagaaggtgagcttgtacttatggcttcctgatggctgctgcaacaagtctaaagcagtctccttagtatacaatgtcttctctaagtggtagaaaaaagcaaaaatactacaagttaatagggctacataaaatttgctagtttcttttttgccctagccatttattccttcctgaaatcttgtctctctctcgctctctctttctctcgctctcactttctttctctttttcttttctcttttcttttctttcttccctttcttttctttcttttttcctgttgcccaggctggagtgcagtggaacaattatggctcactgcagccttgacctttctggacccaggtgatcctcccacctcagtctcccaattagctgggactacaggcatgcgccaccacacccagctataatatatattgtatatatattttttatttataaatatatataaatatatatttatatgtgtaaattatatatatttatatattataaattatatataaatatatatttatatataatatatataatatatatttatttttatatattttatatatattttttggggggggttgggggggatggagtctcactctgtcgcccaggctagagtgtagtggcgtgatcttggctcactgcaatcttcgcctcccaggttcaagcgattctcctgcctcagcttcccgagtagctgggactataggcgcctgccaccacacctggctaatttttgtatttttagtagagatggggtttcaccatattggccaggctggtcttcaactcctgaccttgtgatctgcccacctcaacctcccaaagtgctgggaatacaggcatgagccactgcacccagcctaatctttgtatttttttgtagagaccgggttttgccatgttgcccaggctaatctcaaactcctgggttcaagcagtctgccctcctcagcctcccaaagtgctgagattgcaggcatgagccactgtacccagcctaatcttgtttttcttatgttctgataatatattcccgtttttagggagcagattaagcgagtaaaagactcggatgatgtacctatggtgctagtgggaaacaagtgtgatttgccaacaaggacagttgatacaaaacaagcccacgaactggccaagagttacgggattccattcattgaaacctcagccaagaccagacaggtatggtacagctttcagcatttgtgcaagagtttgcatcagttgattaactctggtagagatgtgatccatattcatattctttgttgttatgcatttttttcatttttatttttttattttttatttttttttaggcagagtctcactctatcttctaagctggagtgcagtggtgtgatctcagctcactgcagcctctgtctcttgggttcaagtgattctcctgcctcagcctcccaagtagctgggactacgggcacatcatcatgcccggctaatttttgtacttttagtagagacagggttttaccatgttgcccaggctggtctcgaactcctggcctcaagcaatcctcccacctgggcctcccagagtgctgggattacaggtgtgagccaccacgcccagcctgttgttaggcatttttagtagtgttctttttcttaacgcttgtttaaacccaaaatgaacttactaatattctgttatggcatgtttactcctgcattaacatccacaaatatttcttgggaagatccttgactaaaaatatttataaacattagttatttctctgtcaacaccagcccgtttatggcttaagcctcctgaatggagtctttagtttaatgtagttttgttccgtgtttctcacattacccttttcctttgcatgaatgtttatttggcaaaatgtgccatttttatatcagcctgttcttgtgattcaataggaatgtgaaatttagtgttctcttccttaaatcaccatattttattttatcagctattcgtttagtaattggaatcttatgtccacataaagagatacaaatgcaagagagcttataatttggattgtgtccgttgagctagctctctcattttttttcattttttccttttatagggtgttgaagatgctttttacacactggtaagagaaatacgccagtaccgaatgaaaaaactcaacagcagtgatgatgggactcagggttgtatgggattgccatgtgtggtgatgtaacaaggtgagcatatggtttcttggcataattacaaatcttagtatatagtattgggcaatttggaggagtgctggtgttattgtctatatgttttttgagtttctgcctatcctcttctgcacattttccatatgacaccctttctgaaagtactgaggtctaaagtgtttaaaacatttgattattccacaggtatctttatatttttggtaacattagaaattataagacattatttatgaaatgtaggcataccctattcctggcaatgaccaggaatttgaaggatcactactttgaaactagttaataaggacatggtttctgttctttttttacagatacttttaaagttttgtcagaaaagagccactttcaaggtaggacaagtttggaaatgtattctcattcctgttaattttgtatatttgtttttcttatactctgaatgtgtcacttatacaaattctgtttctatttcagctgcactgacaccctggtcctgacttccctggaggagaagtattcctgttgctgtcttcagtctcacagagaagctcctgctacttccccagctctcagtagtttagtacaataatctctatttgagaagttctcagaataactacctcctcacttggctgtctgaccagagaatgcacctcttgttactccctgttatttttctgccctgggttcttccacagcacaaacacacctctgccaccccaggtttttcatctgaaaagcagttcatgtctgaaacagagaaccaaaccgcaaacgtgaaattctattgaaaacagtgtcttgagctctaaagtagcaactgctggtgattttttttttctttttactgttgaacttagaactatgctaatttttggagaaatgtcataaattactgttttgccaagaatatagttattattgctgtttggtttgtttataatgttatcggctctattctctaaactggcatctgctctagattcataaatacaaaaatgaatactgaattttgagtctatcctagtcttcacaactttgacgtaattaaatccaactttcacagtgaagtgcctttttcctagaagtggtttgtagacttcctttataatatttcagtggaatagatgtctcaaaaatccttatgcatgaaatgaatgtctgagatacgtctgtgacttatctaccattgaaggaaagctatatctatttgagagcagatgccattttgtacatgtatgaaattggttttccagaggcctgttttggggctttcccaggagaaagatgaaactgaaagcacatgaataatttcacttaataatttttacctaatctccacttttttcataggttactacctatacaatgtatgtaatttgtttcccctagcttactgataaacctaatattcaatgaacttccatttgtattcaaatttgtgtcataccagaaagctctacatttgcagatgttcaaatattgtaaaactttggtgcattgttatttaatagctgtgatcagtgattttcaaacctcaaatatagtatattaacaaattacattttcactgtatatcatggtatcttaatgatgtatataattgccttcaatccccttctcaccccaccctctacagcttcccccacagcaataggggcttgattatttcagttgagtaaagcatggtgctaatggaccagggtcacagtttcaaaacttgaacaatccagttagcatcacagagaaagaaattcttctgcatttgctcattgcaccagtaactccagctagtaattttgctaggtagctgcagttagccctgcaaggaaagaagaggtcagttagcacaaaccctttaccatgactggaaaactcagtatcacgtatttaaacatttttttttcttttagccatgtagaaactctaaattaagccaatattctcatttgagaatgaggatgtctcagctgagaaacgttttaaattctctttattcataatgttctttgaagggtttaaaacaagatgttgataaatctaagctgatgagtttgctcaaaacaggaagttgaaattgttgagacaggaatggaaaatataattaattgatacctatgaggatttggaggcttggcattttaatttgcagataataccctggtaattctcatgaaaaatagacttggataacttttgataaaagactaattccaaaatggccactttgttcctgtctttaatatctaaatacttactgaggtcctccatcttctatattatgaattttcatttattaagcaaatgtcatattaccttgaaattcagaagagaagaaacatatactgtgtccagagtataatgaacctgcagagttgtgcttcttactgctaattctgggagctttcacagtactgtcatcatttgtaaatggaaattctgcttttctgtttctgctccttctggagcagtgctactctgtaattttcctgaggcttatcacctcagtcatttcttttttaaatgtctgtgactggcagtgattctttttcttaaaaatctattaaatttgatgtcaaattagggagaaagatagttactcatcttgggctcttgtgccaatagcccttgtatgtatgtacttagagttttccaagtatgttctaagcacagaagtttctaaatggggccaaaattcagacttgagtatgttctttgaataccttaagaagttacaattagccgggcatggtggcccgtgcctgtagtcccagctacttgagaggctgaggcaggagaatcacttcaacccaggaggtggaggttacagtgagcagagatcgtgccactgcactccagcctgggtgacaagagagacttgtctccaaaaaaaaagttacacctaggtgtgaattttggcacaaaggagtgacaaacttatagttaaaagctgaataacttcagtgtggtataaaacgtggtttttaggctatgtttgtgattgctgaaaagaattctagtttacctcaaaatccttctctttccccaaattaagtgcctggccagctgtcataaattacatattccttttggtttttttaaaggttacatgttcaagagtgaaaataagatgttctgtctgaaggctaccatgccggatctgtaaatgaacctgttaaatgctgtatttgctccaacggcttactatagaatgttacttaatacaatatcatacttattacaatttttactataggagtgtaataggtaaaattaatctctattttagtgggcccatgtttagtctttcaccatcctttaaactgctgtgaatttttttgtcatgacttgaaagcaaggatagagaaacactttagagatatgtggggtttttttaccattccagagcttgtgagcataatcatatttgctttatatttatagtcatgaactcctaagttggcagctacaaccaagaaccaaaaaatggtgcgttctgcttcttgtaattcatctctgctaataaattataagaagcaaggaaaattagggaaaatattttatttggatggtttctataaacaagggactataattcttgtacattatttttcatctttgctgtttctttgagcagtctaatgtgccacacaattatctaaggtatttgttttctataagaattgttttaaaagtattcttgttaccagagtagttgtattatatttcaaaacgtaagatgatttttaaaagcctgagtactgacctaagatggaattgtatgaactctgctctggagggaggggaggatgtccgtggaagttgtaagacttttatttttttgtgccatcaaatataggtaaaaataattgtgcaattctgctgtttaaacaggaactattggcctccttggccctaaatggaagggccgatattttaagttgattattttattgtaaattaatccaacctagttctttttaatttggttgaatgttttttcttgttaaatgatgtttaaaaaataaaaactggaagttcttggcttagtcataattcttatattca

SEQ ID NO: 7183 - DNA, 4546 bp, Homo sapiens
acggacatatttattggaatgcatggagctggtctgacccatttacttttccttccagactgggctgctgtatttgaactgtaagtgttgggaggcagttttacactgaagcaactgataatgctttttatgcatgctaaagctttcattctgagcatcaaaaggcttaatatttaatcattcaaaaagagaagtcacatcatatagacaatctggaaagaaaagaggcctgaagctaaaaatacaaagtctgcagcctgccattgcacttagtaagccaactaccccttcatcttcccatcccgagcatgatatggaagatgtgaatctgtggtttccttattctgagtttgttcctgcatacctcccaaactctgagcgtcttcttgcaaacagtgtagttattgtgttaaaagaaagcatttatgtctcatgcacgacatagcttcaaaacacaagccaaccacttaacttagtgcttgctgatcccatacacagggaaactgaggcccttgggtgttcatgatttgcccagggcatacttttaactcagtggttggtttatggagacatgaccttccctctcataataattctgctgttggcactgtgctccattttaggtcttgagacactaatagcagttactgttacctgtttccccccattatgtctaaatatctgggttctatggtttcattttaaaaatgatttgactctgtatttaaataggaggctatttaggaaaaaagttgtcatgaacttccaatgccctgcaaaacatttcaaaaatatatatgatatatgtagagaaatagccagataatggattctatctctgtcatttctcttatagagagagaaggaaggatggaagaaaggagagagaagggagagaaatgtaactgagaaaactcaagccttatagtctaatggacctgggttctacttttgcatccttcactatttagttatatgaccttggaagtgttacctatcccccttgcctctttcatacatttaaagacagaggtattataaggtcatgccaagtccataggcagcaggccctattgaataaggtcaattctctccattccatgaccctattttgttttttaaaagttaagttcatttagttcagagaatatttttacattctcttcctcagtcttgtttactgtcttcctcagtcttgtttacaaccttttgcaaggacatatttgggagctgcattttattttcgcagagttgttgatttggaaaaaaccttggacaaaagcctcatgttgtgacacccttgtgtccttaggtacaactgtgaagatgaacgctgttacttagacttggccaggctgagaggcgttcactacatcacttggcgacggcagaacaaagtctttcctcaggataaggtaaagttcaatcacaaaacttaccttgcttcatttttaattggtttaaagtatccaattattgatatgaaaaatggttattgaacttcagtgctgcaaagataaactgttctctggaatactgaattgttttattttatatttgcaaataggagaaaaaggggaattaagcaacctatatctttaatgttacaaaggcagcttcgtgaaatttgggcttagaaagatctattagattatatatagagacgggatcaacaagcaacagccctgtgggcaaatccagcccatgacatgtttttgtaaagaaagcacagtcatgcctgtctgtttatgcactgtctctagttgtttgtgcacttcaacgacagtggagtaactgtgactgagaccttagagtcagcagagctgaaaatatttatcatctggcccttatcaggaaaagtttgctggtctctgatgtagaacataaattagttgccttaaccaaagtaacataattttcctgctgtagagaaaaccatgccctcattgagttatggattcgtgttttggtttattttcacagggccaccatccaaccctgggggagcacccgaagttcaccaactactctttcgatgtagaagaatttatgtatcttgtccttcaggctgcagaccacgtattgcaacacccaaagtggccatttaagaagaaacatgatgagctataaatatgctgagtctgtttgcaaaaagagagtgtttaaacactccaacacccagacttagaattaaatcagtaaagcaatctgttatttcctatccccgaattaccttttctatgccaaaacataccttcaggatattgttatgtgttgtatagatgttaagtgtttcatgtggtttttgtgtcattgctatttatcaatagcaataattttgcactgaaaactttttatagttcaaaaattaagcatggactccccagtatactttaactttctttctttctttttttttttttggagacagagtctcactgtcacccaggctggagtgcagtggcatgatctcagtttatgcaacttctgcctccccaggttcaagcgattcttttgcctcagccacctgactagctgggattgcagcctgcaccaccacacctggctaaatttttgttgttgtcgttgagatacagtttcactctgtcacccaggctggagtgcagtggcatgatctcagctcactgcaacctctgccttctggattcaagtgattcttgtgccttagcctcccaagtagctgggattacaggcgtgcaccaccacgcccagttgatttttgtatttttgatagagacggagtttcaccatgttggccaggctggtctcgaactctgggttcaagaaatcctcccaccttgcctcccaaagtgctgggattacaggtgtgagccaccacgcatggccctgaactttctctttttaggaataccaaagttttcaactttttcagctttagaatttgtaaatatttttgtagaatatcatatgactgtaattccagagtgttccaacttgtttatgatatatttgggtaaatttacaactgttcttttatttgccataatctggttataacactgtttgtggtaggaaaggaaaacatgcaaaacatacacacacacacacacacacacacacacacacacacacacgcagagttgtgattctcagtaccaagctataggaccatgttatagatcagcgtttagtcacctccaggttatatgcatcgagaacctgaataaatcatgccactatattaatttatattacatgtttcatatttaaatcatgttttcctaaaatgtagcaactacatgtgataaaagcaaattagaacattctgtaggactgtcttgcataccttctgtctggtttccactgattccttcttagccatggagagcatttgtgattaattaatttatatatgaaataatggtttccattttatgcgagtatttgtaactgcatataccagtgcgtgtgcgtctacctctgtcagcatgaaagtattccagtctttaatttcaaaaacttcaaattagcctcatgaagagaatttttccctgtgaaaagtaagaccaagaaaaaacaaactaaagacatgtgacttattcaatgaaagtgaaaaagaagctctaaaacagtgtcattgattaaaaagaatatctggaatgtagccccactctttgagtgggattcatttcttactgcttatgaactttcaatttagtagtcagaaaccatggatttattttactgcacaatgtgaagtttacattttattaacacttgagtagtctgatttagagactagttacttctattttttaaaataatggagtaacaaattacagaatagctaaataattttttaaaaatattttacagttgtaaaaaatatccatcagaaaaatgacacacaaaacaaaatatctggacctttacagaagacgtttgctgacccccactttaaaggattggaacagtcttctagaattgaggaatatttattaaaatacctgtaaagaaaatagtgaatcactgtagcaatggctttgattcagaccttaaaatcacataagaagaattacaacatgttatggatttttaagtggcaggtattgtaactgttttttgtgtgcaaaatactgagtaaccactgggaaaatatttcagatgaaagggatgacaaaagcatgttgcgctttgcatcagcaaggcattgacttctgaaaaaatgatctgaaaaaagtttcaccgtttgtcttcttacctcattttaagaagcatgtgaaaatgggatactatagactactgagaatttcagaaattgagaacaatttcataataaaacggctatatttgaagagagaatacattttatataaacaggaaaatacatttgacactttatggaattttatgagactttttgtgggaacagaaggtcttcaaattgtaaaatgtaaagattgctctttttattaagtctttaacagggatgtatttcattgtatgttttgggtatggctttggaataaatcattttatattttatttgaatatcagaaccatt

SEQ ID NO: 7184 - DNA, 4546 bp, Homo sapiens
acggacatatttattggaatgcatggagctggtctgacccatttacttttccttccagactgggctgctgtatttgaactgtaagtgttgggaggcagttttacactgaagcaactgataatgctttttatgcatgctaaagctttcattctgagcatcaaaaggcttaatatttaatcattcaaaaagagaagtcacatcatatagacaatctggaaagaaaagaggcctgaagctaaaaatacaaagtctgcagcctgccattgcacttagtaagccaactaccccttcatcttcccatcccgagcatgatatggaagatgtgaatctgtggtttccttattctgagtttgttcctgcatacctcccaaactctgagcgtcttcttgcaaacagtgtagttattgtgttaaaagaaagcatttatgtctcatgcacgacatagcttcaaaacacaagccaaccacttaacttagtgcttgctgatcccatacacagggaaactgaggcccttgggtgttcatgatttgcccagggcatacttttaactcagtggttggtttatggagacatgaccttccctctcataataattctgctgttggcactgtgctccattttaggtcttgagacactaatagcagttactgttacctgtttccccccattatgtctaaatatctgggttctatggtttcattttaaaaatgatttgactctgtatttaaataggaggctatttaggaaaaaagttgtcatgaacttccaatgccctgcaaaacatttcaaaaatatatatgatatatgtagagaaatagccagataatggattctatctctgtcatttctcttatagagagagaaggaaggatggaagaaaggagagagaagggagagaaatgtaactgagaaaactcaagccttatagtctaatggacctgggttctacttttgcatccttcactatttagttatatgaccttggaagtgttacctatcccccttgcctctttcatacatttaaagacagaggtattataaggtcatgccaagtccataggcagcaggccctattgaataaggtcaattctctccattccatgaccctattttgttttttaaaagttaagttcatttagttcagagaatatttttacattctcttcctcagtcttgtttactgtcttcctcagtcttgtttacaaccttttgcaaggacatatttgggagctgcattttattttcgcagagttgttgatttggaaaaaaccttggacaaaagcctcatgttgtgacacccttgtgtccttaggtacaactgtgaagatgaacgctgttacttagacttggccaggctgagaggcgttcactacatcacttggcgacggcagaacaaagtctttcctcaggataaggtaaagttcaatcacaaaacttaccttgcttcatttttaattggtttaaagtatccaattattgatatgaaaaatggttattgaacttcagtgctgcaaagataaactgttctctggaatactgaattgttttattttatatttgcaaataggagaaaaaggggaattaagcaacctatatctttaatgttacaaaggcagcttcgtgaaatttgggcttagaaagatctattagattatatatagagacgggatcaacaagcaacagccctgtgggcaaatccagcccatgacatgtttttgtaaagaaagcacagtcatgcctgtctgtttatgcactgtctctagttgtttgtgcacttcaacgacagtggagtaactgtgactgagaccttagagtcagcagagctgaaaatatttatcatctggcccttatcaggaaaagtttgctggtctctgatgtagaacataaattagttgccttaaccaaagtaacataattttcctgctgtagagaaaaccatgccctcattgagttatggattcgtgttttggtttattttcacagggccaccatccaaccctgggggagcacccgaagttcaccaactactctttcgatgtagaagaatttatgtatcttgtccttcaggctgcagaccacgtattgcaacacccaaagtggccatttaagaagaaacatgatgagctataaatatgctgagtctgtttgcaaaaagagagtgtttaaacactccaacacccagacttagaattaaatcagtaaagcaatctgttatttcctatccccgaattaccttttctatgccaaaacataccttcaggatattgttatgtgttgtatagatgttaagtgtttcaaatggtttttgtgtcattgctatttatcaatagcaataattttgcactgaaaactttttatagttcaaaaattaagcatggactccccagtatactttaactttctttctttctttttttttttttggagacagagtctcactgtcacccaggctggagtgcagtggcatgatctcagtttatgcaacttctgcctccccaggttcaagcgattcttttgcctcagccacctgactagctgggattgcagcctgcaccaccacacctggctaaatttttgttgttgtcgttgagatacagtttcactctgtcacccaggctggagtgcagtggcatgatctcagctcactgcaacctctgccttctggattcaagtgattcttgtgccttagcctcccaagtagctgggattacaggcgtgcaccaccacgcccagttgatttttgtatttttgatagagacggagtttcaccatgttggccaggctggtctcgaactctgggttcaagaaatcctcccaccttgcctcccaaagtgctgggattacaggtgtgagccaccacgcatggccctgaactttctctttttaggaataccaaagttttcaactttttcagctttagaatttgtaaatatttttgtagaatatcatatgactgtaattccagagtgttccaacttgtttatgatatatttgggtaaatttacaactgttcttttatttgccataatctggttataacactgtttgtggtaggaaaggaaaacatgcaaaacatacacacacacacacacacacacacacacacacacacacacgcagagttgtgattctcagtaccaagctataggaccatgttatagatcagcgtttagtcacctccaggttatatgcatcgagaacctgaataaatcatgccactatattaatttatattacatgtttcatatttaaatcatgttttcctaaaatgtagcaactacatgtgataaaagcaaattagaacattctgtaggactgtcttgcataccttctgtctggtttccactgattccttcttagccatggagagcatttgtgattaattaatttatatatgaaataatggtttccattttatgcgagtatttgtaactgcatataccagtgcgtgtgcgtctacctctgtcagcatgaaagtattccagtctttaatttcaaaaacttcaaattagcctcatgaagagaatttttccctgtgaaaagtaagaccaagaaaaaacaaactaaagacatgtgacttattcaatgaaagtgaaaaagaagctctaaaacagtgtcattgattaaaaagaatatctggaatgtagccccactctttgagtgggattcatttcttactgcttatgaactttcaatttagtagtcagaaaccatggatttattttactgcacaatgtgaagtttacattttattaacacttgagtagtctgatttagagactagttacttctattttttaaaataatggagtaacaaattacagaatagctaaataattttttaaaaatattttacagttgtaaaaaatatccatcagaaaaatgacacacaaaacaaaatatctggacctttacagaagacgtttgctgacccccactttaaaggattggaacagtcttctagaattgaggaatatttattaaaatacctgtaaagaaaatagtgaatcactgtagcaatggctttgattcagaccttaaaatcacataagaagaattacaacatgttatggatttttaagtggcaggtattgtaactgttttttgtgtgcaaaatactgagtaaccactgggaaaatatttcagatgaaagggatgacaaaagcatgttgcgctttgcatcagcaaggcattgacttctgaaaaaatgatctgaaaaaagtttcaccgtttgtcttcttacctcattttaagaagcatgtgaaaatgggatactatagactactgagaatttcagaaattgagaacaatttcataataaaacggctatatttgaagagagaatacattttatataaacaggaaaatacatttgacactttatggaattttatgagactttttgtgggaacagaaggtcttcaaattgtaaaatgtaaagattgctctttttattaagtctttaacagggatgtatttcattgtatgttttgggtatggctttggaataaatcattttatattttatttgaatatcagaaccatt

SEQ ID NO: 7185 - DNA, 10907 bp, Homo sapiens
attcttggtaaattctaaacttcaacttctgttttaaggaaacacaaattcatccagtgttacaaattctgcagcaggtgttgaagatcttaacatcgttcaagtgactgttccaggtatggactaatgttacatttttccttttgtcttaattattttttgacataggctggtctcttggacctgtcatttttcacttagttcaccctgatagctaagaaatgacatttcgggaatataaaatattctgcaagttgctacacaacgagcatcttgctcacatcagacattattaatcggatattttgcttctcctggacaagcccgggcattacctggaaaatgcatctcagagcaggcagcacggagcaccagctatggttgaattggaattggccacagaggtgaaatgttttgttgctcatcattaacaatcttctggccgggcacggtggcttacgcctgtaatcccagcactttgggaggctaagacgggcagatcacgaggtcaggagatcgagaccatcctggataacacggtgaaaccctgtctctactaaaaatacaaaaaaattagccgggtgtggtggcgagcacctgtagtcccagctactcgggaggctgaggctgaagaatggcgtgaacctgggaggtggagcttgcagtgagcggagatcacaccactgcactccagcctgggtgacagagcgagactctgtctcaaaaaaataaataataataataataataatcttcttttctgaatatgtgtatgtaaaatatatctggaaagatacaagagaatctaattacatagttcctccagggaaggaaactgaccgctgagatagggataggagagagacgtttgagatgtttctgtatattactcctcttgaatgttgagccatgtgattgctttagttattcaaaagtaaataaagttttaaagtgttgaaaaatatctaaaaaataaaaacaaaaaaaaaggaccaggcatggtggcatgtgcctgtaatctcagcactttgggaagctgaggcaggaggatcacttgagcccaggagtttgagaccagcctgcacagcacagtgagactctgtctctaaaaaacaaaaagaaaagaaaaacagaccgggtgcggtggctcacacctgtaatcccagcactttgggaggctgaggcaggtggatcacctgaggtcaggagttcgagaccagcctggccaacatggtgaaaccccatctttactaaaaatacaaaaatcagctggtgtggtggtgggtgcctgtaatcccagctacttgggaggctgaggcaggagaattgcttgaacccaggaggggtgcagtgaattgcttgaacccaggagtttgcagtgagccaagattgtaccattgtactccagcctgggtgacaagagcaaaactcagcctcaaaacaaaacaaaacaaaacaaacaaacaaaaaaagagaggaaaaaaaggaaagaaaataaaaatataccttaccttctaatcctagtacctcttattccttttacttgtcatatttcattggctaagatttctattttaaggccgaaaagtggtggtgaaagtaaacatccttgtctttttttttttttttttttttttgagacggagtcttgctctgtcacccaggctggagtgcagtggcgcgatctcggctcactgcaagctccgcctcctgggttcacgccattctcctgcctcagcctcccgagtagctgggactacaggcgcctgccaccatgcccggctaaatttttgtatttttagtagaaacggggtttcaccatgttagccaggatggtctcaatctcctgacctcgtgatccacctgcctcggcctcccaaagtgctgggattacaggcgtgagccaccgcgcctggccctaaacatccttgtcttgtatgatattgaaaatattccttaaaagtagtatgtagtatgtttatatagggttataatttggaaaattctctattgtctgtaatggcttccatttccaaatttccaagatgcttaattattgctaaaagtagactgaataacaatccaggtaaagcactttctcgggtgctaacaggcatttctcccaacagctttcttgggagaaaatacattaataaccttggtttgtttatttgtttaattatttttagataatgagaaggaaagattatcaagcattgaaaagattaaacagctaagagaacaagttaatgacctctttagccgaaaatttggtaagtttttatatctttttatatccagaattcatatacctaaaatacttctttttaaaagaatacttggccaggtgcattggctcatacctgtaatcctagcactttaggaggctaaggctagagaatcacttgagcccaggagtttgagaccagcctgggcagcaaagtgacaccccaggtctacaaaaggaaaaaaacaaaactttatcttataagaatttgatcttggctgggcgcagtggttcacacttttaatcccagcactttgggaggccaaggtgtgtggatcacttgaggccaggagttcaagtccagcctggccaacatggcaaaatcccatctctactaaaaatacaaaaaaattagccgggtgtggtggcgcacacctgtaatcccagctactcaggaggctgaggcacgagaatcggttgtaactgggaggcagaggttgcagtgagcttagatcgcgctattgcactccagcctgggcgacagagtgagaccctgtctcaaaaaaaaaaaaaaaaaaagaaattgatctttttgtgaaagagctatgataaaaattagtcaatatgtctttttacagaagagcttttgcatggtatcattgactaattacaataataataataatagctatctttgttttactgagtgcttaccttgtatattattttttgtgctcaacatgtgtttgatcatttaatcctcacataaaacctttcaggtaggcgccatgataaccctgtgtaatggatggaggaactgagtttgcctactacccatgctaattccaaacttttaaaattatattcacacatcatagtagcactggaaaataaaatgactgatcataagtattgtcatttgatgcttctaaatcctgacattaaagaaaaatcctggtttaggaaacgtaaggaacaaactcagctagttttatttgtgttgttgtttttttaatttgttgttttgttttgtgttttgttttgaggcagggtctcgctctgtctctcaggctggagtgcagtggggcgatctcggctcactgcaacttctgcctcctgggtccctcccatgtggctgggattacaggcatgcgccaccacgcccagctaatttttgtatttttagtagagacagggtttcaccatgttagccaggctggtctcgaactcctggcctcaagtgattcacccgcctcagtctcccagagggctgggattacaggtgtgagccaccgtgcccagccaaactcagctggttttatgctgctcatcccgtcacaggtgaagcaattggcgtggatttccctgtgaaagttccctacaggaagatcacattcaaccctggctgtgtggtgattgatggcatgcccccgggggtggtattcaaggcccccggctatctggaaatcagttccatgaggaggatcttggaggcagctgagtttatcaaattcacagtcatcaggtaagtgagtcaaaagaaggaatctggagactctgacttgcccgaggtgggcatgtggctgcccaggaatgtctgtcccatgacttgggctgggggtttgttcccgcagctgaccgctgggccatgctgcctctcacactgacttcatcatcttctgcttccttgagatgtgtccatgtccctgttcctcggtgatcatgggcagcccgtcccagttttagctcacacagcacctagcgtagagttgatactctgcaaaaatttgtccaataaaactaagtggggccaggcacggtggctcacgcctgtaatcccagcactttgggaggctgaggcgggccagatcgcctgaggtcaggagtatgaggcaagcctggccaacatggtgaaaccccgttgctactgaaaatacaaacattagtcgggtgtggtggcgtgcgcctctaataccagctactcaggaggctgaggcgtgagaatcacttaacctgggaggtggaggttgcagtgacctgagatggcaccactgcactccagcctgggcagcagaatgagcctccatctcaaaacataaataaataggccgggcatggtggctcaggcctgtaatcccagcattttaggaggctgaggcaggtggatcatttgaggtcaggagtttgagaccagcctggccaacatggtgaaactccatctctactaaaaataaacattagctgggtgtagtggtacgtgcctgtaatcccagctactcaggagaatcacttgaacctggaatgtggaggttgcagtgagcccagatgacaccactgcactccagcctgggtgatggagtgagactccgtctcaaaaaaaacaaaaacaaaaggctcaacgcagtggctcatgcctgtaatcccagcactttgggaggccaaggtaggtagatctcctgatgtcaggagttcaagagtagcctggccaacatggtgaaactaaaaatacaaaaaattagctgggcgtggtggcgggcacctgtaatcccagctactcaggcggctgaggcaggagaatggcttgaacccaggaggcggaggttgcgctaagccgagatcgcgccactgcactccagcctgggtgacgcggcgagactcttgtctcaaaaaaaacaaaaacaaaacaaacaaataaataaatattcttctgtaaaaaaataaataagtaaaaattaaaaaaaaataaaactaagtgggcaaaagaggaaatgtgagcttgtcacatttatcaatgtgtctttctcttcaggccgcttccagggcttgagctcagtaatggtgagtattctacaggtgagaagaacgttccggcaatgttgggccatgggaagtgtcttggtgggcgctcaccacggggtttttgcttccgtgagcctgggacccaagtatgcagccttcgatgcatgctttatttttcctgcatgtgataaagttagataactctgttacttgagtttgattaaccagtctgaaggagagtgatctatatcacaccatgagtgtgacgtgtgatgtggcgcactcttttttttttttttggagacggagtctcgctctgtcacccaggctagagtgcaatggcacaatctcggctcaccacacaacctccgcctcccgggttcaagtgattctcctgcctcagcctcccgagtagctgggactataggcgtgtgccaccacgcctggctaatttttgtatttttagtagagatggggttttgccatgttggccaggctggtcttgaacttctgacctcaagggatctgcccgcctccaccttccaaagtgctgggattacgggcatgagccaccacgcatggctgatgtggcacactattcaagtgtgctttgtggtgggggctcccctgaggccacccgcacagctgcactcaggatcacagtaccgatctcctctgtgttagttggtaaatagtgcctgcctggccatgcagtcccaccctagtaccctccgaccgtggcttgacctccctacagtgctgaagcaaaaggggttccacctggcacagcagaggcccctagaacccttccagtgctgagactagcatctgttcttttttttttctttttttttttttttgagacagagtctcgctctctcacccaggctggagtgcagtggcaagatctcggctcactgcaacctccgcctcccgggttcaagcgattctctgcctcagccttccgattagctgggattacaggtgcgtgccgccacatccagctactttttgtattttttagtagagacagggtttagccatgttggccaggctggtctcaaactcgtgacctcaagtgatccacccgccttggtctcccaaactgctgggattacagatgtaagccactgcacctggctcagcatctgttctgattgagcaatgcccaggcactctgcttctgaaatattctcttttttttccccttcaacttttattttaagttccagggtccatgtgcaggatgtgcaggtttgttacacaggtaaacgtgtgccatggtggtttgctgcacctatcaacccatcacctaggtattaagcccagcatgcattagctattcttcctgatgctctccctccccccgcccccaccctgttaaatattcttaatgtcttccccggagcccttgcaagtgagtcagtatcctgtcaagtagaatacggagaggtgttctcacgagcatgagtcaccagggaacctcctaatgtaacatttgaaaaccaaagtaggctgggcgcggtgactcacacctgtaatcccagcactttgggaggccgaggcgggcggatcatgaggtcaggagatggagacccttctgtacaacgtggtgaaactccgtctctactagaaatacaaaaattagtcgggcatggtggcgcgtgcctataatcccagctactcgggaggctgaggcaggaaaatcacttgaaccagggagtcgggggttgcagtgagccgagatcgtgccactgcactccagtttggtgacagagcaagactctgtctcaaaaaaaaaaaaaaagaaaagaaaagaaaaccaaagtatcctattaaaatgctccatttttattcccaaacgcatctgattgctaaatgattttttgatcttttataatatctttatttatttattgtattattattggggttttttagagacaaggtctcactctgtcacccaggctggagtgcagtggcatgatcatagctcactgcagcctggaactcctgccctcaggtgattctcccaccttcacctcccgagtaactgggacagcactgccatgcccagataatttttttttttttttttttttgtagagacagggtctcactatgtttcccaggctggccttgagcttctggcttcaagcgatcctcctgcctcagcctcccaaagtgctgggattataggcatgagccgctgtacatggcctacattttcttaaggtgcacttttatgtgtgtgtactctggaaataccttgattacctgcagggtggccaggttctttaaatctaaaacactagcccctgtacactcgaacacacttatacgaatgagttttgtgtggttctgtggccgtcacccttgtcatttgagactcacagtaggtaaaaatcatatgcctttctgtgctcattcccatctctgttattacaaagttttcttgggaatcaaatgagaaaatatattaaaatgctcacacctataatcccaggacttttggaggccaaggcaagaggattgcttgaggccaggagtttgagaccagcctgggcaacatagcaagaccccatctctacaaaaaatttaaaaattagctggaaacagtggctcacacctgtagccccagctacttggcaggctaaagcaggaggatcacttaaactcaggagtttgagacagcagagaaccataattgcaatactacactccagcctgggtgacagaacaagaccctgtctctaaaaagaaaatgcaaacatattatcaaataattcctgtttaaactggacataacaagcacagctacatgctgaacctcatcaaaggtgtcttttgtttggctcatgtacttttgaaaataaggatgaggcctggcacggtggctcctgtaatcccagcactttgggaggccaaggcgggtggatcgcttgagcctggggtttcagaccagcctgggcaacaaggtaagactccagctctacaaaaaaaaaaaaaaaaagaaaaagaaaaaaagaaaagaaagaaagaaagaaaagatagctcggtgtggtgcatgcctgtagtcccagcaactgggagctgaagtgggaggatcacctgagcccagggagttccaggctgcaatgagtcattatcaccacaaaccaggcactctttcataaaagtcaatcttcaggttttctttagaaaacctgaagatctggctgggtgcagtggctcatgcttgtaatcccagcactttgggaggctgaggtgggcggatcacctgaggtcaggagttcgagaccagcctggacaacatggtgaaatctcatctctactaaaaatacaaaaattagctgggcgtggtggcaggcacctgtcataacagctactcaggaggctgaggcagaagaatcgcttgaacccaggaggcagaagttgcagtgagccgagattgcgccactgcactgcagcctgggcgacagagcaaaactccgtctcaacaacaacgacaacaaaaattcagtcttcaggttttctttagaaaacttgaagatctggccacagctggcatcctggcagcggtttgctggagttgagggtcagccgtccctctgcagggtgggtcaccctcctgttaaccacgccctgccccgccccgcttcctccctctcgtgcgtcatcaagcatttgctgttgttttcctcatagtagtgataagagaaaagtgaaatatctttgtctccctgtctctgtcaaaagtgggaaaacgcaagatagaccaggagggccgtgtgtttcaagaaaagtgggagagagcgtatttcttcgtggaagtacagaatattccaacatgtctcatatgcaaacaaagcatgtctgtgtccaaagaatataacctaagacgccactatcaaaccaatcacagcaagcattatgaccagtatatggaaagaatgcgtgacgagaagcttcacgagctgaaaaaagggctcaggaagtatctcttaggctcatcagacaccgagtgtcccgagcaaaaacaagtgtttgcaaacccaagtccaacccagaaatcccccgtgcagcctgtagaggacctagctgggaacttatgggagaagttacgtgaaaaaatcaggtcttttgtggcatattctatcgcaatcgatgagatcacggatataaataataccacccagttggccatattcatccgtggtgtcgatgagaatttcgatgtgtccgaagaacttctggacacggtgcccatgacgggtacaaaatctggcaacgagatcttttcgcgtgttgagaaaagcctgaaaaacttctgtatcgactggtcgaaattagtaagcgtggcctccactggcaccccagcgatggtggatgccaataacgggcttgtcacaaaactgaagtccagggtggcgacgttctgcaagggtgcggaactgaagtccatctgttgtataattcatccggaatcactctgtgctcagaagttgaagatggaccacgtcatggacgtggtagtgaagtccgtgaactggatatgctcccggggactgaaccacagtgagttcacaaccttgctctatgagctggacagccagtatggtagcctcctgtactacacggagattaagtggctcagtcgcgggctcgtgctaaagagatttttcgaatccttggaagaaatcgactccttcatgtcatccagagggaaacccctgcctcaactgagctccatagattggatccgagacctggccttcttggttgacatgacgatgcatctgaacgctttgaacatctctctccaaggacactcccaaatcgtcacgcagatgtatgacctgatccgggcgttcctagcaaaactgtgcctctgggagactcatttgacgaggaataatctggcccactttcccaccctgaaattggcttccagaaatgaaagcgatggcctgaactacattcccaaaatcgcggaactcaagaccgaattccagaaaaggctgtctgatttcaaactctacgaaagcgaactgactctgttcagctccccgttctccacgaagatcgacagtgtgcacgaggagctccagatggaggttatcgacctgcaatgcaacacggtcctgaagacgaaatacgacaaggtgggaataccagaattctacaagtacctctggggtagctacccgaaatacaagcaccattgcgcaaagattctttccatgttcgggagcacctacatctgcgaacagctgttctccattatgaaactgagcaaaacaaaatactgctcccagttaaaggattcccagtgggattctgtactccacatcgcaacgtgatggagagaaaactcctggcagggccctatggtgggaaaggctggagtcttctagtcccaagggattgggagatgacaaaatgaatttttttttcttttttgagatggagtcttgctctgtcgcccaggttggagtgcagtggcgtgatctcggcttactgcaacttccagctcctgggttcgaacgattctcctgcctcagcctcccgagcagctgggactacaggcgtgcgccaccatgcctggctaatttttgtattagtagagatgaggtttcaccatgttggccaggctggtctccaactcctgacctcaggtgatccacctgcctcgacctcacaaagtgctgggattacaggcatgaaccactgtgcccagctgacaaaatgagttcttaaacttttttttttttcagttttttttccactttgaatcagaaatataatctgcagtatcatacttgtttatattacattgtatgcctcactattcattaaaaatcaagaaagttttattgta

SEQ ID NO: 7186 - DNA, 12718 bp, Homo sapiens
attcttggtaaattctaaacttcaacttctgttttaaggaaacacaaattcatccagtgttacaaattctgcagcaggtgttgaagatcttaacatcgttcaagtgactgttccaggtatggactaatgttacatttttccttttgtcttaattattttttgacataggctggtctcttggacctgtcatttttcacttagttcaccctgatagctaagaaatgacatttcgggaatataaaatattctgcaagttgctacacaacgagcatcttgctcacatcagacattattaatcggatattttgcttctcctggacaagcccgggcattacctggaaaatgcatctcagagcaggcagcacggagcaccagctatggttgaattggaattggccacagaggtgaaatgttttgttgctcatcattaacaatcttctggccgggcacggtggcttacgcctgtaatcccagcactttgggaggctaagatgggcagatcacgaggtcaggagatcgagaccatcctggataacacggtgaaaccctgtctctactaaaaatacaaaaaaattagccgggtgtggtggcgagcacctgtagtcccagctactcgggaggctgaggctgaagaatggcatgaacctgggaggtggagcttgcagtgagcggagatcacaccactgcactccagcctgggcgacagagcgagactctgtctcaaaaaaataaataataataataataataatcttcttttctgaatatgtgtatgtaaaatatatctggaaagatacaagagaatctaattacatagttcctccagggaaggaaactgaccgctgagatagggataggagagagacgtttgagatgtttctgtatattactcctcttgaatgttgagccatgtgattgctttagttattcaaaagtaaataaagttttaaagtgttgaaaaatatctaaaaaataaaaacaaaaaaaaaggaccaggcatggtggcatgtgcctgtaatctcagcactttgggaagctgaggcaggaggatcacttgagcccaggagtttgagaccagcctgcacagcacagtgagactctgtctctaaaaaacaaaaagaaaagaaaaacagaccgggtgcggtggctcacacctgtaatcccagcactttgggaggctgaggcaggtggatcacctgaggtcaggagttcgagaccagcctggccaacatggtgaaaccccatctttactaaaaatacaaaaatcagctggtgtggtggtgggtgcctgtaatcccagctacttgggaggctgaggcaggagaattgcttgaacccaggaggggtgcagtgaattgcttgaacccaggagtttgcagtgagccaagattgtaccattgtactccagcctgggtgacaagagcaaaactcagcctcaaaacaaaacaaaacaaaacaaacaaacaaaaaaagagaggaaaaaaaggaaagaaaataaaaatataccttaccttctaatcctagtacctcttattccttttacttgtcatatttcattggctaagatttctattttaaggccgaaaagtggtggtgaaagtaaacatccttgtctttttttttttttttttttttttgagacggagtcttgctctgtcacccaggctggagtgcagtggcgcgatctcggctcactgcaagctccgcctcctgggttcacgccattctcctgcctcagcctcccgagtagctgggactacaggcgcctgccaccatgcccggctaaatttttgtatttttagtagaaacggggtttcaccgtgttagccaggatggtctcaatctcctgacctcgtgatccacctgcctcggcctcccaaagtgctgggattacaggcgtgagccaccgcgcctggccctaaacatccttgtcttgtatgatattgaaaatattccttaaaagtagtatgtagtatgtttatatagggttataatttggaaaattctctattgtctgtaatggcttccatttccaaatttccaagatgcttaattattgctaaaagtagactgaataacaatccaggtaaagcactttctcgggtgctaacaggcatttctcccaacagctttcttgggagaaaatacattaataaccttggtttgtttatttgtttaattatttttagataatgagaaggaaagattatcaagcattgaaaagattaaacagctaagagaacaagttaatgacctctttagccgaaaatttggtaagtttttatatctttttatatccagaattcatatacctaaaatacttctttttaaaagaatacttggccaggtgcattggctcatacctgtaatcctagcactttaggaggctaaggctagagaatcacttgagcccaggagtttgagaccagcctgggcagcaaagtgacaccccaggtctacaaaaggaaaaaaacaaaactttatcttataagaatttgatcttggctgggcgcagtggttcacacttttaatcccagcactttgggaggccaaggtgtgtggatcacttgaggccaggagttcaagtccagcctggccaacatggcaaaatcccatctctactaaaaatacaaaaaaattagccgggtgtggtggcgcacacctgtaatcccagctactcaggaggctgaggcacgagaatcggttgtaactgggaggcagaggttgcagtgagcttagatcgcgctattgcactccagcctgggcgacagagtgagaccctgtctcaaaaaaaaaaaaaaaaaaagaaattgatctttttgtgaaagagctatgataaaaattagtcaatatgtctttttacagaagagcttttgcatggtatcattgactaattacaataataataataatagctatctttgttttactgagtgcttaccttgtatattattttttgtgctcaacatgtgtttgatcatttaatcctcacataaaacctttcaggtaggcgccatgataaccctgtgtaatggatggaggaactgagtttgcctactacccatgctaattccaaacttttaaaattatattcacacatcatagtagcactggaaaataaaatgactgatcataagtattgtcatttgatgcttctaaatcctgacattaaagataaatcctggtttaggaaacgtaaggaacaaactcagctagttttatttgtgttgttgtttttttaatttgttgttttgttttgtgttttgttttgaggcagggtctcgctctgtctctcaggctggagtgcagtggggcgatctcggctcactgcaacttctgcctcctgggtccctcccatgtggctgggattacaggcatgcgccaccacgcccagctaatttttgtatttttagtagagacagggtttcaccatgttagccaggctggtctcgaactcctggcctcaagtgattcacccgcctcagtctcccagagggctgggattacaggtgtgagccaccgtgcccagccaaactcagctggttttatgctgctcatcccgtcacaggtgaagcaattggcgtggatttccctgtgaaagttccctacaggaagatcacattcaaccctggctgtgtggtgattgatggcatgcccccgggggtggtattcaaggcccccggctatctggaaatcagttccatgaggaggatcttggaggcagctgagtttatcaaattcacagtcatcaggtaagtgagtcaagagaaggaatctggagactctgacttgcccgaggtgggcatgtggctgcccaggaatgtctgtcccatgacttgggctgggggtttgttcccgcagctgaccgctgggccatgctgcctctcacactgacttcatcatcttctgcttccttgagatgtgtccatgtccctgttcctcggtgatcatgggcagcccgtcccagttttagctcacacagcacctagcgtagagttgatactctgcaaaaatttgtccaataaaactaagtggggccaggcacggtggctcacgcctgtaatcccagcactttgggaggctgaggcgggccagatcgcctgaggtcaggagtatgaggcaagcctggccaacatggtgaaaccccgttgctactgaaaatacaaacattagtcgggtgtggtggcgtgcgcctctaataccagctactcaggaggctgaggcgtgagaatcacttaacctgggaggtggaggttgcagtgacctgagatggcaccactgcactccagcctgggcagcagaatgagcctccatctcaaaacataaataaataggccgggcatggtggctcaggcctgtaatcccagcattttaggaggctgaggcaggtggatcatttgaggtcaggagtttgagaccagcctggccaacatggtgaaactccatctctactaaaaataaacattagctgggtgtagtggtacgtgcctgtaatcccagctactcaggagaatcacttgaacctggaatgtggaggttgcagtgagcccagatgacaccactgcactccagcctgggtgatggagtgagactccgtctcaaaaaaaacaaaaacaaaaggctcaacgcagtggctcatgcctgtaatcccagcactttgggaggccaaggtaggtagatctcctgatgtcaggagttcaagagtagcctggccaacatggtgaaactaaaaatacaaaaaattagctgggcgtggtggcgggcacctgtaatcccagctactcaggcggctgaggcaggagaatggcttgaacccaggaggcggaggttgcactaagccgagatcgagccactgcactccagcctgggtgacgcggcgagactcttgtctcaaaaaaaacaaaaacaaaacaaacaaataaataaatattcttctgtaaaaaaataaataagtaaaaattaaaaaaaaataaaactaagtgggcaaaagaggaaatgtgagcttgtcacatttatcaatgtgtctttctcttcaggccgcttccagggcttgagctcagtaatggtgagtattctacaggtgagaagaacgttccggcaatgttgggccatgggaagtgtcttggtgggcgctcaccacggggtttttgcttccgtgagcctgggacccaagtatgcagccttcgatgcatgctttatttttcctgcatgtgataaagttagataactctgttacttgagtttgattaaccagtctgaaggagagtgatctatatcacaccatgagtgtgacgtgtgatgtggcgcactcttttttttttttttggagacggagtctcgctctgtcacccaggctagagtgcaatggcacaatctcggctcaccacacaacctccgcctcccgggttcaagtgattctcctgcctcagcctcccgagtagctgggactataggcgtgtgccaccacgcctggctaatttttgtatttttagtagagatggggttttgccatgttggccaggctggtcttgaacttctgacctcaagggatctgcccgcctccaccttccaaagtgctgggattacgggcatgagccaccacgcatggctgatgtggcacactattcaagtgtgctttgtggtgggggctcccctgaggccacccgcacagctgcactcaggatcacagtaccgatctcctctgtgttagttggtaaatagtgcctgcctggccatgcagtcccaccctagtaccctccgaccgtggcttgacctccctacagtgctgaagcaaaaggggttccacctggcacagcagaggcccctagaacccttccagtgctgagactagcatctgttcttttctttttctttttttttttttttgagacagagtctcgctctctcacccaggctggagtgcagtggcaagatctcggctcactgcaacctccgcctcccgggttcaagcgattctctgcctcagccttccgattagctgggattacaggtgcgtgccgccacatccagctactttttgtattttttagtagagacagggtttagccatgttggccaggctggtctcaaactcgtgacctcaagtgatccacccgccttggtctcccaaactgctgggattacagatgtaagccactgcacctggctcagcatctgttctgattgagcaatgcccaggcactctgcttctgaaatattctcttttttttccccttcaacttttattttaagttccagggtccatgtgcaggatgtgcaggtttgttacacaggtaaacgtgtgccatggtggtttgctgcacctatcaacccatcacctaggtattaagcccagcatgcattagctattcttcctgatgctctccctccccccgcccccaccctgttaaatattcttaatgtcttccccggagcccttgcaagtgagtcagtatcctgtcaagtagaatacggagaggtgttctcacgagcatgagtcaccagggaacctcctaatgtaacatttgaaaaccaaagtaggctgggcgcggtgactcacacctgtaatcccagcactttgggaggccgaggcgggcggatcatgaggtcaggagatggagacccttctgtacaacgtggtgaaactccgtctctactagaaatacaaaaattagtcgggcatggtggcgcgtgcctataatcccagctactcgggaggctgaggcaggaaaatcacttgaaccagggagtcgggggttgcagtgagccgagatcgtgccactgcactccagtttggtgacagagcaagactctgtctcaaaaaaaaaaaaaaagaaaagaaaagaaaaccaaagtatcctattaaaatgctccatttttattcccaaacgcatctgattgctaaatgattttttgatcttttataatatctttatttatttattgtattattattggggttttttagagacaaggtctcactctgtcacccaggctggagtgcagtggcatgatcatagctcactgcagcctggaactcctgccctcaggtgattctcccaccttcacctcccgagtaactgggacagcactgccatgcccagataatttttttttttttttttttttttgtagagacagggtctcactatgtttcccaggctggccttgagcttctggcttcaagcgatcctcctgcctcagcctcccaaagtgctgggattataggcatgagccgctgtacatggcctacattttcttaaggtgcacttttatgtgtgtgtactctggaaataccttgattacctgcagggtggccaggttctttaaatctaaaacactagcccctgtacactcgaacacacttatacgaatgagttttgtgtggttctgtggccgtcacccttgtcatttgagactcacagtaggtaaaaatcatatgcctttctgtgctcattcccatctctgttattacaaagttttcttgggaatcaaatgagaaaatatattaaaatgctcacacctataatcccaggacttttggaggccaaggcaagaggattgcttgaggccaggagtttgagaccagcctgggcaacatagcaagaccccatctctacaaaaaatttaaaaattagctggaaacagtggctcacacctgtagccccagctacttggcaggctaaagcaggaggatcacttaaactcaggagtttgagacagcagagaaccataattgcaatactacactccagcctgggtgacagaacaagaccctgtctctaaaaagaaaatgcaaacatattatctttttttttttttttttttttttttttttttttttttttccttttttttttttttttttttttttttattatactctaagttttagggtacatgtgcacattgtgcaggttagttacatatgtatacatgtgccatgctggtgcgctgcacccactaatgtgtcatctagcattaggtatatctcccaatgctatccctcccccctcccccgaccccaccacagtccccagagtgtgatattccccttcctgtgtccatgtgatctcattgttcaattcccacctatgagtgagaatatgcggtgtttggttttttgttcttgcgatagtttactgagaatgatggtttccaatttcatccatgtccctacaaaggatatgaactcatcattttttatggctgcatagtattccatggtgtatatgtgccacattttcttaatccagtctatcattgttggacatttgggttggttccaagtctttgctattgtgaatagtgccgcaataaacatacgtgtgcatgtgtctttatagcagcatgatttatactcatttgggtatatacccagtaatgggatggctgggtcaaatggtatttctagttctagatccctgaggaatcgccacactgacttccacaatggttgaactagtttacagtcccaccaacagtgtaaaagtgttcctatttctccgcatcctctccagcacctgttgtttcctgactttttaatgattgccattctaactggtgtgagatgatatctcatagtggttttgatttgcatttctctgatggccagtgatgatgagcatttcttcatgtgttttttggctgcataaatgtcttcttttgagaagtgtctgttcatgtccttcgcccactttttgatggggttgtttgtttttttcttgtaaatttgtttgagttcattgtagattctggatattagccctttgtcagatgagtaggttgcgaaaattttctcccatgttgtaggttgcctgttcactctgatggtagtttcttttgctgtgcagaagctctttaaaatacctaggaatccaacttacaagggatgtgaaggacctcttcaaggagaactacaaaccactgctcaaggaaataaaagaggacacaaacaaatggaagaacattccatgctcatgggtaggaagaatcaatatcgtgaaaatggccatactgcccaaggtaatttacagattcaatgccatccccatcaagctaccaatgactttcttcacagaattggaaaaaactactttaaagttcatatggaaccaaaaaagagcccgcattgccaagtcaatcctaagccaaaagaacaaagctggaggcatcacactacctgacttcaaactatactacaaggctacagtaaccaaaacagcatggtactggtaccaaaacagagatatagatcaatggaacagaacagagccctcagaaataatgccgcatatctacaactatctgatctttgacaaacctgagaaaaacaagcaatggggaaaggattccctatttaataaatggtgctgggaaaactggctagccatatgtagaaagctgaaactggatcccttccttacaccttatacaaaaatcaattcaagatggattaaagatttaaacgttaaacctaaaaccataaaaaccctagaagaaaacctaggcattaccattcaggacataggcgtgggcaaggacttcatgtccaaaacaccaaaagcaatggcaacaaaagacaaaattgacaaatgggatctaattaaacatattatcaaataattcctgtttaaactggacataacaagcacagctacatgctgaacctcatcaaaggtgtcttttgtttggctcatgtacttttgaaaataaggatgaggcctggcacggtggctcctgtaatcccagcactttgggaggccaaggcgggtggatcgcttgagcctggggtttcagaccagcctgggcaacaaggtaagactccagctctacaaaaaaaaaaaaaaaagaaaaagaaaaaaagaaaagaaagaaagaaagaaaagatagctcggtgtggtgcatgcctgtagtcccagcaactgggagctgaagtgggaggatcacctgagcccagggagttccaggctgcaatgagtcattatcaccacaaaccaggcactctttcataaaagtcaatcttcaggttttctttagaaaacctgaagatctggctgggtgcagtggctcatgcctgtaatcccagcactttgggaggctgaggtgggcggatcacctgaggtcaggagttcgagaccagcctggacaacatggtgaaatctcatctctactaaaaatacaaaaattagctgggcgtggtggcaggcacctgtcataacagctactcaggaggctgaggcagaagaatcgcttgaacccaggaggcagaagttgcagtgagccgagattgcgccactgcactgcagcctgggcgacagagcaaaactccgtctcaacaacaacgacaacaaaaattcagtcttcaggttttctttagaaaacttgaagatctggccacagctggcatcctggcagcggtttgctggagttgagggtcagccgtccctctgcagggtgggtcaccctcctgttaaccacgccctgccccgccccgcttcctccctctcgtgcgtcatcaagcatttgctgttgttttcctcatagtagtgataagagaaaagtgaaatatctttgtctccctgtctctgtcaaaagtgggaaaacgcaagatagaccaggagggccgtgtgtttcaagaaaagtgggagagagcgtatttcttcgtggaagtacagaatattccaacatgtctcatatgcaaacaaagcatgtctgtgtccaaagaatataacctaagacgccactatcaaaccaatcacagcaagcattatgaccagtatatggaaagaatgcgtgacgagaagcttcacgagctgaaaaaagggctcaggaagtatctcttaggcttgtcagacaccgagtgtcccgagcaaaaacaagtgtttgcaaacccaagtccaacccagaaatcccccgtgcagcctgtagaggacctagctgggaacttatgggagaagttacgtgaaaaaatcaggtcttttgtggcatattctatcgcaatcgatgagatcacggatataaataataccacccagttggccatattcatccgtggtgtcgatgagaatttcgatgtgtccgaagaacttctggacacggtgcccatgacgggtacaaaatctggcaacgagatcttttcgcgtgttgagaagagcctgaaaaagttctgtatcgactggtcgaaattagtaagcgtggcctccactggcaccccagcgatggtggatgccaataacgggcttgtcacaaaactgaagtccagggtggcgacgttctgcaagggtgcggaactgaagtccatctgttgtataattcatccggaatcactctgtgctcagaagttgaagatggaccacgtcatggacgtggtagtgaagtccgtgaactggatatgctcccggggactgaaccacagtgagttcacaaccttgctctatgagctggacagccagtatggtagcctcctgtactacacggagattaagtggctcagtcgcgggctcgtgctaaagagatttttcgaatccttggaagaaatcgactccttcatgtcatccagagggaaacccctgcctcaactgagctccatagattggatccgagacctggccttcttggttgacatgacgatgcatctgaacgctttgaacatctctctccaaggacactcccaaatcgtcacgcagatgtatgacctgatccgggcgttcctagcaaaactgtgcctctgggagactcatttgacgaggaataatctggcccactttcccaccctgaaattggcttccagaaatgaaagcgatggcctgaactacattcccaaaatcgcggaactcaagaccgaattccagaaaaggctgtctgatttcaaactctacgaaagcgaactgactctgttcagctccccgttctccacgaagatcgacagtgtgcacgaggagctccagatggaggttatcgacctgcaatgcaacacggtcctgaagacgaaatacgacaaggtgggaataccagaattctacaagtacctctggggtagctacccgaaatacaagcaccattgcgcaaagattctttccatgttcgggagcacctacatctgcgaacagctgttctccattatgaaactgagcaaaacaaaatactgctcccagttaaaggattcccagtgggattctgtactccacatcgcaacgtgatggagagaaaactcctggcagggccctatggtgggaaaggctggagtcttctagtcccaagggattgggagatgacaaaatgaatttttttttcttttttgagatggagtcttgctctgtcgcccaggttggagtgcagtggcgtgatctcggcttactgcaacttccagctcctgggttcgaacgattctcctgcctcagcctcccgagcagctgggactacaggcgtgcgccaccatgcctggctaatttttgtattagtagagatgaggtttcaccatgttggccaggctggtctccaactcctgacctcaggtgatccacctgcctcgacctcacaaagtgctgggattacaggcatgaaccactgtgcccagctgacaaaatgagttcttaaacttttttttttttcagttttttttccactttgaatcagaaatataatctgcagtatcatacttgtttatattacattgtatgcctcactattcattaaaaatcaagaaagttttattgta

SEQ ID NO: 7187 - DNA, 10894 bp, Homo sapiens
attcttggtaaattctaaacttcaacttctgttttaaggaaacacaaattcatccagtgttacaaattctgcagcaggtgttgaagatcttaacatcgttcaagtgactgttccaggtatggactaatgttacatttttccttttgtcttaattattttttgacatagggtggtctcttggacctgtcatttttcacttagttcaccctgatagctaagaaatgacattttgggaatataaaatattctgcaagttgctacacaacgagcatcttgctcacatcagacattattaatcggatattttgcttctcctggacaagcccgggcattacctggaaaatgcatctcagagcaggcagcatggagcaccagctatggttgaattggaattggccacagaggtgaaatgttttgttgctcatcattaacaatcttctggccgggcacggtggcttacgcctgtaatcccagcactttgggaggctaagacgggcagatcacgaggtcaggagatcgagaccatcctggataacacggtgaaaccctgtctctactaaaaatacaaaaaaaattagccgggtgtggtggcgagcacctgtagtcccagctactcgggaggctgaggctgaagaatggcgtgaacctgggaggcggagcttgcagtgaacggagatcactccactgcactccagcctgggcgacagagcgagactctgtctcaaaaaaataaataataataataataataatcttcttttctgaatatttgtatgtaaaatatatctggaaagatacaagagaatctaattacatagttcctccagggaaggaaactgaccgctgagatagggataggagagagacgtttgagatgtttctgtatattactcctcttgaatgttgagccatgtgattgctttagttattcaaaagtaaataaagttttaaagtgttgaaaaatatctaaaaaataaaaacaaaaaaaaaggaccaggcatggtggcatgtgcctgtaatctcagcactttgggaagctgaggcaggaggatcacttgagcccaggagtttgagaccagcctgcacagcacagtgagactctgtctctaaaaaacaaaaagaaaagaaaaacagaccgggtgcggtggctcacacctgtaatcccagcactttgggaggctgaggcaggtggatcacctgaggtcaggagttcgagaccagcctggccaacatggtgaaaccccatctttactaaaaatacaaaaatcagctgggtgtggtggtgggtgcctgtaatcccagctacttgggaggctgaggcaggagaattgcttgaacccaggaggggtgcagtgaattgcttgaacccaggagtttgcagtgagccaagattgtaccattgtactccagcctgggtgacaagagcaaaactcagcctcaaaacaaaacaaaacaaaacaaacaaaaaaaaaaagagaggaaaaaaaggaaagaaaataaaaatataccttaccttctaatcctagtacctcttattccttttacttgtcatatttcattggctgagatttctattttaaggccgaaaagtggtggtgaaagtaaacatccttgtcttttttttttttttttttttgagacggagtcttgctctgtcacccaggctggagtgcagtggtgcgatctcggctcactgcaagctccgtctcctgggttcacaccattctcctgcctcagcctcccgagtagctgggactacaggcgcctgccaccatgcccagctaaatttttgtatttttagtggaaacggggtttcaccatgttagccaggatggtctccatctcctgacctcgtgatccacctgcctcggcctcccaaagtgctgggattacaggcgtgagccaccgcgcctggccctaaacatccttgtcttgtatgatattgaaaatattccttaaaagtagtatgtagtatgtttatatagggttataatttggaaaattctctattgtctgtaatggcttccatttccaaatttccaagatgcttaattattgctaaaagtagactgaataacaatccaggtaaagcactttctcgggtgctaacaggcatttctcccaacagctttcttgggagaaaatacattaataaccttggtttgtttatttgtttaattatttttagataatgagaaggaaagattatcaagcattgaaaagattaaacagctaagagaacaagttaatgacctctttagccgaaaatttggtaagtttttatatctttttatatccagaattcatatacctaaaatacttctttttaaaagaatacttggccaggtgcattggctcatacctgtaatcctagcactttaggaggctaaggctagagaatcacttgagcccaggcgtttgagaccagcctgggcagcaaagtgacaccccaggtctacaaaaggaaaaaaaacaaaactttatcttataagaatttgatcttggctgggcgcagtggttcacacttttaatcccagcactttgggaggccaaggtgggtggatcacttgaggccaggagttcaagtccagcctggccaacatggcaaaatcccatctctactaaaaatacaaaaaattagccgggtgtggtggcgcacacctgtaatcccagctactcaggaggctgaggcacgagaattggttgtaactgggaggcagaggttgcagtgagcttagatcgcgctattgcactccagcctgggcgacagagcaagaccctgtctcaaaaaaaaaaaaaaaaaaaagaaattgatctttttgtgaaagagctatgataaaaattagtcaatatgtctttttacagaagagcttttgcatggtatcattgactaattacaataataataataatagctatctttgttttactgagtgcttaccttgtgtattattttttgtgctcaacatgtgtttgatcatttaatccttacataaaacctttcaggtaggcgccatgataaccctgtgtaatggatggagaaactgagtttgcctactacccatgctaattccaaacttttaaaattatattcacacatcatagtagcactggaaaataaaatgactgatcataagtattgtcatttgatgcttctaaatcctgacattaaagataaatcctggtttaggaaatgtaaggaacaaactcagctagttttatttgtgttgttgtttttttaatttgttgttttgttttgtgttgttttgttttgaggcagggtctcgctctgtctctcaggctggagtgcagtggggcgatctcggctcactgcaacttctgcctcctgggtccctcccatgtggctgggattacaggcatgcgccaccacgcccagctaatttttgtatttttagtagagacagggtttcaccatgttagccaggctggtctcgaactcctggcctcaagtgattcacccgcctcagtctcccagagggctgggattacaggtgtgagccaccgtgcccagccaaactcagctggttttatgctgctcatcccgtcacaggtgaagcaattggcgtggatttccctgtgaaagttccctacaggaagatcacattcaaccctggctgtgtggtgattgatggcatgccccgggggtggtattcaaggaccccggctatctggaaatcagttccatgaggaggatcttggaggcagctgagtttatcaaattcacagtcatcaggtaagtgagtcaagagaaggaatctggagactctgacttgcccgaggtgggcatgtggctgcccaggaatgtctgtcccatgacttgggctgggggtttgttcccgcagctgaccgctgggccatgctgcctctcacactgacttcatcatcttctgcttccttgagatgtgtccatgtccctgttcctcggtgatcatgggcagcccgtcccagttttagctcacccagcacctagcgtagagttaacactctgcaaaaatttgtccaataaaactaagtggggccaggcacggtggctcacgcctgtaatcccagcactttgggaggctgaggcgggccagatcgcctgaggtcaggagtatgaggcaagcctggccaacatggtgaaaccccgttgctactgaaaatacaaacattagtcgggtgtggtggcgtgcgcctctaataccagctactcaggaggctgaggcgtgagaatcacttgacctgggaggtggaggttgcagtgacctgagatggcaccactgcactccagcctgggcagcagaatgagcctccatctcaaaacataaataaataggctgggcatggtggctcaggcctgtaatcccagcattttaggaggctgaggcaggtggatcatttgaggtcaggagtttgagaccagcctggccaacatggtgaaactccatctctactaaaaataaacattagctgggtgtagtggtacgtgcctgtaatcccagctactcaggagaatcacttgaacctggaatgcggaggttgcagtgagcccagatgacaccactgcactccagcctgggtgatggagtgagactccgtctcaaaaaaaacaaaaacaaaaggctcaacgcagtggctcatgcctgtaatcccagcactttgggaggccaaggtaggtagatctcctgatgtcaggagttcaagagtagcctggccaacatggtgaaactaaaaatacaaaaaattagctgggcgtggtggcgggcacctgtaatcccagctactcaggcggctgaggcaggagaatggcttgaacccaggaggcggaggttgcgctaagccgagatcgcgccactgcactccagcctgggtgacgcagcgagactcttgtctcaaaaaaaacaaaaacaaaacaaacaaataaataaatattcttctgtaaaaaaataaataagtaaaaattaaaaaaaaataaaactaagtgggcaaaagaggaaacgtgagcttgtcgcatttatcaatgtgtctttctcttcaggccgcttccagggcttgagctcagtaatggtgagtattctacaggtgagaagaacgttccggcaatgttgggccatgggaagtgtcttggtgggcgctcaccacggggtttttgcttccgtgagcctgggacccaagtatgcagccttcgatgcatgctttatttttcctgcatgtgataaagttagataactctgttacttgagtttgattaaccagtctgaaggagagtgatctatatcacaccatgagtgtgacgtgtgatgtggcgcactctttttttttttttttggagacagagtctcgctctgtcacccaggctagagtgcagcacaatctcggctcaccacacaacctccgcctcccaggttcaagtgattctcctgcctcagcctcccgagtagctgggactataggcgtgtgccaccacgcctggctaatttttgtatttttagtagagatggggttttgccatgttggccaggctggtctcgaacttctgacctcaagggatccgcccgcctccacctttcaaagtgctgggattacgggcatgagccaccacgcatggctgatgtggcacactattcaagtgtgctttgtggtgggggctcccctgaggccacccgcacagctgcactcaggatcacagtaccgatctcctctgtgttggtaaatagtgcctgcctggccatgcagtcccaccctagtaccctccgaccgtggcttgacctccctacagtgctgaagcaaaaggagttccacctggcacagcagaggcccctagaacccttccagtgctgagactagcatctgttcttttttttttttgagacagagtctcgctctctcacccaggctggagtgcagtggcaagatctcggctcactgcaacctccgcctcccgggttcaagcgattctctgcctcagccttccgattagctgggattacaggtgcgtgccgccacatccagctactttttgtattttttagtagagacagggtttagccatgttggccaggctggtctcaaactcgtgacctcaagtgatccaccctccttggtctcccaaactgctgggattacagatgtaagccactgcacctggctcagcatctgttctgattgagcaatgcccaggcactctgcttctgaaatattctcttttttttccccttcaacttttattttaagttctagggtccatgttcaggatgtgcaggtttgttacataggtaaatgtgtgccatggtgatttgctgcacctatcaacccatcacctaggtgttaagcccagcatgcattagctattcttcctgatgctctccctccccctacccgcccccaccctgttaaatattcttaatgtcttccccggagcccttgcaagtgagtcagtatcctgtcaagtagaatacggagaggtgttctcacgagcatgagtcaccagggaacctcctaatgtaacatttgaaaaccaaagtaggctgggcgcggtgactcacacctgtaatcccagcactttgggaggccgaggcgggcggatcatgaggtcaggagatggagacccttctgtacaacgtggtgaaactccgtctctactagaaatacaaaaaattagccgggcatggtggcgcgtgcctataatcccagctactcgggaggctgaggcaggaaaatcacttgaaccagggagtcgggggttgcagtgagccgagatcgtgccactgcactccagtttggtgacagagcaagactctgtctcaaaaaaaaaaaaaaaaagaaaagaaaagaaaaccaaagtatcctattaaaatgctccatttttattcccaaacgcatctgattgctaaatgattttttgatcttttataatatctttatttatttattgtattattattggggttttttagagacaaggtctcactctgtcacccaggctggagtgcagtggcatgatcatagctcactgcagcctggaactcctgccctcaggtgattctcccaccttcacctcccgagtagctgggacagcactgccatgcccagataattttttttttttttttgtagagacagggtctcactatgtttcccaggctggccttgagcttctggcttcaagcgatcctcctgcctcagcctcccaaagtgctgggactataggcatgagccgctgtacatggcctacattttcttaaggtgcacttttatgtgtgtgtactctggaaataccttgattacctgcagcgtggccaggttctttaaatctaaaacactagcccctgtacactcgaacacacttatatgaatgagttttgtgtggatctgtggccgtcacccttgtcatttgagactcacagtaggtaaaaatcatatgcctttctgtgctcattcccatctctgttattacaaagttttcttgggaatcaaatgagaaaatatattaaaatgctcacacgtataatcccaggacttttggaggccaaggcaagaggattgcttgaggccaggagtttgagaccagcctgggcaacatagcaagaccccatctctacaaaaaatttaaaaattagctggacacagtggctcacacctgtagccccagctacttggcaggctaaagcaggaggatcacttaaacccaggagtttgagacagcagagaaccataattgcaatactacactccagcctgggtgacagaacaagaccctgtctctaaaaagaaaatgcaaacatattatcaaataattcctgtttaaactggacataacaagcacagctacatgctgaacctcatcaaaggtgtcttttgtttggctcatgtacttttgaaaataaggatgaggcctggcacagtggctcctataatcccagcactttgggaggccaaggcgggtggatcgcttgagcctggggtttcagaccagcctaggcaacaaggtaagactccagctctacaaaaaaagaaaaaaaaaaaaagaaaaagaaaaaaagaaaagaaagaaagaaagaaaagatagctcagtgtggtgcatgcctgtagtcccagcaactgggagctgaagtgggaggatcacctgagcccagggagttccaggctgcagtgagccattatcaccacaaaccaggcactctttcataaaagtcaatcttcaggttttctttagaaaacctgaagatctggctgggtgcagtggctcatgcctgtaatcccagcactttgggaggctgaggtgggcggatcacctgaggtcaggagttcgagaccagcctggacaacatggtgaaatctcatctctactaaaaatacaaaaattagctgggcgtggtggcaggcacctgtcataacagctactcaggaggctgaggcagaagaatcgcttgaacccaggaggcagaagttgcagtgagccgagattgcgccactgcactgcagcctgggtgacagagcaaaactccgtctcaacaacaacgacaacaaaaattcagtcttcaggttttctttagaaaacttgaagatctggccacagctggcgtcctggcagcggtttgctggagttgatggtcagccgtccctctgcagggtgggtcaccctcctgttaaccacgccctgccccgccccgcttcctccctctcgtgcgtcatcaagcatttgctgttgttttcctcatagtagtgataagagaaaagtgaaatatctttgtctccctgtctctgtcaaaagtgggaaaatgcaagatagaccaggagggccgtgtgtttcaagaaaagtgggagagagcatttttcttcgtggaagtacagaatattccaacatgtctcatatgcaaacaaagcatgtctgtgtccaaagaatataacctaagacgccactatcaaaccaatcacagcaagcattatgaccagtatacggaaagaatgcgtgacgagaagcttcacgagctgaaaaaagggctcaggaagtatctcttaggctcgtcagacaccgagtgtcccgagcaaaaacaagtgtttgcaaacccaagtccaacccagaaatcccccgtgcagcctgtagaggacctagctgggaacttatgggagaagttacgtgaaaaaatcaggtcttttgtggcatattctatcgcaatcgatgagatcaccgatataaataataccacccagttggccatattcatccgtggtgtcatagtgaatttcgatgtgtccgaagaacttctggatacggtgcccacgacgggtacaaaatctggaaacgagatcttttcgcgtgttgagaagagcctgaaaaagttctgtatcgactggtcgaaattagtaagcgtggcctccactggcaccccagcgatggtggatgccaataacgggcttgttacaaaactgaagtccagggtggcgacgttctgcaagggtgcggaactgaagtccatctgttgtataattcatccgaaatcactctgtgctcagaagttgaagatggaccacgtcatggacgtggtagtgaagtccgtgaactggatatgctcccggggactgaaccacagcgagttcacaaccttgctctatgagctggacagccagtatggtagcctcctgtactacacggagattaagtggctcagtcgcgggctcgtgctaaagagatttttcgaatccttggaagaaatcgactccttcatgtcatccagagggaaacccctgcctcaactgagctccatagattggatccgagacctggccttcttggttgacatgacgatgcatctgaacactttgaacatctctctccaaggacactcccaaatcgtcacgcagatgtatgacctgatccgggtgttcctagcaaaactgtgcctctgggagactcacttgacgaggaataatctggcccactttcccaccctgaaattggtttccagaaatgaaagcgatggcctgaactacattcccaaaatcgcggaactcaagaccgaattccagaaaaggctgtctgatttcaaactctacgaaagcgaactgactctgttcagctccccgttctccacgaagatcgacagtgtgcacgaggagctccagatggaggttatcgacctgcaatgcaacgcggtcctgaagacgaaatacgacaaggtgggaataccagaattctacaagtacctctggggtagctacccgaaatacaagcaccattgcgcaaagattctttccatgttcgggagcacctacatctgcgaacagctgttctccattatgaaactgagcaaaacaaaatactgctcccagttaaaggattcccagtgggattctgtactccacatcgcaacgcgatggagagaaaactcctggcagggccctatggtgggaaaggctggagtcttctagtcccaagggattgggagatgacaaaatgaatttttttttcttttttgagatggagtcttgctctgtcgcccaggttggagtgcagtggcgtgatctcggcttactgcaacttccagctcctgggttcgaacgattctcctgcctcagcctcccgagcagctgggactacaggcgtgcgccaccatgcccggctaatttttgtattagtagagatgaggtttcaccatgttggccaggctggtctccaactcctgacctcaggtgatccacctgcctcgacctcacaaagtgctgggattacaggcatgaaccactgtgcccagctgacgaaatgagttcttaaactttttttttttcagttttttttccactttgaatcagaaatataatctgcagtatcatacttgtttatattacattgtatgcctcactattcattaaaaatcaagaaagttttattgta

SEQ ID NO: 7188 - DNA, 509 bp, Homo sapiens
ttaagtcttgcacgttagcactgacccacaactgggcctcaactgtgctgtgttcacgtgaggaaagaatgaagggttgagggtacatgaggggggagaatggaaagaaaaggacgattcactcagacatagcccctttgctactggagtggacagataaatatcaaaggtaactccgcaggcctgcagccggtgaactcagttgaagtgcaagtatctaaaggaagtgaagttgaaagtgtgatttaaggctggcgtggtgggtggctcacacctgtaatcccagcactttgggagacccaggtgggtgaatcccttgaggccaggagttcaagaccagcctggccaacatggcgaaactctgtctctactaaaaatacaaaaattagagccgggcgtggtggctcacgcctgtaatcccagcactttgggaggcccaggtaggtgaatcacttgaggtcaggagttctcaaccagcatgaccaacacggtgaaactccgtctctact

SEQ ID NO: 7189 - DNA, 509 bp, Homo sapiens
ttaagtcttgcacgttagcactgacccacaactgggcctcaactgtgctgtgttcacgtgaggaaagaatgaagggttgagggtacatgaggggggagaatggaaagaaaaggacgattcactcagacatagcccctttgctactggagtggacagataaatatcaaaggtaactccgcaggcctgcagccggtgaactcagttgaagtgcaagtatctaaaggaagtgaagttgaaagtgtgatttaaggctggcgtggtgggtggctcacacctgtaatcccagcactttgggagacccaggtgggtgaatcccttgaggccaggagttcaagaccagcctggccaacatggcgaaactctgtctctactaaaaatacaaaaattagagccgggcgtggtggctcacgcctgtaatcccagcactttgggaggcccaggtaggtgaatcacttgaggtcaggagttctcaaccagcatgaccaacatggtgaaactccgtctctact

SEQ ID NO: 7190 - DNA, 89 bp, Homo sapiens
gctaggatcacaccactgcactccagcctgaatgacagagtaagaacctgtctcaaaaaaaaaaaaagaaaaaaaaaattcagtctggg

SEQ ID NO: 7191 - DNA, 33109 bp, Homo sapiens
cctcaggcattgaaaaggggtcggaagtgaatggagtaaacacctgacagcagcgagctgggattgagaacaaaagagcacacacaggacaatagaaaaatctgaaaaacaagtggttctcctcttctggactttgaggttataaggaggctgactaaaaacttgggtttacattaatgtcttcagtaagtcttatattctattttcttagcttatctttaatttgaaaaagaataatgacacaaacgctttttcctgattagcttttaaaggaagacaatcaagatctaaccggtctgtagttttgccacttaactggttcatcacccaatcagtttccatcccctgcccccatttgtataaaaattactgcgtgtctgcgaaagggcagattactggctcatgcctgtaatcccagcactttgggaggctgaggtgggcggattgcttgagctcacgggttcgagaccaatctgggcaacatggtgagaccctgtgtctactaaaaatacaaaaaatacaaaaaaatagccaggcatgccagtggtcccagctgctcgggaggctgaggtgggaggattgtttgagcccagtgagctgagattgtgccactgcactccaaatgcctgaactatggcacagtttagtatatgttgtattaatagtttagtatatgttgtattattagtatgtatcagtatataggatatctatactatctataatatatagtatatgtaatagtgtatgttgtattaataaatgaagaactccagccctttagaaagtgtagaaccacttgagaaagatcttacttttgtacggcactttacaaagagctgtttatatattgtatccatttagattatttcttaactcccagtgcagctaaaaaattatcttccccattctgttttcctacacaattaaataattttagttccgtaaattgttctttttacaacgctttcttgcattttctctctttcctgtgctttatccaattttgtctttggttcatcatgcccctcaggcatggagtttgaaaactaggtagataggatgtctaaaccaaaaaagtataccatagtattggtcttactcccatacagagaagccattcaaactgtgggaatgaatttgagttattagagaaatgataatagtagtttaagtatgttcattcaggtttacacatatctgttgttaaatttaggatggcccgtactttggaaccactagcaaagaagatctttaaaggagttttggtagccgaacttgtaggcgtttttggagcatattttttgtttagcaagatgcacacaagccaaggtaatcataattcagaagttaatgctttctaaaggggtatagttttgctaatccattttatgtgttaaatggcaatggcatgtttggagaaattggttcttcagattcaagatattagacatttttaggggcagaacaggaatcaaagtattcattattgtggactagatcactctcacttctcccttaaaaatgttgtttgtgggctaaggaaaaaatttcatacctccatggattttactattgtggaggatatagcaagtgtccttggtctggcttagtttgggagcacagatggaggaaacttagcctgcccattatacttcattgtttggtagactaagaaagtaactggtattgctgttttctgagtaaccagttttctcaggctatagtattcttcctgggcatcaacagtgggcactaagactttcacatgctatggccgaaagtgctttaacatttttcttggggaaattttatattagagctctcaactttttaaattaggaagtgatttttccctaaaacagggaatagacctggcatgatagccatctttgaaacttgccacagtcttcctcagcatacttggttggaacgctgtaccaagatgctactggatactcaaaaaatcccttttcttttaaactctaaggaagggtattaaaaaaacatcccaacagtatttaaaaacaaattaaagcttgggatcagttttaaaaagtgtcatggctgggtgtgatggcttgcacttgtaattccagcacttcgggaggccaaggtggaaggactgcttgagctcagtctgggctaaacataacaagacactgtatcttaagaaaaaaaaaaaaagtgctgggcatgatggtgtgctcctgtagtcccagctactcgggaggttgaggtaggaggctcccctgagccccatcccagctacttgaccttggctgacgtaggaggctcgcttgagcccagcccaggggggtctaggcagtggtggattgtgactgtgccactgtactgcagcctgggcaacagggagagagatcctgactcaaaaaaacaaaaggagatcgttcctggattaccagaaagaccttcaaacaaatttctaatctatatggttcccatcatatggaccctaaagctagcattaaattgtggctgtgttaatataatgaatttctgttcatatctaatttcaagacatccttttttccatcagatttcaggcaaacaatgagcaagaaatatcccttcatcttggaaggtatgtttttccttaagtaaaaataagtataaaacaacttcttcaggtaacctataaattatgtagtaatttctttacaaggaatttctaacaatactattcacatgtattttagttcttctgagactaaattctcatctattctagtgagaggagaattaggtaatgggctggattctgaattcttctagtggttaagaatgtaaactctggaatcattcatatatgaggtgatagaatcaaaccacagtttaaacctttggttttaaaagatcagtttcatctcaggtttgctaacttcttggagctgtctctttctctgtcaagtagataaagactgaacaagatgacatcatgtagttagacgaaatagtgctcattacaatgatcagagatgccaggacttatatgtgaagtctgtaatcctactgtcctctttttcattttgttatgtagcaatatggaaaaaagaagttgtttttttcaatacatttaattttaacaatgcttccacatgactttataaatgagagctatttttatttatagtttattacaaatccactgagaagtctggaatgtatggaatcagagagctagatcaaaaaacatggttgaacagcaaaaattagatgtaagtagaattttaatctataatttacattaataactcatttcctttgttttttagttttttgagtggttttaatcctcttctttttaaaatgtttctttttcttgatgatactttttgcatctctgttgtgtagccagtcatcacgttcagcctcccatctaagctgtttgagacctttgagagaagaagaaaagatgagtgtactaccacactgtagactcttggtggtcccacagaacatgctgctgagtcacaggaacttctagcctgccttggcctgtggtttcccacccactatacaaacccactgcttgtttgttgcttttcttctcatatttattgtcaaagataaatgtttcaaaaagaaatgactaaggaaggaaaagaaacaaatgctctaaagattttctctccccaagcacttttactggtgaaataaaaaccagtaacaatcaatatgtaaaaacggcccacttccctaaaaaaaagtaatttttgtagtctgcaaggttttttttttttttgctttagtctaaatacttgttaatcttacatgttctcctgagagaagaaaaagccattcctttcaggttgtaaagtaccatgaaaaggtctttcaaaaatattcctatcagccaggcatggtggctcacaccagtaatctcagcactttgggaggccgaggcaggcgggtcacttgaggtcaggagttcgagaccagcctggccaacatggtgaaaccctgtttctactaaaaatacaaaaattagctgggcgtggtggtgcatgcctgtaatcccagctacttgggaggctaaggtaggagaattacttgaacatgggagatggaggttgcagtgagccaagatcatgccactgcattccaacctgggcaagggagtgagacgctgtctcaaaaaaaaaaaaaaaaaaaaaaaaaaaaaaaaaaaaaaaaaaaaaaaagaataaataaaataacgaaaatttcctatcttctgaagttccaagccaaagctatttttaaaacatcaataaaaaaatttaagttacttacttgcattatctttgttagccatggcattcatgccaatgttatcaaacttggatcccatattttcatccaatagatggccaaacttttaaacaaaaacgataaatttattagaaaactaaaaataatgtagaatagctagcttgttaaaacagtacattagccttacctcttcagcagatacaaataggctggaatcatttaagtttcttttcttttttcttggccctaaaaaaaattgtaagtctacattattcaattataaatctaatgattttagaaaaatgcaatgcaacatgattttattttaaaaattatacttgggtaaaaacaattgcaataatcttctggcaccattgggtagctggcatttaaatataatttaagagttagtatataatattttcaaaaagctaacaacatcctaatagaactgttcagatgacaagagtgtcttcttgcttttcagatttggccactgatcgaagttttacccataagggaaataacatagtatcaagcaatagtaaaattatcagtttgacatggatgggttttgaaatacttaagacacaacataaaatttagttcaggggtctttagattgtaaagaaattgactgaaagtatgtttattatgctataaatgaagttgtttataacagcgaaaaaggttctcctttaaaaaaaaaacttatctgtagtactgaatatataaacttttcctgaaacaattattcaaactctgcatctttgatatcaatgtctctagcagtagtagagccatattttaaaaagagctttactaaatacagatcataacattcagctgttttaagtgtattaacgcattttggtaaatttacagacttgttcaaccacaaccacagtctgattttagaacatttccatcaacttcaaagatccctggtgccatttgtagtcctccaacccatctccgatctatcttgtttctatgacttgccttttctggctatttcatataaatgggatcatatgacatgtggtttcctatatctgacttttttcatttagcataacgtttttgaggctcatccatgttgtagtactccatgccatgttgtgggctacataatattccattgtatggatataccacattttgcttatcagttaatggacatttaggttttgtctactttttggcattaatagtgctgctgtgaacaatcatgtacaagtctttgtatcagagccacttttgataaaatagtttctaaaacatttcatcttgatttttattaaggtgatatgtatgttacttaacagctgtataatacacatttgcatgcattaggaagttttttttgggttttattcatcctgtagtgatgtatctgtgacctcaacgagtaggcacttctgtactgtactggtttcttaaagtttcttttatcccgcccccacccccaacctcagcctcaagtatgtaacaccatgcctggctaatttttgatttttttttttttttttttgagacagagtctcgctttgtcgccaggctggagtacaggggcgtgatctcggctcactgcaacctctgccttctgggttcaagcgattctcctgcctcagcctcccaagtagctgggcctacaagtgcatgccaccacgccaagctaatttttgtatttttagtagagatggggtttcatcatgttggccaggatggtcttgatctcttgaccttgtgatctacctgccttggcctcccaaagtgctgggattacaggcgtgagccactgcgcccagccatttttgattttttgtagagatggggtctcattgtgttgcccaggctgattaaagtttctataaggtatgtttattcttaaggatatctactctaacacctgtaaatgtagggtgatcaattagtaaattaataaatctgaatcaattaataaatctgtttaaaattccttgcctctttttgtttcagtcaattctgttgggtattctttaatctgcatccaaaactattatcaattgagatctgaaatcctttcaggctaatgtcttctgaaacagtactttactatttgaaacaagctcagagcatcttttttaacattaaaaaatttttttcttctcctcaaattccttttaccagcatcttttaataaaaggctcagtagaacttgaagtaaagcaacacttttctgtgggatgcttttgagaaaaactgcctatatctcatcttatgctaatactaaaacatgatcttagatactcaagggaagacaaaatctggaagataacgtgttataatttaaatatgtatcagttaaatcatagttattacaggactaagaaattgacagcagtatttgaaagagctgataaaattttgtaggcgtgaggctctgaaagactactaccaatatgtaaatgaaactttttgtcaggcctctgagcccaagctaagccatcatatcccctgtgacctgcacgcacacatccagatggtcggttcctgccttaactgatgacattccaccacaaaagaagtgaaaatggcctgttcctgccttaactgatgacattatcttgtgaaattccttctcctggctcatcctggctcaaaagctcccctactgagcaccttgtgacccccactcctgccaggcagagaacaaccccctttgactgcaattttccttttttctacccaaatcctataaaatggccccacccctatctcccttcactgactctcttttcggactcagcccgcctgcacccaggtgaaataagcagccttgttgctcatgcaaagcctgtttggtggtctcttcatacagacgcgcatgaaactttttaaaacattattattatttaactttgcagatctatttttagtcatcagtatttagcagtaagcagaagccagagaggcactggaggcaaagtatgtacagtgctttctacatttttatcaaaaatcttaagactgtcacctgatacagcacttttttcttttattagcaccttgtgttacactgtgaagcagaatcttgtaagataatacttttaaaaatgttaaaaaacaattagcagaaagaagagttcgtatcataataaaggagcatggattattgcaagggtcaaatggcaaataatggttgagaaaagaaaaagataacaggtgtctgaaaaatgcaaggcttttataattgaatggtttaaaaatgaatgagcagagattagcatgtgaatctctggactaggtaaggaagatctgcattcaaatgtgagtgggcaccatccaatctgctggggccctggagagaacaaaacaaagaggcaaacatgttgatctgctgtgctgaggaggaaaatggcggataaggggacaggactaacgtgcagctcccacatggatggacagaacagcgtgtggcaacgtgtttagtctccttaaaaggtatccaacaaaactaagcttcctaaatgaaggagagatatctatgctgagaattcaccactaccaagccagcactataagaaatgctgaaaggagttctaaatctttgttttttgtttctttttttgagatggaatcttgctctgtcgcccaggcgggaaggcagtggtgtgatcttggctcactgcgacctctgcctaatgggttcaagtgatttttgtacctcagcctcctcagtagctgggattataggggcttaccaacatgcccagctaatttttgtattttttgtagagatagggttttgccatgttggccaggctggtcttgaactcctgacttcaggtgatgcccgcctgggcctcccgaagtgctgggattacaggtgtgagccactacactcagcctaggaattctaaatcttgaaacaaaaccttgaagtacaccaaaatagagccttcttaaaacctaaatcttacagggcctatacaataacacaatgaaaaaacaacaaaatcaaagtattcaagcaacaactagcatgatgaatagaatagtacctcacatctcaaatactacgttggatgtaaatggcctaaatgctcctcttaaaagatacatttggaccaccaaccaagaatctgctgtgttcaggagactcacgtaacacataaggactcacataaacttaaggtaaaggggtgggaaaagatattccatgcaaatggaaaccaaaagcaagcaggactagctattcttatatcagacaaaacagactttaaagcaacaacagttaaaaaagacaaagagggacattacatactagtaaaatgattagtccaacaagaaatgtcataatccaaaatatatatgcacctaccaccagagcttccaaatttataaaaccattactactagacctaagaaattagacagatggcaacacaataatagtgggtgacttcaatactccactgacagccctagacgggtcatcaagacagaaagtcaacaaagaaacaatggacttaaactataccttagaacaaatggacttaacagatacctacggaacattctacccaaaaactgcagaatatacattattttcaccagcacacggagcattctcaaggatagaccatatggtaggccacaaaacaagtctcaataaacttaagaaaactgaaattgtatcaagtaccctctcacaccacagtggaatacaattggaaattaactccaaaaggaaccctcaaaactatatacaaatacatggaaatttaataatctgctcttgaatgatctttgtgtcaacaatgaaatcaagatggaaattaaaattttttgaactgaacaatagtgacacaacccatcaaaacctctgggatacagcaaaagcggcactacatttagtaagttcacagcattaaatgtctacatcaaaaagtctgaaagagcataaacagacaatctaagctcacacctcaaggaactagagaaacaagaacaaatcaaactcaaacccagcagaagaaaagaaataacaaatatcagagcagaactaaataaaactgaagcaaacactacaaaagataaatgaaacaaaaagctggttctgtggaaaaataaagaaaatcggtagaccattagcaagattaaccaaaaaaagaagagagaagatctgaataagctcaattagagacgaaatgggagatactacaaccgataccacagaaatacaaaagatcattcaaggctactatgaacacctttatgcacaaaaactagaaaacctagagaaaaatggataaattcctggaaatatacaacccttctagattaaaccagaaagaaatggaaactctgaacagaccaataacaagtagcacgactgaaacagtaataaaaaaactgccaacaaaacaaagtccaggaccagatggattcacagctgaattctatcagacattcaaagaactggtaccaatcctactgaaactattccaaaagatagggaaagagggaatcctccctaaatcattcaatgaagccaatatcgccctaattccaaaatcaggaaatgacataacaaaagaaaactagagaccaatattcctcatgcacacagatgcaaaaaccctcaacaaaatactagctaaccaactccaacagcatatcaaaaagataatacaccatgatcaagtgggtttcttgccagggatatagggctggtttaacatacgcaagtcaataaatatgatataccacataaacaattaaaaacaaaaatcatatgatcatctcaatagacgcagaaaaagcatttgacaaaatcaagcatcctttatgatttaaaccctcagcaaaactggcatacaagggacgtaccttaaaagtaatgaaagccatctatgataaacccatagccaacattatactgaacagggaaaagttgaaagcattccccctgagaactggaacaagacaaggatgcccactttcaccacttctattcaacatagtactggaaatcctagccagtgcaactggacaagagaaagaaagggcattcaaatcagtaaagaggaagtcaaactgtcactattcaccgatgatatgatagcatacctagaaaaccctaaagactcatccaaaaagatcctagatctgataaataaatccagcaaagtttcaggatacaaaatcaatgtgcgcaaaccagtagcattgctatacaccaacagcaaccaagctgagaatcaaatcaattactctaccccccttacaacacctgccaaaaaaaaaaaaaataataatacttaggaatacacctaatcaaggaggtgaaagatctctaaaaggaaaactacaaaacactgctgaaagaaaccacagacacacacaaatggaaacgcatcccatgttcatggatgggtagaatcgatattgtgaaaatgaccatactgccaaaagcaatctataaatttaatgtaattcccatcaaaatgccatcatcattcttcacagaactaggaaaaaaaatcctgaaattcatatggaacaaaataagagcctgcatagccaagcaagactaaacaaaaagaacaaatctagaggcatctcattacctgacttcaaactatactactaggctattgttaccaaaatagcatggtacttgtacaaaaacaggcacgtagaccaatggaacagaatagagaacccagaaataaagccaaatacttacaaccatctgatctttgacaaagtaaacaaaaacaaagtggggaaaggacaccctattgaaccattggtgctgggataactggcaagccacatgtaggagaattaaactggatcctcatttctcaccttatgcagaaaactcaagatggatcgaagacttaaagataagacctgaaactgtaaaaattctagaatataacattggaaaaactcttctagacattggcttaagtagagttcatgaccaagaacctaaatgcaaatgcaacaaaaacaaatagatgggacttaattaagctaaaaagcgtctgcatagcaaaataaataatcagcagagtaaatagacaacccatagagtgggagaaaatcttcgtaaactatgcatctgagaaaggactaatgtccagaatctataaggaactcaaaaaagtcagcaagaaaaaaacaatcccatcaaaaagtgtgttaaggatatgaacagacaattctcaaaagatatacaaatggtcaagaaacatatgaagaaatgctcaacatccctgattatcagggaaatgcaaatcaaagccacagtgcaataccaccttactcctgcaagaatggccgtaatttaaaaataaaaaaaatttcagatgttggcatggatgtggtaataagggaacacttctacattgctggtgggaatgtaaactagtacaaccactatggtaaacagtatggagagtccttaaagaactgaaagtagaactatcatttgatctagcaatcccaccactgggtactacccagaggaaaataagtcattatataaaaaagacaaacacacagatttatagtagcacaatctgcaattgcaaaaatatggaaccaacctaaatgcccatcaactaatgagtggataaagaaaatgtggtatacatataccatggaatgctactcatccataaaaaggagagaaataatggcattcgcagcaacctgaatacagctggagaccattattctaagcgaagtaattcaggaatggaaaaccaaacattctatgttctcagttataaatgggagctaagcaatgaggatgcaaaggcttaagaatgatataatggactctggggacttggggggaagagtgggaggcagtgggggataagagtacacattgggtgcagtgtactgcttgagtgatgggtgcaccaaaatctcagaaatcactactaaagaacttacctatgtaaccaaacaccctacctgttccccaaaaacaactgaaataatgataacaaatttttaaaaagtgaatgaaaagatgatccagagatatctgaatgcgagaaacaattcaaaatgtggaaaataatttccacttaacatctttcttaaaaagaaccccccccacccctgaattttattaatcaaatttaggagagttcatttcccaaaatgataatgacacctttcacatggacactgcttttaaaagatattaaatgtattttcttaccttgaaatgagccagcaaagtcaaaatcatctgtaccttttctcttgcttttcttagtactgactttggagtggacttcaagttctgttacacgaaaaaatttgctaataagcaatttaaaaacaataagactggaaaatattactccaagatatgctaaaatctttattctgatggtaaggcactatactgctattccatgtgggttttgtaattccactagcataggcttgaggacagactgagaaaaagactctaagaattggcacagttctaatattttgtgcaagtacaaaattttctaaatagcttcattaataagaccaaataatataaaaccccttaaaacaagaaacttctgctgtggttcagaataagtaagaagaatgttgggcaggcatgtgcatgctggaggtatgtgaaaggacagaaaggtcagacaacagtctagagacaattctgggtgttccttgctaatttacaagataaaatattcaccttcatctatgctgggctatgatgaatactgattaacttttataaactgctaattactatcaaaaaatggcagcatttcagctcaacatgtattgtacagagaagctagctgctggttaaagtaaaagtccaaagctcaaaaagctgcttaaaagaaaacacacataacacacaataaaaacccttcagctccaaacgagaagggaaaaggtccttttaagtttctggctgacatgagtattaatttgaatacagggctatattaaaaacctttagcagaaaaacaaacttaaggctaaggaagtgaggaagacacagtttatgtcttattttaaaaaatgcttacctggaacgctctcactttcatcatctaacacatccatgaatgttcctccatcttcatcaacttcagcaaattcttcatcatccatacttcctaaagaaacttcatcgtcatccaggttaccaagttcatcatcactaccttctgaatcttcatctaatgtgttatccttagctccttttgttctctttttcacgtttctggaaaaaaacacaacttgtaatacaagaggaggcagtattttctaaagtagtgttttgctgactactagggcagtaggctattaaatgactcagaaggagaaagctttgcagactgctcagagtaaataataacgtgctttataaatgtcaaagatgaaagtactgtatccacttcccaaacttacttgactacatttcccctttatcatatagttctgtggtctactgttctgagggacaacaatttgggaaatgctagaaaaataggaaggagaagatagaagtatgttacccagcaaaatccatatcatcctttccagagctgaaacagttatcatcttcaaatgtgtctgccagacaatacagaaatgtgagatacaacaaagaatgacaagcttgacatatatcttgtatctgaatcaattattctaagtcatgattctgctgtttatgacaagtgaacaccaaaacaatgtaaatgttactgttgctagtgtgccttaataatgtatacaaacctgtgaaatactgatcttagttaaatcccaaaactaaagaaggatccagttaatttcggctctttctacagttcttttatggaaagaggataaatatcaaataaaatgatatttagcaattgtcgtcctttttactctattagaactacttaagtgctcatttttaataggtgtgatacaatatgtaacatctcatgcttgtaattccagcactttgggaggccgaggtggagtgatcatcagcctgggcaacacggcaagaccctatctctattaaaaaaaaaaaaaaaacaaaaacaacaacaacaaaaaaaaaaacaaaaaaaaaacgagccggacatcatggcatgtacctgtagtcccagctacccgtggggctgaggcaggaaaatcgcctgagcccagaaggtctaggctgcagggctgcagtgagttgggattgtgccactgcactccagcctgggagacagagagagcctgtctcaaaacaaacaaacaaaccccccaaaaaacaacaacaaaaaaatatgtaacgtgaaatcagtgtaagtctttccaatttaccatgttttttgtttaagtctattaagtttcaatcaaaatttctgtagctctgtggattaaagataaaaaagatcaaacagtagactattgctatcaattagtactgatatactataatagattatgaatagtaaaaaggatttctttttcacatgagatttggctgtaacaattgaatagacttaagcaaatataaatgttttcttatatagactatccaaagcacaaatcatgtatttttctggtgcaaatgtgggtgaattaccatatatcataaaaatatttgtttcttttgttttttttttgagacaggatttcactctgtcacccaggctagagtgcagtgccgtaatcttggctcacggcaacctctgactcctggattcaagcgattctcgtgcctctgcttctcgagtagctgggactacaggtgcgtgccaccatgcccagctcattttttggggtttttagtagagacagggtttcaccatattggccaggctggtctcgaactcctgacctcaaacaatcttcctgcctcggcctgccaaagtgctgggattacaggtgtgagccacagcgcctggccccaaatatttcttaatcttccactgtgatttgcatgatattcttagctaagtgattttttaaaactaaggccacttctcccactaatgttccatggtctattaacacatagtagtagattattttacaaagagtcaacaaaacaaattaccaatcagctcttcaaattcttcatcatccacgtcttctatactttcttcatctgcatcccgtttttgtttctctttaacagcaacttttttataatacctataatattcatgttatatatttgacaattttattaaaggtctaatcttactatatatcatcaaagcacctatgaccagtggcaaaccacaactgtaaaatcttaagtatactcaattggaaataaatgactgaaatttgtatctaatatacaaaaaatagtttaactcaataaaaagtagctggaatcttttaagtgtaatacatttcaaagataatattttatcagccctattcttatattagaatacagcaaaacttagccatttacagatgtaatcaaaccctcaaaattattcattctaaatgattttaaaaaacaagccaaatcaaacctaattaaccagtcaaccagatgagataagaggtactttactaccctaaggcattaggttatgatactagttggtttaggacttatttctataacagtgcactgaatccattctaagggccatggtctggataaattacccatgagttatcactatattaaacttaaagtattatattaaaatctatattaaaggtagattttaagcctataaagaaaattattataaaaggaaattaaaggctaaattccaaaaagaagcataaaacaaaatttatatgctaaattaacaaaactcccaaatttactttagttttactaagatatattaagattagcaaaatgacggatttgtaaattttcttaacaaacacagacatatcctttgatcttttcaaaatatgctgattagatttcataaaatgaagcatttaaaactaaggccacttctcccactaatgttccatggtctatttacacacagtagtagattattgaagtagattatttcataaaatgaagcattttatgaaatctaaaaatttaaattttagcagtttccccaaatgaaactatattatgtatagtacctgtggaaaaacacttcatccactggtatttggctttcttcttttgcaaggaactccttactgttcactacaaaaataaatttaaacattttaacttcatatagcaatcccctttatgttactcaagctcttaagacaaaatacagcataatctgtaattctaaaaatctcagaattgtgtgggaaggtagacagaagggactctggagtgcaagggacaatctctgaaaaagtctgtgtgaagacccccccaacatttgaaacttcactggctacagcataaagtaggcagtacatagctgtcagtgccgttacagtgaaacaacagggttctcttactgttcttcatttgcatccaggacccaactttcaagagaaataaaaaattcaaagagttattttaataaataatcactttaaacttgtcattttcagctcaaaaaatgacaagcttgccattaatgcgtgccattctgggaataaacaggaagttaacagagttttcctttatactgaggaaaactaagaaataaggaactacaagaaatcagttttacctcttcagaataaaaattgctgactcatcctgagtaaaaggagatttggcttttaattctaacttactaactgtgggtaagtccttttacatctctggacctctgtgaagtaagtcactggaaattaaatgatctataaggtctaatttaatcctggtctctgaacaaaagggagatgagatctggtatgcaaagaaatgtctgctttgaatacaacaacagactcagatccagaagatggctagcaaatatagaagtaggttattaagtttaaaatgatgctctgtgacaaaaccagctgtgggtttttgtgctgctaagctgatattagagagctttaagatggtctgaattgtaagcaataataattatatacataggggttgtggatgaagctacggatgataaaatggtgacaactgtcaaagctgggtgatggtaatggggagggggttcatcatactattttgtttattttggatatgtttcaaatttgctgtaataaagttaaaaaaaaaaaaaaaaaggcccagtcagatacagtagatttaagaatacctattcttgggaaaaaagatggataatgtctttgatgctcaggttttattctgataaattagaacaaagaataatacaatttatgcatctttgtcttatattgtcttttcagtttcaactgtctaaggtttatacttaccaggaagatgacgaatatccttaataaaatgttttcttttcggctgcatcacaacactatctgtgttttctgaaatgtaaaattatgacagtataatgcaaaacctagttataagctcatattgtttattatgtattaaaaatgaaagccaaataattcactaaatagaagcatacctttgcctttatggggctttggatttcggtatacaaatcgatccaaaaatctcattagagtgaaatcctgcagtgggtcccctgaatactgaatatagtttccctgaaaagtggagcggggatttaaaaacttaattcaaattatgtctatgaatccaagtaagaaaaaggaagaaaaagataatttctattacactgtattgaagatacaaatatgcaataaatgactcttcaaatatctctctcatgcacattatacttaaaaaattaaacacacagatacatatacatacatattctaggatgtaatgttgatttgatggatagactaatattaataatgcaggccatctaaccattaatcaggaaccaaaccctgaagtggcaaacacagcaaatgggaaagtgaggcagtatttctccaggagaggagctagaaggtaataaataaataactgcgtggctttcaatgtcttattgcttccactcatctcagagtgggaaaagttatctgctactctgtatgaaacaagtcactgcttctttatacgagcagtaaaatgtacaagattctctctgttagagaaaacactgtatgaccaattattgattatctaaaatgatactttttttcttatttctcatctttggatttattttagactcacctgaaggatggtctttgcaaaaagggccacggagggatgaaaatgcacagataactaaaaagaaaaatgtgaataatatcaatatttctaaggtcgactcttagtacatttatagcttatttaagaaaatcgggctgggtgtggtggctcacacctgtaattccagcactttgggaggctcaggcaggcagattgcttgagcccagaagttgagactggcctgggcaatatggcgaaaccccatgtctacaaaaagtacaaaaatagtcagggtgtgatggtgcgcgcgtgcctgtactcccagctactcaggaggctaaagtgggaggactgcctgggcccaggaggtcgaggctgcagtgagctgacatggcaccactgcactccagcctgggtgacagagtgagaccctatttcaacaacaacaaaaatgaaaatgcaaaaatttgaaatttaagccaatacattaaaaaagtgattctcaaaacatattggtctcaggaccatttcctacacttaaaaaccaaaaattccatcagtttctattcaacaggtttatatctacagacacctatgttataaaaataaacagaaaaattgtaaatacttataggtccattaaaaataacaataaagcggccaggcgcggtggctcatgcctgtaatcccagcaccttgggaggctgaggtgggcggatcacgaggtcaggagatcgagaccatcctggctaacatggtgaaaccccatctctactaaaaatacaaaaaattagccgggcgtggtggcgggtgcctgtagtcccagctactcgggaggctgaggcaggagaatggtgtgaacctgggaggcggaacttggagtgagccgagatcgcgccactgcactctggcctaggcaacagagcaagactctgtctcaaaaaaaaaaaacaaaaaacaaaaacaaaaaccataaagctactacatactagtaagtagcatatttatgaaaaataattatgcagccaggcgaggtggctcatgcctgtaatcccagcattttgggaggccgaggcgggcggatcacgaggtcaggagatcgagaccatcctggctaacacggtgaaaccccgtctctactaaaaatacaaaaaattagccaggcgtggcggtgtgcgcctgtagtctcagctactcgggaggctgaggcaggaggatggtgtgaacccgggaggcggagcttgcagtgagctgagatcgcaccaccgcactccagcctgggcgacagagcaagactctgcctcaaaaaaaaaaagaaaaaagaaaaaaagaaaaataattatgcttcaggacgaaatatatagcgagtagtattactttacagttttgcaaatctctttaatgtctggcttaacagaagagagtggattatttcatctgcttctgtattccacgttgaaacatacaatctggcctcatgtgtagaaaatagtctttcacatagctgtgaattttcttctttagtactataccaaaaccaaagattagttgtaatatggaatctgaaacccatattcaattggcttttggtacttgctacttaaaattatttggtctactttgaatcaatcatttattcactcaagaatttgtaacattcaggtggcacagtggctcatgcctgtaatcccagcactttgggaggctgaggtaggtggatcacctgaagtcaggagttcgagaccagcctggacaacatggcaaaacactgtctgtgctaaaaataaaaaaattagctgggcatggtggcatgctcctgtaatcccagctactcaggaggtagaggttgcagtgagccgagatcgcgccactgcattccagtatgggtgacagaaccttctcgtttcaaaaaaaagaatttgtaacattgtgcattggtcattggaaaaataccatatgcagtccttccaaacactggcacatttcgttatactttaccacaacaatcacattgttagaaccactgatttcatcagaaaagttttacaaattgagaaactgtcaagctcaaggtggtggttacaagatttttaaaactttaatctttgctcgaaagctttatttttgaattttattgctgacaacaaatactgccagcttttttgtttcattcattttcaagaaaatatctcccaaatacctaagcctgaataaccagtttgtcagtctttcatgaaagagcagctagatgagcttgcaacaactggtaagcacttgtccttgagacacgtgacaaccttcatgctttaggtaggcagcacaggtatgttacgcatacttgctatgtatgcacacgaaatactaaaaagacatgttactttaaggtcaagacactaaaatcagtaattctccctgtgtcatcattcttaagtcatactggcttttttttttttaactgcacatatgtggcagtgatgaatataatggcttctgatgcagcttggtgctgtctttattcaggataagctgcagcagttttacctatcatttcttttatagtatcagtgccaccgtcaacacagtgatgaaaacaaataatgtactggtattactatggaaagagctgtgacctggccgactcactaaaaaggtatcaggaactcttagtggtctggccgcactttgagaatagctgcataagatacttactggctttacacaaaaagtcacagaaaggttattaaaaatatgaattcctcttacaaattcagaaaagtaactttacttgcaaaaaattttatcataaaacttttcagaggtatctaataaataaagcaaaatttatccattttctcaactctatatgcaataatctacctacaaaaagcaacagtcataacccatgcatgacatccttattttacgtgcacacttaagattttctacaaaatgaacacttcacatagtatcttcccccaaatgtggacttttaatgtttattaatgcttataattatcataaaaaaacaaaaacttcaaggcattacatcctcaagggcaaaaatatacagcataggccgggcgcagtggctcatgcctgtaatcccagcactttgggaggctgaggcaggcggatcacaaggtcaggagatcaagaccatcctggccaacatggtgaaaccccgtctctactaaaaatacaaaaattagctgggcgtggtggtgggcgcctgtaatcccagctacttgggaggctgagccaggagaatggcttgaacccggaaggcggacgttacagtgagccacaatcatgccactgcactccagcctggtgacagaggaagactctgtctcaaaaaaaaaaaaaatatatatatatatatatagcataaatgaataaaagacaatttgaaattattttacctttttgagttcccaaagacttgtattttcagctccacagaacagagggtttctactgaatggatcgtatttatttaactgtttcccacctaggaataacaaaaaaaatacgatttctcaaatgctttcttcctagcccaagaggtcattaaaagcaccaccattaatattctcaacagatatctccaacattcttacttagccaagcaacctagattaaaaactctgagctccctcaagaatttgtcttggtacttaagctagcatctgctcttgaataaagcagagaacatgtttatcccaaacaccaaaagctttcttcaaggccaggtgcagtggctcacacctgtaatcacagcacttagggaggctgaggcgagtggatcatttgagttcaggagttcgagaccagcctgggcaaaatggtgaaaccccatctcttacaaaaaatacaacaaaaaaactagccaggtgtggtggtgtgtgcctgtagtcccagctattcgggagactgaggtgggaggatcacttgagcccaggagatgggagttgcagtgaaccaagatcgtgccattgtgatccagccttcctgacagagcaagaccctgactcaaaaataagtaagtaaaagctcccttcaaaacttctcctttggctgggcacaatggctcatgcctataatcccagcactttgggaggccaaggtggaaaggctgcttgagaccaagagctcgagaccagccggtgcacagagtgggatttcgtctctacaaaaaacacaactagccatacctggtggcacgagcctgtagtcccggctacctgggaggctgaggtgggaggatcgcttgagttcaggagtttgaggctgcagtgagccataatggcccactgtactccagcctggcctgggtgacatagtgagaccctgtctcaaaaaaaacaaaaaccaaaccaaaaaaccccaaacttctccctttcctaaatggcaacaaaaggtgcccattttggggccaaagaggtggaaacgttaagatggaaataatctgaagatgaactaggtctaaagtcttttggagctttagagtgcttcaaatatttgtcatgaaagtatgcccagaaataattctcacttggaacaggtctgacattatcttcatgtttttagaaactcaggattaaaaaaatttaaaacaaagatttttcagaacaaactaggaactgactaccttccaacacacaagctcttcatccttctaaaggattattctcagtttagtcttcaggggaactgatggattcttctcaaacttttctggcagctatcagacttctcttttgtacttcacaaactgaaatttgtagatgaattaatttgactgtgagtcccaaagcaagctgaagaaatgggtctggcaccacatttctcgaacctcaaggctggtgttttcttcacagcctcaaatgaaggggctgcatttctaagatttttttttgactctaacattctattaatagacttttaatttagtttggtgtgtgtatagaaaaccacttaacgtttctatcttgaacagaaagttttctatccctaaaacattactttaagaaactgtgggccaggtacagtggctcacgcctgtaatcccagcactttgggaggctgaggcaggcagatcacctgaggtcaggagtttgagaccagcctggcgaacatggtgaaactccacctctactaaaaatacaaaaattagccaggtgtggtggcacatgcctgtaatcccagctacttgggaggttgaggcaggagaatcacttgaacctgggaggcggaggttgcagtgagccgagatcacgcctctgcattccagcctgggcaacagagtgagactctgtctaaataaataaataagtaaataaaatggtagaatgctattttctatgaaaatcaaagagaaacaaactccctagagaataaagatgaaaaaaactcacctttcaaattatcaaagtgcacccaggaagcaacctctggttttttggtttctacatcagtttcaggaactgtttcctctgtctcaagttttttcactatctctgtttctttgtctgcatcagtgaatttttccatgtcttcatcatcatttgcatcaataaaattttcttcatcatcagactcctaacaaaagtatagtttcataaatctacataaatcaactggaagttgcaataaagtctgtgctccattatgtgatgcagagttttacttattgcaactctggtgaaacgtgaaagttctaataaagtaaaatgatggctatcaatggtatttaaacaagagaggagattacatccttatttctaaacataacacagttaagttttgagctaagaacccctgagccttaaggactctaatacttgaaaacaattagccctcaagtaaatttctgacttgtaaataaccctatgaggtaggtactattatttccatttcattgttaaggaagaagacttaagaggtctactaagttttatagtcttccaaatctcatataatggtagcttctagtatagtacagtttattgcaagtagaagagttgagcaacatgcccacctagtaaactgtacagctggtactaaaatctaggtttgtcctattccagaactcacactcatatgctccagagaactaggttactgtcatttgaagcaaagaaaaacaaaacaaaaaccaatatatttcagcacccactcaatttaaaaagcagttgtaaaatataccggatgatcatctagttggcttcttaaacctggttttgctttaaggatctcagacacaagatataaagctccacatataaatggtggcatctgttgacaagtaacttgaagtaacctcttcacaaaagccttcacccggcgcaacacaatgtcagctttcagagatttgtagacaaggttaagaaacatagcttgcttggaacacgtcatcaaccctggatccaacatcttcctgcaaaacaaaaccaaggtcaaatatttatgtataaaaccatctccacaaccaatggtcacatattagaaatagctactaacctcatcttagttagggataactttgctgcttattttagaacaagagaccctgccctaagaggtaagatggaagtcaatgaccagaaaaggatgatgatggcaccaggaaaaaccaacagcaacagacacaggaataggcatttttgagtgtgtggttttcttgtcttttccaagtgtttttctgttttctatatcaacagggcacagccctaacagtatttacagaaccccaccagaaaagctaatctaaaaccagatagtgaaaactgacccatgaaagcagaacattagaagatttgggtttttgtccttgtataactacctactagcagggggaccagaggccgcctcttcatgattttagtgaagaccatcgatgaacagcagaaaattaaattctaaggacttcagagaatctctagtccaatgtactagctgtgtaacattcctctcatacacgctattttcactgcccagagtgcttctctccaactctctgcatgtccacagtatccaaaattggttcttctattagtctctcagtcccatgtttgtgttcttcatagtttcacaaacttgattttcctgcctttccctcttctctaaaggtccaatgaaatagggattatgcctgttattcactgttgtaaccccagtgcctggcagttaatacctttacatgacagttttccaaatacttgaacctatttagctattatgtgcttgtctctccctaatgtctgtcttctgtaggctgctctactttgatctcatgatactttaaaaattctctatcctaggtgctgaatcctacacatgtccccaaccggtctagacctgcagatattaggacacccagaattaacacaatcctccagattagctctattaacacctggaatcattacttcctttgttttaagcatttccattaattttttcctactaacactagaaatgaaaaatacttaagcttgtgaagcactttcctattgctctgaatactctgggaaatatcacccttttggtaatattctgggatattctggattattcaattttctctctttacatttaaattttccctctttacatttaaattttccaacatttccatccattttgcaatttattattaggcataaattacatctcacatcaacagaaacatctgagaagaatttagagacatgtctctatcatttcatgaaatattttcctaatgttttgataaatatttttgtaaaccaaatcatgtcatttcttttatccctcaattaactaggggttttcttaatgtgaaggattcctaataaaaccaagagcaaacaaacactttaagaaggcctaaaggcctgttaagaaactccatctgtgagcgcttttggcaaatagtaatttcaaaaacttaaaaatccacccttcctcagagatgttagactatgatgttaaatagagacagaaaaatgttttctaatagatttcaaacactttctaaaaatcaaaaattcctatgaccatcaaaagttcaaaataatgaaaccaccccccttcaaaacaaacaaacaaacaaacaaacaaacaaactaacaaaaacaaaactcaagatcccgaaacctctacattttcagccttggaactcttttcaaattaacagtgttaagttatctattacttcaaagagttgtggaaaggcttctgagtctttttagtggaccagagcaatcagtgctatgaaatgtcatgaaatctacagcaagtggacctggacttgccacctaacttggtctcttaatatctgtgtgaccttgcccaaattattgtatctcacagtgtggggaaaaggaagagagatcagattgttactgtgtctgtgtagaaagaagtagacataggagactccattttgttatgtactaagaaaaattcttctgccttgagattctgttaatctataaccttacccccaaccccgtgctctctgaaacatgtgctgtgtccactcagagttgaatggattaagggcggtgcaagatgtgctttgttaaacagatgcttgaaggcagcatgctccttaagagtcatcaccactccctaatctcaagtacccagggacacaaaaactgcggaaggccgcagggacctctgcctaggaaagccaggtattgtccaaggtttctccccatgtgatagtctgaaatatggcctcgtgggaagggaaagacctgaccgtcccccagcccgacacccgtaaagggtctgtgctgaggaggattagtaaaagaggaaggaatgcctcttgcagttgagacaagaggaaggcatctgtctcctgcctgtccctgggcaatggaatgtctcggtataaaacccgattgtatgctccatctactgagatagggaaaaaccgccttagggctggaggtgggacctgtgggcagcaatactgctttgtaaagcattgagatgtttatgtgtatgcatatctaaaagcacagcacttaatcctttacattgtctatgatgcaaagacctttgttcacgtgtttgtctgctgaccctctccccacaattgtcttgtgaccctgacacatccccctcttcgagaaacaccgacagatgatcaataaatactaagggaactcagaggctggcgggatcctccatatgctgaacgctggttccccggttccccttatttctttctctatactttgtctctgtgtctttttcttttccaaatctctcgtcccaccttacgagaaacacccacaggtgtgtaggggcaacccacccctacatcacagactggagagctgttaagaggattaaactaaagaaacatggatgactatcagtaataaggatagccgccaacatttcacatagcactaagtgttaggcactgttaagcacttaatatacatagaaagattacatgggttaacacacataacctcccaaccttcattaaagccccagttctgtcatttacaagctgtagaaccttgtgcaagtttcaaaatcttcataataatcatatgagatagctgcttttctctccatcctacagacaaatccacttaagcatgataacatgggatgaattatgtctaccaataggtttttagtggggatcaagtaatttgcccaaaattacacagaaaactaatggcagggactcaaacccaggcggcgtggcttaagtctaagatacgaaccactactccacattttctcacaagatatatctatgtaaaaatataaaaatgaatcagaaggaaatatattaatttcttgaacacagttgctatgttcgactgtctcttaaacagctccaaactgtttacacattgctgaaaatatgatgcctcaatgggtgagttgcaaaattcagtaaagaaaatcttcatctccattaaaaaacaacaacaaaaaaaaccctgcaccctgcatcccccaaaactctctacttaacatactttgtttaccaccgctcccctctctgccacctcctccaatatgaatgtgagcgcctccaggggtgggatttctgttcgctgtgcctcctgtgcacctagagcatggcaccatactgcaggcactcagaaaatacttgttgaatgagttactgtgtgaatgcattcaactgtgtgaaagacagcagggaaaagatagaggactgaggagaatgggaagacggaaactgcaattatatctgcaattttatttctttaatatcccaaaagatttaaaacaaatatagcaaaatgttaattctgaaatactaggtggtagatatgaatgaatcttttgggtatttttctgtattttacaacctctcaaaatgaaaaatgtattcaaagcatctaatataatttgtgcccatcagggaaacaaagattaagtgacttacttgaaggtggcgagtagcaagctgctgagggggcctaaaaccaaattttctaactctttttcttgccccacagagggcactgcttgtgctgtactacatcaagttattatttcatgtctcatattggaagggtatgttcttacctgtataatgctgtgtaatatcgatccgatattgtctgctgagaattcattacttggaaaagcaacattaaagcctggacactggtattaaaattcacaatatgcaacactttaaacagtgtgtcaatctgctcccttactttgtcatcaccagtctgggaataagggtatgccctattcacacctgttaaaagggcgctaagcatttttgattcaacatctttttttttgacacaagtccgaaaaaagcaaaagtaaacagttattaatttgttagccaattcactttcttcatgggacagagccatttgatttaaaaagcaaattgcataatattgagctttggagctgatatttgagcggaagagtagcctttctacttcaccagacacaactcctttcatattgggatgtttacaaagtaatgtctctaacagatgggatgcttttgtggcaattctgttctgaggatctcccagtttatttaccacttgcacaagaagagccttttcttcctcaggcttgttacaaagcagctcatgagccacggtaagggctcgagttttagtggttactaatgtatcatgacttaaagtttctaagacctgcacaaattcagccactaagtgtttcagctggtgttcaaaataccataatatcagtcttctatctcttgagtccttgttgccactggacaactgttccagtttgtcaaaaggacgctggctgaaaatcctcagcttccgattgtctggcaaaaggtctgtgataagcaactctttgaaagtatccaaggccataaggcactgctgtttgctgcccttctttttaacaaggttcacaagagtttctacaaactgaagtgtgtgaacggcatcatcctgaataagaagaatcatggctgccatcctgtcacctagtgtccccgatgacacaattgccttcatccaggtagaagaggctcccttttgactattcgtcttacttttgaataagttgatttcatgctgatacagcttctgagcaagggttttgtacttagatacaacatcctgaggctggggtttcaaagaatattcattgctgtactccagatcataccatttgcctccaggcctaagtaacaaagtctgtctctcaaaaaattcaaagatgttctgtttatctttctttactttcggtgtggtactgccattctcatcagaatgtggttctggcctattcttatttttcaccttattaactgatgtcctttgactttctgctgtatttttattatttattttaggtatttttacttcttttttgctggaattttctttttcagctggttcatcttcttcaactaaggaagcttttgtatacttcgccaaattaagattttgaataaatgcttccaattcaccttgctgaaggtcatcgattgctccttttttgcctccatctatcacttcctcattctcatccaaagtagccagcataaggtaatcttgctgcattaaaaacataagttaaaaatacattacaaatgtgaaaaataaaaccataaaataataggaaacacaacataattttaaaaataatttcggaactggaaaaatcctttcaaatttgacataaaactcagggtccacaaaggaaaggataagtaaatttctctttctctctctttcttttacacacacacacacgcacacacactttttatttcgatataggaaaaaaatataaattataaactggaaaaaaaatacaagcaattcctatcaaagtaattgggtttaatcccttaatataagtttctacacatcagtaagtgacaacccaaaagaaaaatgtgcaaaggacatgaacagttcatagaaaaaaagggttctttaagaatatgaaaagatgttcaacctcactgaggtttagacaaatccacattaaaaccacaatgatacatccatcttttaatttatcagatgagcaaagatacactgcaagatgagcaagatacaatgacaggtgatgctggggaaggggtggcggaaacggcactttcatacatggttgatgtgagtgtaaactgacacaacctccatggaggacaatttgtcaactccaatcacaactatttaatacaaggcacacatctgttggcccagcagcttcatttctaaaaattaactaactgattgagacatggtctcgctctgttgtccaggcttgagtacagtggcatgaccatggctgaactgcagcctcaacctcccaggctgaagtgatcctccaacctcagcctgtagctggcactacacgcccagctatttaaaaaaaaaatttttttttgagatgaggtctccttatgttgcccaggctggtctcaaactcctggactcaaggtatcctcccacctctgactcccaaagtgctgggattatgggtgtgagccactgtgcctggctcatttctacaaatttatactacatatacacttacaaaagtgggggaaaaacacgattaaggttattaactgtagtattatttaaaatagtgaaagactggcaataatttaaatattcacaataaatggctggttagataaattaagacagacaaaatgatttatgcagccatagcaatgacacagaacgttatgcactgatatagaaggatttctaagacagaaaagaaagcaaaatgtagagataggtgtatatatatggtaccatttatgtaaaaaagatacacccgtatttcatacacataaatgagtatgtatatgcttgaaaaggtatatagtatccctgaaagatataaaatgcagttgtaaaaataattgcttcctatcagggcaatggttatggctgagataaaagtggaaacaatttgacttcactatgtatcttttaaagtttgcaccacgtgtttcatgtgtatatattacctattcaaaacttaaatatacacaagcacagagcaaactgtgaatctgcctatctctaactaactcctccaccttgaaagtccagtctccaaacaaaataatattaaaaacaaagttaatttctgttccttatctgcttaaaatcttccagtggttttgcatcaaactcagagcaaaagcctgccctctgacccctcggccctcctttcttactattctccccttaactcactctgcctctgctacactggcattttggctgctcatggaataggttaggcactcttctgcctgtctttgcatttgctgttccaactgactggaatggcagctcactccttcctgtcctttaggattctgctcaaacatttccgtgatgtgtttgtcgatcatctcatttaatactaacgcgctcccactccttatcgtccttccttgttttattttcttttatagcactaccccgcgtctgctgtactatgtgtttaaaagtttgtttactgtttctctcccttaattaggatgctccaaaaaagagggcttctggggcatacagtgacacgtgcatgtactctatgagaacagaaatgaaaattccaataccactggtgttcaaaacactcataccacaaggtcaggaccaagaaaagccactctccgacctgatggtgtgatggttataccacgtcaataaaatcagaagatcgcctacatcctaagaatagccagagaatacaacgttcaattcgaaacttttcttttgtaaacagcagtggaaaccggcgtgggaagcgcaccgaacacatgcttcagaggctgggatctcggtcctggacgcccgcgctctacgcagcgcggaagcggcggggcagtcagcctagccaccttcggaactctccacgcctgatcccgttccccggagcccgcggccgttaccttggtgcctccgagccgtaacacttcctccagggagaacccattctcggcttcactagtattatcctcatcctcctcgtccggatcttctactgcctcctcggggcgccaaggccgcttggcatggaactccaaaggctccttgactgcggccatggcgggcaaagcatacgcgcgtgaaactc

SEQ ID NO: 7192 - DNA, 10500 bp, Homo sapiens
agctagcctgcgaatttcagcatgagtgtactgctgaggtcaggtttggggccgttgtgtgccgtggcgcgcgcaggtaagcgtcagtcccctcgaagcccggttgccgtggaagccgcgtggggcgccttcctcagctcttcagttgagggtaccgggggatcaagggctcgggggctcacttccaccttgaaggtaccctgggctggaaacgggtccggtacaaacgcaatagggctgcgtagtcgtgggcaagtgggtgctgtctctgcgccccgtgggcgtgctaagcacagtagcccgcggtctgcggtggggcgaggttaagggttcacgaagctgttttgaaaacgctcaggcggcttgcgctcgtgaatggtcagatttatcatggggtctgtttaatttgtgtttttcgcagccattccttttatttggagagggaaatacttcagctccgggaatgagcctgcagaaaacccggtgacgccgatgctgcggcatcttatgtacaaaataaagtctactggtcccatcactgtggccgagtacatgaaggaggtgttgactaatccagccaaggtatgggtcgggtagcccgaggactaggccctctctagccgatttgcgaggtgcaagccaggagggagaagcccgaaggttctcagcccaggcagtgggggtgcctgccaggggaagagccatttctgaggacctggggacagataatttgtcagttggtcagggctggctcacgtcagaggcagtgccagtaaagaggagaggacacggtccaagggtgtttaggagacagaatgtagctgattggatttatgatgcgggaaggatgactttcctacttggctgatggtgggtggtgtggattcattgctttgggagaaggaatacgggaggaaggatggagagttcaggctggtatatgaatttgaagtgtgtgggactcttaggtagaaatctccaacaggcagctggaaataggaattactgcctggaaagtcgtctgtgttggaatggcttcagctggcattggagacatgtgctgggttttctcacatgtgcagttgagaatgcagtctgggtcgtcttcactgttctaggattaggcacagtcacagctttctgacccacgtttccttgtctgttctacagagccatttggtgaaagcctatagtcctttattttagaatatttcatcttttgctgggttgaaatatgacctctgtggaattctggggttagattggccattgttgttggatatggtagtgtgactctagtgtcgaggtttacccaaggccggtatctttctttcgatgccggttaggcagggctgcaagataggtggcttagactagtgtggtggtactagaaatagaagagggtgatttagaaagggactgacaggatttgccgatggattgagtgatggaacggaggaatcaaggctgattcgtacttttagcttgagcagttgggtgatgatggtaccttttattgagattaagacagacaggaccaggtttggaggagtactagggagagggcctacaccaggagctgcattttatacatattttgttagcagtgacatgcaggtggagatagaaagtaggcaattcgctgtaagagtctggcgttcagggccggacgtggcggctcacgcctgtaatcccagcactttgggaggccaaggcgggtggatcacgaggtcaggagtttgagaccagcctgaccaacttggtgaaaccccgtctctattaaaaatacaaaaattagccgggcgtggtggcttgtgcctgtaatcccagctagtcaggaggcaggagaatcgcttgaacccgggacgcagaggttgcagtgagcctagatttcgccattgcactccagcctgggcaacagagcgagactctgtctcaaaaaaaaaaaaaaaaaaagtgagcctggtgttcagaagaaagactgggcaggcatatatacatttgctcgtcatcagcatataggtcatatttaaagccaaggaaccagggagaacatactgagagaaaggaaggtttcccagcattgagagtaggggtaactctaaaatgtagaggctcttaacctagggaccctttaatagaaatcaggggtttcatgaagctggatggaaaaaatattatacctttattttcactaactttcaactgaaatttagcatttcttcaattatgaacatacgcagcaactagtagcatcagcaatacctgtgactttgtcatctgtggaaatcattggtatttccttatcacaatacagtgatcacaggcatctcaggatttcatcgtgctcatccttacttcaaaattttgttaattattgggtctttggcttgattatgggcttttttgtttgttggctttttgagatagagtctcattctgtcacccaggctggagtgcagtagtgcaatcttggctcactgcaacctccaccttcaaggttcaaaggattcttgtgcctcagcctcccgagtagttgggattacaggtgtatgtttccatgcccagctaggttttttgtattttcaatggagatcgggttttgccttgttggccaggctggtcttgaactcctggcctcatatgatccgcctgtctcagcctcctaaagtgttgggattacaggtgtgagccactgtgcgcggcctaattatatttttttaatacactagtaaagaagtgtatatatcacattttttagaacatttgatacacatttttcagttatttctttgtggttctgtgcatttaaaaacactctgtgaaggggtctataggcatcactgggctaccacagtggttcataacacaaaaaagcgtaaataccccaataatgtttccttatgaacggaactagaaagcctagaagaagagatgtgtggattgaaaaaatgttctcaaaaatgggagtgacttgatttattttgaatgctgaagggggaaagttgaagctggaagagagaaggggacagctaaaaggactcaggggagttgtatgaggaatggtccagagcacaggcggagggattaggtttggatgagaggagaaggggaaggcatttcattcttggagtccccagattaggttagaggccaggtggggatgggaagctgaggaattcgtattttataacattctttaattctggagtgagactggggcccatgtcacctgtagtaaggtggtagaataggagcttgagaagcataagaaatatttaactcaattcttgagtgtttcttgaaggttaggcatcgtgctaaaacttgggatatgaagataaataaggcatgatcttctgcaaacaactatactttgtggtgaagaacagagacaaattagctcagaaaaggtggcactggatttggccttaggttggagggctggaggaggtcagctaggtggcatttgagcagattcggaggttgagtataagactgccagggaaagttgaaaagggagaagggtgaggatttgcagtggcatggatgtctggacaagcaaggctaataagaaaaaaaaaaacaaccctttttctggagatataatattcatatagaaaagttcataaaccacaagtttacagctcaatgaattttcacaaagcaaatgctcccatgtaaccagcacccaaatcaagaaacagaacatcaccagcaggcagggcccatatgtgaggcagaaagtgttagaatttggagaggaggctggaggagtaggcagggtcttgctgtgttgggtgtgggagctgggaggggaggaagggtctggcgtgcagagatggacgttacatgacttctgcctttacggtcaaggtgtaattgtttttctaccggttttgtaaaatgactgttactttgtaaaatttgggtaaagacaccatatttcccttgcttatttatttatttatttatttatttattttttgagatggagtctcactttgtcacctaggctggagtgcagtggcgcgatctcggcttactgcaagctctgcctccgaggttcacgccattttcctgcctcagcctcccaaatagctgggactacgggcaccctccaccatgcccggctaatttttttgtattgtttttagtagagatggggtttcaccatgttaggcaggatggtctcaatctcctgacttcgtgatccacccgtctcggcctcccaaagtgctgggattacaggcatgagccaccacacctggctccccttgcttatttagaggagagaactttcttactaaataattatttcacttttacattatttaagattttggaggggtatttttaaaaggcttatttgaaaattaattttgtttctctattttctctttttactcagggttattatgtgtaccgtgacatgctaggcgaaaaaggagatttcattacttcacctgaaataagtcaaatctttggggaggtaatatactatgtaaagtatgaatgaagctaatataaacatttgagagcagatcaaattgtattattctgtagtagtgttctacagctttttttgtgattcatcaaaagttttaactttatagtagtttatgtactgagggaatagagaggcagtagaggggagtaaaatggtagagagaatatttgaaaagtttatactccactgtaggaagggaaatggagagataagagggacaaagagaaagagaaggaaaggagggggtcataaagaggacagaaaaaggagaatcagatgaaggaagagaatggaagaaggggccaggcgtagtggctcacacctgtaatcccagcactttgggaggccgaggcaggcggatcacaaggtcaggagatcaagaccgtcctggctaacacggtgaaacgcagtctctactaaaaaaaaaatacaaaaaattagccgagcgtggtggcggtcgcctgtagtcccagctacttgggaggctgaggcaggagaatggcgtgaacccgggaggcggagcttgcagtgagccaagatggcgccactgcactccagcctcggcgactgagcaaaactccgtctcaaaaaaaaaaaaagagaatggaagaaggaagagagacaaaaggaaaggcgaggaaagaggtagagtgcccaggagagtgcccgggaaggaagagagaaaagataaagagcattgaagaattagtggaattaagagaagctctaaagctcccagtcatgattttagccgtacttacagtaaaagtcttcttttatttatctattttttgagccagggttttgctcttattgcccaggctggagtgtagtggcgcaatctcggctcactgtaacctctgcttcccgggttcaagcgattctcctgcctcagcctcccgagtagctgggattacaggcatgtgccaccactcctggctaattttgtatttttagtagagacagagtttctccatgttggtcaggctggtcttgaactcccgacctcaggtggtccacccgcctcagcctcccaaagtgctgggattataggcgtgagccaccacgcccagccaagtcttcctttaataaacagaattctaattcatttccactaagtaccttctatgaatttagaaataggaaatagtgtatacgaggaagtagaatgtgcgtatcgaaaaacattagttattataagaatcatgtaattgtttaaatcatatgaatatgaagaaatggcataatcacatttcatatgtttatttgctttcaaatactaatacctttctgctagtgatatcctcttatctatgtcatgggaccttttatagcagaggctgccttattttttcctattaatcttcctaaatggtgtatgttatgatgtagtcccaggaagttcctatgtgaacatgtacgtatgtattgaacaacatacatatggctgtacacattttgctttttggcatatagtgcatatttatgtgaaattttatattgtggtatacttttatactttataatactttaatatgtgttttttttttcccttttcacagctactaggtatatggttcattagtgaatggatggccactggaaaaagcacagctttccagctggtggaactgggcccaggtaggggaaccctcgtgggagatattttgagggtaggtaataaaagaatgtcttctagtctcatataagtgaattttagtacttctgagtgtgcaaaccatgttgatttcattggttttcagttccttaatttcatatttctcagctaaaatataatgtcagaataatgtaatcagtcattacttactgttgtctgtaaacttaaaaattggaggggagggggagaatatgaaagctaaaaataggaaacatttagaagacattatgggagagtgtatttgtttcctcaggaaggaaagttgttaattatattaaaagtttaggccaggcatggtggctcaatcctagcactttgagaggccaaggtgggcagatcacaaggtcaggagttcgagaccagcctgaccaacatagtgaaaccccgtctctagtaaaaatacaaaaattagctgggcatggtggtgtgcatctgtaatccagctactcaggaggctgaggcagggaatcgcttgaacccaggaggcagaggttgcagtgattgctgcagtgattgattgcagagctgagattgcgccattgcactccagcctggtgacagagcgagactccgtctcaaaaaaaaaaaaaagtttaggctgggcaaagtggctcatgcctgtaatcgtagcactttggggggccaaggtgggaggattgcttgaggccaagagttcaagaccaacctggccaacaaagcaagacctcgtctctttttatattaaaaaaaaaaaaagcagaaggcataaagcaaaagattaatatttcatttcttacattaaaattaaaaacttcttgctctacaaataaactagcagctttttgttcttcagagaccccattaagagagtgattagacaagccacagagtgggagaagttatttgtaacacgtaaccaacagagaactagtagttagaattatttaaataactcctttaggtcagtaagaagacagataacttgagaaaaatcaggccaaagatgtgaacaagtccattcataaaagaggaaaatacaaacggctaaaaaagcaaaaaaaaaaaaaaaaagattagtcacattggtagtcaggaagatgaaaattaaaatcacaatgagatactactgtaacccttgccagattagaaaaaaaagctaaaagtctgtcaacaccaagtattggtgaagatgtggatttgtggatcaatggcaactctcatatactgcttgtaaaactataatttagtacatccttttttctttctcttttttttttttttttttgagacacagtctcactttgtcactcaggctggagtgcagtggtacgatcttggctcactgcaacctctgcctcccaggttcaggcgattcttgtccctcagcctcttgagtagcagggataataggcgtggatcactacacccggctaatttttttatttttagtagagaaggggttttaccatgctggccaggctgatcttgaactcttggcttgaagtggtccgcctgcctcggcctcccagagtgctgggattacaggcatgagcccccgtacccagccttgtacaacctttttgaaaagctattggccattatctattaacatcaaagtttcttatattgtatgacccagcaattttactgctagtgatataccctagagaaactagtgtatatgtgtaccaggagacacatacaagaagatagcagcattgtataaaatagcggaaaataacagcacaaatgcccatcggggggtaaatgaatcagttaattgtggtatagtcatacagtggaatacgaagtactgcaagaatgcgtgaaatcacagtggaatataacagtgttcaacatgaaacaagatgtgtgaaagtagcagtttgcaagagttcgtatcatatgattgtatttatataaaatccaaaaaatagtcaacattaaacaatatgtatttggtgataaaaatatatttagtaacatttataaagaaaagtcagggtgttattaactcaagattcagaatggtggtgacttccaagggtagagggagtccacaggggctttggagataaggtcatgtcccatttatggtagatattctctcttgtatcattgtttctatcagtctacgtactattttatgaaaacattaaaaaggaggacagttgtttatagtacctgataagtaatagtatttattaaacttttgtagtttttagtattttggaactcattagtgtttttgagtttattttatatgtacttgacaattcaatgtaaaaaacaaacatggctgggcgcagtggcccatgcctgtaatcgcagcactttgggagttcgaggctcccaaagttcaagatcagcttgggcaatacggtgaaactccatctctacaaaaaatacaaaaattacccagtcgtggtagcatgcgtctgtggtcgaagctagttgaggggctgagatgggaggattgcttgagcccaggaggttgaggctgcagtgagctgtgattatgcctctgagtaacaaagtgagaccctgtctcaaaaaaaaaaccaaaaaacaccaacacatactcaatataaatttaaatttcttgatgctttatggtttttgctttaaattagaaattaaaggatttaaaaaatatataaaatatataaacatatgacaaataagaatcttgattatttgggtgaagaaagaaaacaaaatcacgaatttaaatttccagggctctattttatgtttttcagcaaggtcatttgaatataaaatatttaataaggacctcaaatcatattctcttgttcaagtactttaaaagttgattccagagcccttaaaatgtatgaaggatgcttttccagactgagtcataagaagtcctaaaagccaaagaatttaaagggttgtaaagcaaatagccagagaagtgtcagacctgttttatttttgatgttaccttctgaaggaatttctcctgggaagtttttccatttgtatttcgatctcaaaactaaatttggaaaaatcatcttgttcatattatcagtctggatgtgcatattcatatctcaaaagtattaattggaggcagatcaccagtagaaattaaattcaaatgaaaaataatgttgatacactttatgcttttgctattgattttttagccttaaaagattggtaaaatattagtattttcctttttcccttgcatgtttacaacagtgaaaaaatgtgtagctaaatatagattgaaaatgtggcagacccccgagttaagcagtcaggttttcagtaccattcagatttggttctttgaggttagagttctcatcatctcaaagatgagattacttcctagacctagagatgttatcaaatcaaggctgtgtacattttatttccttggtctttttttagactccataatctgaatcattgtttttatcagatgccaaatcttttattttcatttgttaatcataatttatcattaggaaaccaaattgtgcattgttcatttcttatttagattatgcttaataactagtaggttaggattcttatagactgctggagagtggcttgggtaaggaacacatctctctgaaatattacctctattgtgacatgactaaatcattgatgtaaatgattaggaaacttaaaacctacttaacacattgtatttttttttcttcttttggtatttaggtgttcactcaacttggatctgtgctgaaaaattgtgacatttcagtacatctggtagaggtaagccaaaaattaagtgagattcaagcattgacactgactaaagagaaggtcccgttagagcgaaatgctggatccccagtgtatatgaaaggtgtcactaagtctgggattccaatttcctggtaccgagatctgcacgatgttccaaaaggtaattacctttatgtggattaatgaaagaattttgatcacaaccctcacagtattgatgggactgtaactttttacagcaatataatagattgagttactgctgccaagtcccttatccatagagagtagcctacttttttctagaaaagagcatcttaatagaaaataaagttgcctgacattaagtagtagtttatttcatgaagctttgtaaaatcccaaacaaaatgtaaatctcctttgtacttttgagtatttccctatagctagggttgtaccgatgacggagcagcccaaggcagctggggctgatggaagcagtgttagtaggtgggtttagttcagttatagagtcttttaaaaaatccttacttgcctaaagacaagcaag

SEQ ID NO: 7193 - DNA, 141 bp, Homo sapiens
cggtggctcacacctgtaatcccagcactttgggaggccaaggtgggtagatcacctgaggtcaggagtttgagaccagcctgaccaacatggtgaaaccccgtctctactaaaaatacaaaaactagctgggcatggtgg

SEQ ID NO: 7194 - DNA, 4582 bp, Homo sapiens
gaattctgtgaaatccagtctgtgccactggccattgggctgactgggcagcggttgctgggagtgcctatcattgtacaggcttcacaggtgagcaggctgagaaacagacataagattttaaggggagagggaatgtgggacatgacccatcatttcctccttccccaggcagagaaaaaccgactggcagccatggccaacaacctgcaaaagggcaatggtggaccaatgcgcctctatgtgggttccctgcacttcaatatcactgaagacatgctccggggcatctttgagccctttggtaaagtgagtagaagtgagagaaacctctgaagggaattggaagaagtggggagggtgagtgtttgagtgtacttctctgttgtgcctggccgtgattaacttgctgcatacgtcatagtgggcatatgagtctatgctgtgaaagtttggctccatctctgttcatgtgcttggtggacaaataagttagacacaaatcaaataataggccaggttaagaaagattaaaaaatacaaaaattagccaatgtggtggtgcacgcctatagtcccaactagtcgagaggctgaggtgggagggtcacttgagcctgggaggtcaaggctgtagtgagcctcggaaaaaaaaaaaaaagtccaccttttaccaaaatatttctactgactaatctttttttttccgagacaaggtctcactctgtcacccaggctggagtgggtgagactttttgagactctgtctcaaaaaaaaaaaaaaagcagtctgggtaggaaagattgaagatgtgggctagtcaaaagtttactgataatttctcactcttctacagattgataatattgtcctgatgaaggactcagatacaggccgctctaaaggttatggtttcatcacggtgagtctctagtcttttaatttttttattttactttgggtttgtccacttgtctgattttgcagcttagcttcatcctcctcctttaggaactgtctaaatgacccataaaccctggtgcctgaagcttggactagccttctaccccttgagatgagtgcattgcttgagatcttggctttgctcctacactctgtcagtggccctggtatgggggtgttcaggagttcacccagcttccctggtgctgcaacttggctctttgggtaatagtaaccaggctgcagctaaaaggttgggggtgtgagggaggttaggtatgggcttttaaagacatgctttatagaattgatgtttctcataacagggatgggaataggaaattatacttccctctggtgctaccccatttgaagcaatttctgcaccgagaaggatcagttattaacgtagcactatggggagaatagtgaggccacctaattatgggcaagcttcaccttttcctgacattccaacaaaatggttgccaattcctataactggttcttccagccccatgtgactccaggctgagaactggctgccagccacaaagtctgatagaagcttgtattttctgggcttaaaccaggcagcatacactcccacagtgacccacagggcagagggcagtaggttgtattctgtcattggaattgctcacctcaaaaatatccagtaaaggcaagccatgtataacacctgcctaggaactgtcagtaccacatgccaggccctaaggcaggtaatgctgctagctagctaaacaagctagctgtggtgttgacaattctgtggtggcaagtaacttttgtaaccttttctcgctctctgtgtgactgagatatggaaaggcttctgtggggcatttttgcccttgcattgttgccttttgggtcaacaaccttgacacttaaacaaacagcagactgggaatcctctttgtaccagtgtgttgctgggtgctgctgataaaagggactagagagtaaaggccttctggtcagcaggtcacttagtcaacagctcttgtgtgtatgtgggggtgtgggttctgccttgctgtcagcactagggtgtgttccctcttaagcctggaattaggagttccagattcctagtacttaactaaaatttggccaggcgcggtggctcacacctgtaatcccagcagtttgggaggccaaggtgggtgaatcgcctgaggtcaggagttcgagaccagcctgaccaacgtggtgaaaccccatctctactaaaaaataaaaataaaaaaactagctgggcatggtggtgggtgcctgtaattccagctactcgggaggctgaggcaggagaattgcttgaacccaggagatggaggttgtagtgagctgacatggtgccactgcactctagcctcagtgacagagtgacagagtgggactccgtctcaaaaaaaaaaaaaaaaaaaaaaaaaaaagactaaaacttactaggatagagaactgaattaaaagcccaggagccttgttcttagcttgtcttccatttgatatacccatttgtgaaataacttgtcaggctaggtttcctacaataataaaattttgcattgttagattcttaatggagctgaaagattgaaaagtgactgccattgagtccattggaaaaggtccttttcagagaaccattttgaggtgatgggcctaggtcatattttctgggaaagaaaagtttgtacctcagtgagcatacaattttcctgggatagtaggactagggagtgttactgggtctttgagagcatgtctttggtgagtaggtgactaacatggcctgggtttctcatagttctctgattctgagtgtgcccggcgggccctggaacagttgaatgggtttgagcttgctggtcgacctatgagggttggccatgtgactgagcgactggatggtggcacagacatcacttttcctgatggggaccaggagctggatctgggatcagcaggtggacgttttcagctcatggcaaaactggcagaaggtaaaatatctccgcaaggtgaagattatggggttgaattttagatgaagggttggggcttaatcccaccttttcttttccttttaggcgctggaatccaactgccaagcactgctgctgctgctgctgccgccgccgcccaggctgctgccttgcaactgaatggagcagttcccttgggggccctgaatccagcagctctgactggtagtcttggacatgggaaaggaagggaaggtttgggggtctggaaagaaggagtgcgcggtgcttgctcactcactctgcctgtctttgttctagctctgagtccagccctgaaccttgcctcccagtgtttccagctctccagcctctttaccccccagaccatgtgagtctcagggtctagctcattctagcctttgattattctctttcctttggcttcccatttacctcttctttccacaggtaaatcagtggcacagtatactgcctccttgtgcctctggatcctgccacttcacatctactcttccatggccccatttctccattttgtggaccaagccatcctgagggcatggacattgtctctgaggaaattggggccacccttaagataccaagaaaagctcctgcccatggtcccactggaaatggactctgctgagcaaagccaccagttgaagagaacagaatccacacctgcattgaatacctgtttctccatgtgtatcgtctctgagattaccttcttgccctttccaacaccttagtgattcctcaatttctcccccattgggaaggccatagggcatactgaaggaactgacctctctccttttcctgtacctttaacctttagtctgtcaaggaaaacccttaggacctctgaatcaagaggactgagtttgtgggtgaaccttgaaggtgctctttctgctacaagggccctgggagatagcatggacgtgcattgagaagccagcctcagaccttagcttgaagcagcttgaggccagacctactgtagcctcagcatcttgctaggaggcatggaagtgatctatcctgccaggaggcctcagagtgatctgtcctgccaggaggtgtgagagtgatctgtcctgtgaggcatttaggggctttcaggaatttagtaaaaggtggagtatgcctttccagtatcttccatcttcctttgtatacttgtccttcctcccatttcctccctttggcccgaggtaggaggatggagggaggctgctactctaccacttcctgtgtgcctctactgtggcctcaaccctggcaattatagctactcccatcccttacctgggcatgtgtgagcccttctcactggattttatacccttgtgtctgtgtacataaatatatatacatatatatatacataaaaactttgtacaaaaggcaagcctcctccttgtggcagctgttgcccatttgtgtgtggtctttgttgtgtgtctgacaacttctcattagcccaacttatgatgtttctagggatataaaacattagtaacatcattgtgtttatttatttaaccacctttagaaagaaaaatgaaaa

SEQ ID NO: 7195 - DNA, 10791 bp, Homo sapiens
atggcatctgatgactttgacatagtgattgaggccatgctggaagctccctataaaaaagaagaggtaatattttccacctcactcctggaattgggttaatgagaaagagtagttgtcgatcatcactttcaactttcaacattttatgaatcctctttccctgcttatttattatgtagaataactaatcataaaaggcatagtcttagtaagctttgctggagactatggttaagagccatacttttagagacaacctcagaaaccggagtgggcacataatgtggtgttggtaatctgtgctttgctcaaaactcgaagtgacacagtagaaagtcactgtacctcagacctagcaccaatttcttttttttttcttttgagacagagtctcgctctgttgccaggctggagtgcagtggcacaatcttggctcactgcaacctccgcctcctgggttcaagccattctcatgcctcagcgtcccaagtagctaggattataggcaagcaccaccatgcccagctaatttttgtatttttagtagagacggggtttcaccatgttggccaggatggtcttgatctcctgaccttatgatccacccaccttggccttccaaagtaatgggattacaggcgtgagccactgcgcccgtcccagtttcttttttaatatattttttatagagacagggtcttgctatgttgcctgggctggtctcgagctcccaggctcaagcgatctgccttggcctcccaaagtgctgggattacaggagtgagccactgcacctggcccacttaacagcaatttgcttgcttgcttgcttgcttttccctccctctgccctctcctcccatccctccctccttctcccttcctttcccccccaccgctttcttttttcctttctttttttttttttttttttttttttgagatgaagtttcactcattgcccaggctggagtgcagtggcgcgttctcagctcaccacaacctctgcctccgggttcaggcgattctcctgcctcccaagtagctgggattacaggcatgtgccaccacccctggctaattttgtctttttagtggagatggtttctccatgttggtcaggctggtctggaactcctgacctcaggtgacccgcctgccttggcctcccaaagtgctgggattataggtgtgagccactgcgcccagcctcttttttttttttttttttttttttttgagacagagtctcactaggctgcccaggctggagtgcagtggtacaatcccagttactgcaacctttgcctcccagattcaaatgattctcctgcctcagcctcccaagtagctgggactacaggcgtgtgccactatgcctggctaatttttgtatttttagtagagatggggtttcgacatgtcggcgaggctggtctcaaactcctggcctcaattgatccgcctgcctcagcctttaaaagtgctgggattacaggcgtgagcaactgcccccagcctagcaccaatttgtaactctcctgggaaatgttagtggagcagatgttgggtaactgaagtttgacatcaaaatctgtcatgctgatctcttccttttaggtagtttccttgattcctttcttactccctttgttaggaaataagggtgctgaaaatctggctagataatcaagtggtttgatttattccttgtccacctttgttccctttgcccattggaatctgtgtgtctgccaccttataccttgtgacattttcctggtgaatgcctcaggatgagcaacaaaggaaagaagttaaaaaggattatcctagcaataccaccagcagcaccagcaacagtggcaatgagaccagtggaagcagcaccatcggggagacaagcaagtgagtgtgggaggaagaaatgggttggcaacttggggaagggaaacagttttgtccattggaaaaataaccagaatagggagattgtttctgttaagactgctgactgttagtaatggctccacctaggtcatgagaataatggtgacttgatttaattatctagtcttcattttccagtgtagatttgtggattagtcctagcatcaatatacttcatttgaataaaataccaagaggggctgggcgtggtggctcacacctgtaatcccagcactttgggaggccgaggtgggtggatcacctgaggtcaggagttcgagaccagattgaccaacatggtgaaaccccgtctctactaaaaatacaaaaattagctgggcgcggtggcaggctcctgtaatcccagctactcaggaggctgaggcaggagaattgcttgaacatgggaggcagaggttgtagtgagccgaggtcgcaccatcgcactccagcctgggaaacagagtgagactctgtctcaaaaaaaaaaaaaatagcaagaggacccctgatttggaaacaccaggttttgcttcgcattagggggaaaaatggcctcttcagatgcctgacagctttcagggctgtaagttggtattgtgcaattgctgtgaaccactgctggatcatcttcgggtctttggttttttcatgctttctgtttcattctggccttactgtaattccttttctttggcagcaataacgaaaccttctctttaagaatttacactcctgacctggcgcggtgctcacgcggggctcatgcatgtaatcccagcactttgggaggctgaggcaggtggatcacttgaggccaggggttcaagatgaacctggccaacatagcgaaaccttgtctctactaaaaatataaaaaattagctgggcatgatggtacatgcctgtaatcccagctactcaggaggctaaggcatgaggatcgcttgaacctggaaggcggaggttgcagtgagccaagattgcaccactgcacgacagagcgagattctttctcaaaattaaaaaaaaaaaaagaagaatgtactctctttcacaggaagaagaggagtcggagccataataaaagcagggatagaaagcgcaggtcagtaattctgggccaggcacagtggctcgtatctttaatcctagcactttggaagccaaggcgggaggatcacttcaggccaggagttcaaaaccagcctgggcaacatagcaaaatcctgtctctacaaaaaatttaaaaattacccaggtgtagtagtacatgtttgtactcccagctacttgggaggctaaggctggaggattgcttgggcccaggagttcgaggttgcagtgagccgagattgcagcactaaactcctgcctgggcaacagatggagaacctgtctcaaaaaaaataaaaataaaaataaaaaattgaaacatttagcttaaaacacaaacacattgtacaactctacaagttttctttatgtccttattctataagcttttttctatttttaaatttttttgtcttttactttttaaacattattgttattgttgaaaactacgacacaaagacacatgagcctaggcctgcagagggtctttcacctccacatcttgtcccactggaaggtcttcaagggcattaatacacatagagttgtactctgctgtaacagtgctttctttaggagcaccttctgaaggaccagcctaaggctgttttatagttaaccgaagtagaagtaatatattctagaatgataaatatagtaaatacatgaatcagtgacatcattactttttatcgtgaagtatatactgtacgtaattgttttatttttaaacaatttttaattgatacatattgtatgtagtttctggtatgtgtgaaatttaatacatataatttgtaaagatcaaatcagtgtacttgagttatccttgacctaaatgtttatcttttcatgatgctaggaaacattcaaattattctctactagctattttgaaatgtataatagattattgtacactgtagtaataaccctactgatttgttgaacactgggtcttattttttcttttttttttgagaccgagtttcgcttttgttgcccaggctggaatgcaatggcgtgatcttggctcaccgcaacctctgcctcccaggttcaagtgattctcctgcctcagcctcctgaatagctgggattacaggcgtgtgccaccatgcctggctaatttttttggtttgttttttgagacagagtctcactctgttgcccaggatggagtgcagtggcgcgacgtcggctcactgcaacctccgcctcccaggtttaagaagttctcctgcctcagcctcctgagtagctgggattacagttgcgcaccaccacacctggctaatttttgtatttctggtagagatggggtttcaccatgttggccagactggtctggaattcctgatctcaagtgatccacccattttggtctcccaaagtgctgggattacaggcgtgagccaccgtgcctggtctaattttgtgtttttagtagagacggagtttctccatgttggtcaggctggtctcgaactctcgacctcaggtgatctgcccgccttggcctcccaaagtgctgggattacaggcgtgagccaccgcgcccagccctgggtcttattttttctattaaatgacatatttgtatccattcatctacttctgttcattccacccacagccgccatccttccatccttccatccttcccagcctctagtaaacactagtctttctatcttcatgagattcactttgtacataattggatgtgctgtatttttatacaactgggagtgcagtaggtaatagtttggtttacaccagtatcaccacaaacacataagtaatacattacgacattacagtggctgtaacatcactaggttatacgaacttctcagcaccgttataatcttatgggaccactgttgtatatgcacttggttgttggcctaaacatgatgtgggcatgactgtagttgtttccctctgtagtcgtagtcgagatcgggatcggtatagacggagaaatagtcggagccgaagtccaggtcggcagtgtcgtcaccgtagccgtagctgggatcgtcgacatggtagtgagtcgcgaagtcgggaccatcgtcgtgaggatcgtgtgcattacaggagtcctccacttgccactgggtatcactttttgctaatagattcacttttgtataataatctggataaaacaacaaatgcactatgaaccctgcttgagggtgcttattataacacattgtgattggcaggatactcaggcacagaaagggttggtattcaaaatttactggtgtggtggctcatgcctgtaatcccagcactttgggagactgaggccagaagatcacttgggctcaggaattcaagaccagccaggacaacatggcgaaaccctggttctacaaaaaatgcaaaaatgagctagatatggtcatgtgtgtctgtaatcctagccacacaaggaggctgaggtgggaggattgcttgagcctgggaggcaaaggttgcagtgacccgagatggcgccactgcactccagcctgggtgacagcggaaaccctgtcttaaaaaaacaatgagatgaagtactggaatctggttttctcaccatggaagacccagcattggaccaatgagaataaggtttcaccttttgtttttctctattctttagttataggtatggacacagtaagagtcctcatttcagagagaagagcccagtcaggtgggttgataatgaacactgttttagggattgtgaggtatgaataaaaggttatttgagccaaattacaggaatgtgtaatacttgagggttagctggagaacaatgaccaggtattgggagggctggtctcaacacatttcactcttcagggagccagttgataatctgagtcctgaggagcgtgatgcccgcacagttttctgtatgcagttagctgcccgaattcggcctcgagatctggaggactttttctctgctgtaggcaaggtaaccctcccaccttagttttcttctgagtagcttagcttgtatctccctttatgcctaactcaggatttcttttgcgtcctggataggttcgcgatgtacgtatcatctcagatcggaactcacgtcgttctaagggcattgcctacgtggaattctgtgaaatccagtctgtgccactggccattgggctgactgggcagcggttgctgggagtgcctatcattgtacaggcttcacaggtgagcaggctgagaaacagacataagattttaaggggagagggaatgtgggacatgacccatcatttcctccttccccaggcagagaaaaaccgactggcagccatggccaacaacctgcaaaagggcaatggtggaccaatgcgcctctatgtgggttccctgcacttcaatatcactgaagacatgctccggggcatctttgagccctttggtaaagtgagtagaagtgagagaaacctctgaagggaattggaagaagtggggagggtgagtgtttgagtgtacttctctgttgtgcctggccgtgattaacctgctgcatacgtcatagtgggcatatgagtctatgctgtgaaagtttggctccatctctgttcatgtgcttggtggacaaataagttagacacaaatcaaataataggccaggttaagaaagattaaaaaatacaaaaattagccaatgtggtggtgcacgcctatagtcccaactagtcgagaggctgaggtgggagggtcacttgagcctgggaggtcaaggctgtagtgagcctcggaaaaaaaaaaaaaagtccaccttttaccaaaatatttctactgactaatctttttttttccgagacaaggtctcactctgtcacccaggctggagtgggtgagactttttgagactctgtctcaaaaaaaaaaaaaaagcagtctgggtaggaaagattgaagatgtgggctagtcaaaagtttactgataatttctcactcttctacagattgataatattgtcctgatgaaggactcagatacaggccgctctaaaggttatggtttcatcacggtgagtctctagtcttttaatttttttattttactttgggtttgtccacttgtctgattttgcagcttagcttcatcctcctcctttaggaactgtctaaatgacccataaaccctggtgcctgaagcttggactagccttctaccccttgagatgagtgcattgcttgagatcttggctttgctcctacactctgtcagtggccctggtatgggggtgttcaggagttcacccagcttccctggtgctgcaacttggctctttgggtaatagtaaccaggctgcagctaaaaggttgggggtgtgagggaggttaggtatgggcttttaaagacatgctttatagaattgatgtttctcataacagggatgggaataggaaattatacttccctctggtgctaccccatttgaagcaatttctgcaccgagaaggatcagttattaacgtagcactatggggagaatagtgaggccacctaattatgggcaagcttcaccttttcctgacattccaacaaaatggttgccaattcctataactggttcttccagccccatgtgactccaggctgagaactggctgccagccacaaagtctgatagaagcttgtattttctgggcttaaaccaggcagcatacactcccacagtgacccacagggcagagggcagtaggttgtattctgtcattggaattgctcacctcaaaaatatccagtaaaggcaagccatgtataacacctgcctaggaactgtcagtaccacatgccaggccctaaggcaggtaatgctgctagctagctaaacaagctagctgtggtgttgacaattctgtggtggcaagtaacttttgtaaccttttctcgctctctgtgtgactgagatatggaaaggcttctgtggggcatttttgcccttgcattgttgccttttgggtcaacaaccttgacacttaaacaaacagcagactgggaatcctctttgtaccagtgtgttgctgggtgctgctgataaaagggactagagagtaaaggccttctggtcagcaggtcacttagtcaacagctcttgtgtgtatgtgggggtgtgggttctgccttgctgtcagcactagggtgtgttccctcttaagcctggaattaggagttccagattcctagtacttaactaaaatttggccaggcgcggtggctcacacctgtaatcccagcagtttgggaggccaaggtgggtgaatcgcctgaggtcaggagttcgagaccagcctgaccaacgtggtgaaaccccatctctactaaaaaataaaaataaaaaaactagctgggcatggtggtgggtgcctgtaattccagctactcgggaggctgaggcaggagaattgcttgaacccaggagatggaggttgtagtgagctgacatggtgccactgcactctagcctcagtgacagagtgacagagtgggactccgtctcaaaaaaaaaaaaaaaaaaaaaaaaggactaaaacttactaggatagagaactgaattaaaagcccaggagccttgttcttagcttgtcttccatttgatatacccatttgtgaaataacttgtcaggctaggtttcctacaataataaaattttgcattgttagattcttaatggagctgaaagattgaaaagtgactgccattgagtccgttggaaaaggtccttttcagagaaccattttgaggtgatgggcctaggtcatattttctgggaaagaaaagtttgtacctcagtgagcatacaattttcctgggatagtaggactagggagtgttactgggtctttgagagcatgtctttggtgagtaggtgactaacatggcctgggtttctcatagttctctgattctgagtgtgcccggcgggccctggaacagttgaatgggtttgagcttgctggtcgacctatgagggttggccatgtgactgagcgactggatggtggcacagacatcacttttcctgatggggaccaggagctggatctgggatcagcaggtggacgttttcagctcatggcaaaactggcagaaggtaaaatatctccgcaaggtgaagattatggggttgaattttagatgaagggttggggcttaatcccaccttttcttttccttttaggcgctggaatccaactgccaagcactgctgctgctgctgctgccgccgccgcccaggctgctgccttgcaactgaatggagcagttcccttgggggccctgaatccagcagctctgactggtagtcttggacatgggaaaggaagggaaggtttgggggtctggaaagaaggagtgcgcggtgcttgctcactcactctgcctgtctttgttctagctctgagtccagccctgaaccttgcctcccagtgtttgcagctctccagcctctttaccccccagaccatgtgagtctcagggtctagctcattctagcctttgattattctctttcctttggcttcccatttacctcttctttccacaggtaaatcagtggcacagtatactgcctccttgtgcctctggatcctgccacttcacatctactcttccatggccccatttctccattttgtggaccaagccatcctgagggcatggacattgtctctgaggaaattggggccacccttaagataccaagaaaagctcctgcccatggtcccactggaaatggactctgctgagcaaagccaccagttgaagagaacagaatccacacctgcattgaatacctgtttctccatgtgtatcgtctctgagattaccttcttgccctttccaacaccttagtgattcctcaatttctcccccattgggaaggccatagggcattaactgaaggaactgacctctctccttttcctgtacctttaacctttagtctgtcaaggaaaacccttaggacctctgaatcaagaggactgagtttgtgggtgaaccttgaaggtgctctttctgctacaagggccctgggagatagcatggacgtgcattgagaagccagcctcagaccttagcttgaagcagcttgaggccagacctactgtagcctcagcatcttgctaggaggcatggaagtgatctatcctgccaggaggcctcagagtgatctgtcctgccaggaggtgtgagagtgatctgtcctgtgaggcatttaggggctttcaggaatttagtaaaaggtggagtatgcctttccagtatcttccatcttcctttgtatacttgtccttcctcccatttcctccctttggcccgaggtaggaggatggagggaggctgctactctaccacttcctgtgtgcctctactgtggcctcaaccctggcaattatagctactcccatcccttacctgggcatgtgtgagcccttctcactggattttatacccttgtgtctgtgtacataaatatatatacatatatatatacataaaaactttgtacaaaaggcaagcctcctccttgtggcagctgttgcccatttgtgtgtggtctttgttgtgtgtctgacaacttctcattagcccaacttatgatgtttctagggatataaaacattagtaacatcattgtgtttatttatttaaccacctttagaaagaaaaatgaaaa

SEQ ID NO: 7196 - DNA, 327 bp, Homo sapiens
gctgggtgcactggctcacgcctgtaatcccagcactttgggaggccgaggtgggtggatcacgaggtcagttcaagaccagcctggccaacatggtgaaactctgtctctactagaaatacaaaaagtagctgggcatggtggtgggtgcctgtaatcccagctactcaggaggctgagacaggagaatcgcttgagcctgggaggcggaggttgcagtgagccgaggatgcaccactgcactccagcctgggcaacagagcgagcctccatctcaaaaaaacagaaaagtgtatttctcacagttctggaggctgggaatttcaa

SEQ ID NO: 7197 - DNA, 4582 bp, Homo sapiens; identical to SEQ ID NO: 7194

SEQ ID NO: 7198 - DNA, 10791 bp, Homo sapiens; identical to SEQ ID NO: 7195

SEQ ID NO: 7199 - DNA, 327 bp, Homo sapiens; identical to SEQ ID NO: 7196

SEQ ID NO: 7200 - DNA, 14162 bp, Homo sapiens; identical to SEQ ID NO: 6806

SEQ ID NO: 7201 - DNA, 664 bp, Homo sapiens; identical to SEQ ID NO: 6807
  SITE (335): n equals a,t,g, or c

SEQ ID NO: 7202 - DNA, 2767 bp, Homo sapiens
gaatgcagtgatttttcacctccgataactgtaatcctgttgatcttcctgtgccttgagggtcttctgtttttcactttcactgcagttatgtttggcacccaaatccactccatatgcaacgacgagacggtaagctttgttctcggctgtgtggacttcatatgtggtccaagcttgagtaaatgaaaagtcctaatgtcaacaataggtgcctgtggactgactcgggaacgtaatgggacggtcttgatgagctgcaaccagctccctgtgtttgctgtttctttcattctgggcagtgcatatttctagtctcagtttgatttgcaagtcagcagagccaggcagattcccagctcccagtgcagtcagtaaatttcagggaactgactgcctttagggcctggctctgcaggcctggagtggcgctcagtaaatgtctgtacacagtaactaacgagcgacaaatgttggtgcctggctgggagggccattgtggtagtctgggctggccacgtggctgcagccgggctgggctcacagaggccacggggtctggatcggggcagagctgggaaggagagttcactcacctaccctccatcgagcccacactgtgcttgagcacggtgtgattctgaggcttggtggggtctgccgagcttcctggagccgctgccacttgcttttctttctgcttccaggagatcgagcgattgaaaagtgagaagcccacatgggagcggaggctgcgatgggaagggatgaagtccgtctttggggggcccccctcactcctctggatgaatccctttgtgggcttccgatttaggcgactgcccacgagacccagaaaaggtggcccggagttctcagtgtgaggcgtggctcatcagactgaaacttgctcacagacttccagttatttatttggggtctgaaggatatcaacagctcatctgtgaccaacagggcaactggaacctacacaaaccaattgcttgcagcaagcagagttttatatatttatagtcacagatggcagaggaagaggctctcagtccccacctgtacaacaacggaaaggtgtgtggccacacgaagaagccaaacgccgtggcctcctgcagagctggggcttctgtggagaatacttcgggttattacatgggttattcaaatcctgggtcctgagctgctgtttccaatcatgaagaaaaacagtgaatccagtgaacagggattctccaagcagtcatttcagggggctcctgctgaccccgccactcagcagtgcactccccggatcacagcagggcgtttacatagaaagacgttttggtctcgattagctccgatgctttgcactgaagttgcaaaagatctgtgcactgaacagtgaaggtggcttccggcacactccccgctgccccggaagagacatcctttgaccctctcagcaagtctgtgtgtgtgcgtgtctgtgcgtgtgcgcgcgtgtgtgcatgtgtgtcaaaattgccagtgttgtttaggcaatgtaacatttaccggctgtgtacagcaaacaagctattttttagaaaccgacgtttcagggaagaggggagagagccgcggggtcctgcccgtggttactatgaatgtattgctgttggaggacatctcgatccaaagaacagccgttcctgtgcggcccttcgttgccctcctgctttcattttttaaagaaatcttgagtgcttgagggccttggaactgattttttttttttgttccagccaaattagcagtgtataaatggcacctaggtaagagcagagctgcggctcggtgacttgatacttggggcagcccgatgctgtgtgtggggcaggggaggcatccttactggagaggcagggcccagccattgggcacctctgggaaggggaggggaccatgaggcagccagcccctggcaggggcgactgtgccaccgcaggcagcgctccagtcgggaatggccaggatggcgccctcttgttggagtttttggttagcttttacgttttcttctccacccacggcacaggtgataaaataggatccttggtgcggagcttaaaattatgccagaaagccaacagctcccctcgtggggccttgccttaaacttgcctggtttgtacattttttgccggacgcatcaagaagcaatctgtgacaaagtctgagggtcttcctttatgcttgccctccacactaagagaagttggcgtctccctcctgggaattgttttgcctttctgttcatctgtgaactgttttttgtttttaattactctgtaccccatccgaatcagggcttctaccactgctgatgcaaaaccacaaagggacctacctgagccaccgtcctagccaagcgagcaaacctgcagggggtttggaagtggacttggtcaccgcagaagcgtgtgcgccgttgggggaagagctgcgtcacagccagagggacaaagtgtgggtgatcctggagacgccagtttccgagattgttctgcatattcatttgcacattgttgtctgggttggacatgcgtgtgggcttcagtgtgaggcttttaatatgtatatcctgttatcaataaaacaattatccaagtggttgaatcctgtgagacttggcaagtgtgtgcaaatcaagtatacttgacttttcaacctcttctttcaatgtaacttttatatgaaataaagtaatcaattaacagttctcaaa

SEQ ID NO: 7203 - DNA, 1326 bp, Homo sapiens
atcccactcaatcttacctgtactatttgccatctcctctcaatcaagttcattccataatgatgttttcctgagtaaaccagaaaaaaaagaatccttataaataggcaaagattacttagtaaaataggcaaaggctctcagagccttttttctcatgtgacatgcatgtatctgaataggaacttcttgtttctggctgttgaattatccaaaaggatggctttagtggtaagttttgtgcataaaggaaaggaaggcatgttagccagtggagaatacatttaggccacagggaccttgtggtgcttcttggattacgctgggctttatgcatggatagcagatgaggccaggggaggaaaaactctagagatggaaggatggatggacaaaggaagaagagaagaaagagagaataaatagcatatgcaatatgttgaatttgcactgctagcaagcaagaacttaagtcacacacatacccagagccaggccctcaggaatatttctcaacctttatgctttactcttctccagatagtaaaacacctacaaaatatcatcaggccttgttcttcagcatgacaaaatgtcctgcttcttgcctctgtgaacaagggggactgagattgtatctcctttccacaagagcccttgggatcaacacctatggaagggaagggaggaatggaaaaaaggggagctgagctgggatgcagatctgctagatgcctcagacaaccctgcggggagttatggagatggaatgccctttagaattgtccagggttcaggagacaggggaggcctttttatacctgcatcacctagtcactgggtatgcttgatggggaagaatcatgacgttaggagagggaggtggctctctgaagctgtagcaatccccaaagggggcagacctttgcagatgaggtctttcttctggcagcactcccagaaactaaggtaaagtctccgttattcctgagggggatccggatggcttatcatgtccatcacactccacaatgctatataataccataaaactttgcaaatagaatgaaggagaaaataaatattgcaaaagcatactgtcaaatttctacataacagaatattaggtttgaaaatattacccattagttaaatttctcctccttttacaatgatgtttgcctttaaaggggtcaccagagaataatttgtttcacagagcagccatgctattaatactactgtttagagatatagaaacgactttgcaactgtgaattgctaagaattgtagaaataaagggaaaataaaattttcttttctaa

SEQ ID NO: 7204 - DNA, 1326 bp, Homo sapiens
atcccactcaatcttacctgtactatttgccatctcctctcaatcaagttcattccataatgatgttttcctgagtaaaccagaaaaaaaagaatccttataaataggcaaagattacttagtaaaataggcaaaggctctcagagccttttttctcatgtgacatgcatgtatctgaataggaacttcttgtttctggctgttgaattatccaaaaggatggctttagtggtaagttttgtgcataaaggaaaggaaggcatgttagccagtggagaatacatttaggccacagggaccttgtggtgcttcttggattacgctgggctttatgcatggatagcagatgaggccaggggaggaaaaactctagagatggaaggatggatggacaaaggaagaagagaagaaagagagaataaatagcatatgcaatatgttgaatttgcactgctagcaagcaagaacttaagtcacacacatacccagagccaggccctcaggaatatttctcaacctttatgctttactcttctccagatagtaaaacacctacaaaatatcatcaggccttgttcttcagcatgacaaaatgtcctgcttcttgcctctgtgaacaagggggactgagattgtatctcctttccacaagagcccttgggatcaacacctatggaagggaagggaggaatggaaaaaaggggagctgagctgggatgcagatctgctagatgcctcagacaaccctgcggggagttatggagatggaatgccctttagaattgtccagggttcaggagacaggggaggcctttttatacctgcatcacctagtcactgggtatgcttgatggggaagaatcatgacgttaggagagggaggtggctctctgaagctgtagcaatccccaaagggggcagacctttgcagatgaggtctttcttctggcagcactcccagaaactaaggtaaagtctctgttattcctgagggggatccggatggcttatcatgtccatcacactccacaatgctatataataccataaaactttgcaaatagaatgaaggagaaaataaatattgcaaaagcatactgtcaaatttctacataacagaatattaggtttgaaaatattacccattagttaaatttctcctccttttacaatgatgtttgcctttaaaggggtcaccagagaataatttgtttcacagagcagccatgctattaatactactgtttagagatatagaaacgactttgcaactgtgaattgctaagaattgtagaaataaagggaaaataaaattttcttttctaa

SEQ ID NO: 7205 - DNA, 1326 bp, Homo sapiens; identical to SEQ ID NO: 7203

SEQ ID NO: 7206 - DNA, 1074 bp, Homo sapiens
tttgtttgtttttgtttttgtttttgagacggagtctccctctgtcgcccaggctggagtgcagtggtgccatctcagcttactgaaagctccgcctcccgggttcacgccattctcctgcctcagcctcccgagtagctgggactacaggcacctgccaccacgcccggctaattttttgtatttttagtggagacggggtttcaccatgttagccaggatggtctccatctcctgactcatgatccgcctgcctcggcctcccaaagtgctgggattacaggcgtgaaccaccgcgtgcttatttaaagtatgtgctgtctctctccttacgaatgtttttttttccctgttggtcactcattttcatgatcgttttccaattcttagatctgacttcatgcatgagaagtacagaaagtacacaagaataaagaataaaagtaggggagtcaggaatgttctattttaaaagcaactattagattcctcactgtctcccttcaattattcctgatctttactctttgagtcctccctgaaataacatgctattagattgatgcaaaagtaattgtcgtttttgccgttactttttttttttttttcttttttttagatggagtttcactcttgttgcccaggctggagtgcaatggtgcaatctcggctcactgcaacctctgcctcctgggttcaagcgattctcctgcctcagcctcccgagtagctgggattataggcatgtgccaccacacccagctaattttgtatttttagtagagatggggtttctccatgttggtcaggctggcctcgaactcctgatcttaggtgatcctcccgccttggcctcccaaagtgctgggattacaggcatgagtctccacatccttgccattactttcaatagcaaaaaccgcaattactttttcaccaatctatataatgattagaaatatatcccctactctggagggtgaggcaagtgatcctatcgcgtgaacccaagagtttgaggccagcctgggcaacatggggagattttgcctcaagaaaaaaaagaaaaaagaa

SEQ ID NO: 7207 - DNA, 16225 bp, Homo sapiens
gaagctgagtctgatagaacttagcccgtgaccttaatgggtactcggcagatgcagctgcctggctgattagagaacaggacaggcatggaccctgctttcggagcagtgctgtggaatagaactttgtgcagtgacggaaatgttctgcatcttcactctcccttatgatggtcagtagccacgtgtgaaatgtatctaatgggactgagaaactaaatttttaatttaagtagccacaggtagctagtgattaccatagcaaatgctgcagttccccaggtttttagtcttgattatacctcccagaagtcgtctgctccaaaggtcaacagttcagcaggaagcagagcccatgcctttgagaggctggaggtattgcatactcccaaaaatcccaggggctcactcataatgagcccaacagtgcagaagagttctgggctgttgtttctaaaatgcaagcatacagccttcctcctctcccattttcatttagacctgtactaacagaattctggcattacaaattgttttgtattttgatgtcttcagaataaatatataatgtgcttcataattgaaagcaattttgatggttttaaaatcaacattttttgtgttgctaccttgtgctgagacttgtgctagatagtgaggataccaagaaaaataagcacagggattttgtgttgttcatctttatctcctcagcatctaagataatacccaatgcatagtgggctctcagtagtgtttggtgaactaataagcgaaagatataatcgccactgtcaaagcactcactcactatgtggtgggggccaacagacaggtacagatgtgttcctggtgtggagaaagtgccagggtggctcagcgaagaaaaaagaattcttgtggtgctatcaagcaaggcttcatttgagggaaaagtaggatttctgtaggtggaaaaagagaagacattgatttgaaactccctggttgttttataaacttcatattagctatgtccacagagcctccaaaaggatataattcaaaagggattttaaccaaaatgaaatatgttgtgactaatagatacagtttatttgaatgaatgatagtttttcccatttgatattttaactgtgctacacaagaatgagagtagacatagctcgatttgtagtctcattgttctgtcttttctgcccatttcagtgacccaggactctttgtttattgctgtgatttttcttccacagctatagaactggtccaggtgagtacaatgggaaattacctattggtaatttccactgattaaagggaaaaggttctcctaaaaatcaaggtctctggctgtgttcttatacagtctgtgttcttacggtctaaaagtaaaagatttactgataacgagcataccttgttttattgcagttcactttatcacactgtatagatgtcgtatctgttcatatattgaaagtttgtggcaaccctgcatcaagcaagcctaccggtgccatttctccaccaccatatgctcacttagtatctatgtgtcatgctttggtgattctcagaatatttcagacttttttactgttatgtatgttatagtgtgtgatgttactgttgtacttggtttggggttccacaaatcacatctgtgtaagacggtcaacttaataaatgcatgcgttgtgactgctccaccaacctgccattccatttctctccctctcctcaggtctccttgttctctaagacacaatattgcaattaggccacttcatactctacagtgtcctctgtgtgttcaagtgaaaggaagagtttcaccacgttgcccaggctggtctcgaatgatagcttacacttgtgttgtaattattaaatttaatacacaattgcataaactaatgaaatacgattgcatgctggtgcggtgactcatgcctgtaatcccagcactttgggaggccggggtgggcagatcacgaggtcaggagttcaagaccagcctgaccaagtgaaaccctgtctctactaaaaatacaaaaaaattagccgggctaaaaatacaaaaaatggcgcatacctgtaatttcagctactcaggaggctgaggcaggagaatcacttgaactcaggaggtggaggttgcagtgagctgagatcgcgccactgcactccagctagacaacagagtgagactccatctcaaaaaaataaaaatacattattggtcggccacaatggcttaatgcctgtcatcccaacactttgggaggctgaggcagacagatcacttgagatcaggagttcaagactggcctaggcaacatggtgaaaccccatctctactaaagaaaaatacaagaaattatccaggcatggtggtgggcacctgtagtcccagctactcaaaaggctgaagcaggagaatcgcttgaactggggaggcaaaggttgcagtcagccaagattgtgccactgcactccagtctgggcgacagtgagactccatctcaaaaaaaagagagagaaagaaaaaaaaatagtttattgctaaaacatgttaataatcatctaaaccttcagcaagttgtaatctttgctagtggacggtcttgccttgatattgatggctgctgactgatcagggtggtgattgccaagggttggggtggtcgttgctaagggctggggtgactggcaatttcttaaaataaggtaacagtgaagtttaccgtatcatttggctcttcctttcatgaaagatttctccgtagcatgcgatgctgataggattttgcccacagtagagcttctttcaaattgaagtccattctctcaaaccctgctgctgctttatcaactaagtttgatgccatttcaaaacaaaaaacctttcttgccatttctaaacaatgttcatagcatctttactggagtagatttgatctcaataaaccactttctttgcccaaccgtaagaagcaactccttatagataaggatgctggtttaaaaagaaagaaagaaagaaagaataagactaaaaaacaagcagcaacaagattgcagcaattcagtcacatcttcaggcttcactttttttttttttttttttttgagacagggtctcactgtgttgcccaggctgaagtagagtgacacaatcatagcccactgtagccttgaattttgggctcaggcgaacctgatgagatgattccattggggttctttgagttacaagtaacagaaacgtctagacaaactcaaagcaataaagtagaatgtcatagaacctaagggcacaaaatacagccccaagttcctggtatcttacctgtcattgtccagggcccatttgttttttccctctttgcataccagttttctctagtcagtatttcctaattttgcacgcggccccaacgtgcttgctcctcccagtcccttacaagctcaccctgttcaggggttcatggtgcctcactaaaatgattgtgtcccagttctgaagtccctggaaagtctagttaacacaacctagctgataaatacagcagccctgtttgaatcagctttggccaatgagaaacaaactcacatatttgcagaagacggacattgagggtagatgccttaaaatgtatctgttatggctggggtcagtggctcacacctgtcatcccagcactttgggaggccaaggccagcggatcacgaggtcaggagttcgataccatcctgaccaatatggtgaaaccccgtctctactaaaaatgtgaaatttagctgggtttggtggcacgcacctgttgtcccagctacttgggaggctgaagcagaagaatcgcttgaacccaggaggcggaggttgcagtgagccgagatcgcaccactgcactccagcctgggtgacagagcaagactccatctcaaaaaaaaaaaaatgtgtctgttacaattggccgggcatggtggccagcactttgggaggctgaggtgggcagatcacttgaggtcaggagttcaagaccagcctggccaacatggtgaaaccctgtctctactttaaaaaacacaaaaactaggccgggtgcagtggttcatgcctgtaatcccagcactttgggaggctaagacgggcagatcatctgaggtcaagagttccagatcagcctggccaatatggtgaaactccatctctactaaaaatacaaaaattagccaggtatggtggtaggtgcctgtagtcccagctactcgggaggctgaggcaggagaatcgcttgaatctgggaggcagaggttgtagtgagccaagatcacgccattgcactccagcctgggctacaagagtgaaactccatctcaaaaaaaaaaaaaaaaatacaaaaactggcaggacgtggtggcatgcacctgtaatcccagctactggggaggctgaggcaggagaattgcttgaacctgggaagcagaggttgcagtgagccgagatcgcaccactccagcctgggcaacagaacaagactctgtttcaaaaaaaaaaaaaaaaaagagtctgtcacaattatgtacaatgctgttagggcagattaggaattggtagtgccatgcttttagaattattattcagttaaagaccaaatgaatattgaagcctacctttacttcagtttttgataacaaagtaaattttctacatctacagaaatagattttcctgaagaattctatggtttgtgtaatattttctagttgggagttgttttaaatcgtgtgctttgttgtttgttttgagacagggtctcagtcactcaggctggagtgcggtggtacaatcaaactcactgtggccttgatctcctgggctcaagtgattctcccacctcctgtgtaactgggactatgggcacatgccaccacacttggctaatttttttttttttttttttttttgcgacggagtctagctctgtcgcccaggctggagtgcagtggcgtgatcttggctcactgcaacctccgcctcccaggttcaagcgattctcctgcctcagcctccagagtagctgggattacaggcgggtgccactgcacccagctaatttttttgtatttttagtagagacggggtttcactgtgttggccaggctggttttgaactcctgacctcaggtaatcctcccacctcgacctcccaaagtgctaggattacaggcatgcacccggcatttttttattttttgtagagatgaagtctcactatgttgcctagctggtctcaaactcctgggctcaagtgatcctcctgcctcagcctcccagggtgctgggattctaggcgtgagccaccgtgcctagcagatcgtgcttttggtttgtttgtttgtttgtttttgtttttgtttttgagacggagtctccctctgtcgcccaggctggagtgcagtggtgccatctcagcttactgaaagctccgcctcccgggttcacgccattctcctgcctcagcctcccgagtagctgggactacaggcacctgccaccacgcccggctaattttttgtatttttagtggagacggggtttcaccatgttagccaggatggtctccatctcctgacctcatgatccgcctgcctcggcctcccaaagtgctgggattacaggcgtgaaccaccgcgtgcttatttaaagtatgtgctgtctctctccttacgaatgtttttttttccctgttggtcactcattttcatgatcgttttccaattcttagatctgacttcatgcatgagaagtacagaaagtacacaagaataaagaataaaagtaggggagtcaggaatgttctattttaaaagcaactattagattcctcactgtctcccttcaattattcctgatctttactctttgagtcctccctgaaataacatgctattagattgatgcaaaagtaattgtcgtttttgccgttactttttttttttttttcttttttttagatggagtttcactcttgttgcccaggctggagtgcaatggtgcaatctcggctcactgcaacctctgcctcctgggttcaagcgattctcctgcctcagcctcccgagtagctgggattataggcatgtgccaccacacccagctaattttgtatttttagtagagatggggtttctccatgttggtcaggctggcctcgaactcctgatcttaggtgatcctcccgccttggcctcccaaagtgctgggattacaggcatgagtctccacatccttgccattactttcaatagcaaaaaccgcaattactttttcaccaatctatataatgattagaaatatatcccctactctggagggtgaggcaagtgatcctatcgcgtgaacccaagagtttgaggccagcctgggcaacatggggagattttgcctcaagaaaaaaaagaaaaaagaaatatatccctctttgtgaagtagcaacagttacatttaaaatttaaaacaagataatcttttctttaggctatgttaatattttctaacttacctgtgtcttccatctgtctgcagacaaattcagaatatgatccttctcggtgttttgcctttgttcacgacctgtgtgatgaagagaagagttacccagtgcccaagggcagtcttgatattatcattctcatatttgttctttcagcaattgttccagacaagtaagtttgggtcccttggctggtagtgtcacaaaaaggaagctttggtgagggacctttttttttaaaataggttcttgctctgtcagcccaggctggagtgcagtggcacgatcatggctcactgcagccttaacctcttgggcttaaatgatcctccctcctcagcttcccaagtaggtgggaccacaggcacgtgccaccagtcctggccaatttttgtgtttttagcagagatggggttttgccatgttgcccagactggtcttgaattcctgggctcaagcgatcctcccaccttggcctcccaaagtgctgggattataggtgtgagccaccatgcccagcctggcgagggaccttgatattagagttgggctcaaagtaaaaagagttttgtttatgttctgatagacacaaagaagccacaccatttgtagtgatgtgagcatctcagccattttcctaaatttgtcttgatgtccaacttctgttctggcctcgaaacttctgcagtagttggttcttcatttccttgttgtggctcaacattgggaaagaatgggaaatcagtctctaatgagtatgtggggaaattcctattgatagtctcatcacatgccgttttagaactgtgaactgtgggtgtcacagctcttaggtaatgtctcattattggatttttattttattttattttatttttttgagatggagtcttgccctgtcgcctgggctggaatgcaatggcgtgatctaggctcattgcaacctccacctccccggttcacacaattctcctgcctcaacctcccgagtagctgggattacaggcacctgctaccatgcccagctaatttttgtatttttagtagatgcggggtttcaccatgttggccaggctggtcttaaactcctgaccttgtaatctgcttgcctcaaccttgcaaaatgctgggattacaggcatgagccactatgctggccttttttttttttttgaagacggagtcttgctctgttgccccggctggggtgcagtgatgagatcttggctcactgcaacctccacctcccgggttcaaccaattctcctgcctcagcctcccaagcagctgggattacaggtgtacgccaccatgcctggctaatttttgtattttttttttttagtagagatggtgtttcaccatgttggccaggctggtctcaaactcctgacctcatgacctcatgatccgcccgccacggcctcccaaagtgctggaattacaggcgtgagccaccacgcccagcctattggccttttaaatgctttaaataaaacaaccttattagcaacatgaaatttacattgaaccttaactaaggtgttctctgatgcttacagtgttttaggaaagtgtgatacagaattctataaaatcagattcagattaaaggaaagtcaaatgctatatcctaaaatacaccattaaaacttcatatgcataggtaaccagtggtcctgtgacactaccttctcttttttttttctgagatggagtctcactctgttgcccaggctggagtgcagtggtgagatttcagttcactgcaacctctgcctccaaggttaaagcgattctcctgcctcagcctcccgagcagctgggattacagacaagcaccaccacacctggctaatattttttgtatttttagtagagacggggtttcactatgttggccaggctggtcttgaactccttacctcaagttatccacccacctcggcatcccaaagtgctgggattacaggcatgagccactgcaacctgaccaaaactaccttctcaaggaagcagagtcagatggtggctcagagattcagataccattgactaattccatggaagcccttggcactgccagagtgcagtgagtctggacaggctgggggttggcacatgttagggtaaactatacccatgaaatcatgagattagagacttcaaacatctcctcattctgtgtcatcagagtcctgcaaaggatgattaagtaagttagtgttaaaggtcaaggtaagctggtgttaggaagccagattacatgactagagactgcagggaccagtgattgagatcctggtttatctcccagagtccaaggacccctcactggctgcacaggataggagctttgggtgattgaccttcctctagaaggccacacttcctctagaagggtactgaagtcatccaacctgagaggatgagtgtgaaataaaggcatatgcaggataacccaaaaggcctaccatggttttaaactttaataattgcagaggttgaccaggcacagtggctcacgcctataatcccaccactttgggaggctgaggtgggaggagtgcttgaagccaggagctcaagaccagcttgggcaacaaagcaggaccgttatctctactaaaaataaaaataaaaaaatttagccaggtgcatatctgtagtcccagctactcagaaggctgaggcaggagtatggcttaagcccaggagtttgaggctgcagtgaagtgagctacgatcacaccactgcactgcagcctgggtgacagagtgagaccctgtctcaaaaaaaacctatgaccttagaagtttcaatgctacaaactttttaaaaattgacatggactaaaacaaattattaaaatttaaaattcaagccagacacagtggcacacacttttagtcccagctacctagagactgaggcaggaggatcacttgagcccaagagtccagccgaggcaacatagcatagcaggaccccagctgttttttgtttgtttgtttgttttctgagatggagtttcactcttgttgcccaggctggagtgcagtgctatggtcttggctcactgcaatctccgcctcccaggttcaagcgattctcctgcctcagcctcccaagtagctaggattacaggtgcctgccaccatccctggctaatttttttgtatttttagtagagacagggtttcaccatgttggccaggctggtctcgaactcctgacctcaggtgatctgcctgccttggccgtttttttgttttttggttttttttaagagggaaacattcattatgcaaaatttaaatagactttgaaatttttttggtgaagtttgtagcatttagacttctgaagttatgaaagcttcaacctgcaccaagacttttgaagaacactgcatatggaaaacacagacctaagtgtaaaaccctctgtctgttatactcatttgcatactgattgtattgtaagttcttgaggacaagtcttcatttaacaaacagaaagatacagcccctacattgaaagagctcaggtctaatgatgcaggcagataagtcacctagcagaacccactggatgctcaggattcagctcagccacaggcgcacagggcaaagatggctatctaggacagtggggaagtgagccagatagagagcagagaacttttgtttgtttgtttgttttttggagacaaagtctcagttactctgcggcccaggccggagggcagtggtgcaatcttggctcactgcaacctccacctcccaggttccagaaattctcctgcctcagcctcctgagtgtctgggattacaggcacacgccaccacacctggctactttttgtatttttagtagagatggggtttaaccattttggccaggctggtctcaaactcctgacctcatgtgatccacctgcctcagcctcccaaagtgctggtattacaagcatgagccaccgcacccggccaggagcagggaactttcttacggcagaagcgggctgtcctcgggccccttcaggctgaaggcagtggatcgaggccacagctgtgagcaggcagctaatgtccttcagttctaactgaagcaagagtagaggagcttagatctcagacttggtgtgtcagttgaggaagtccactggctttttgggatatgctacagggaaagagaaccccgtctttaaggagacctgattgaccgtcattccctgctgctccacaggatgcagaaggctatcaacaggctgagcaggcttctgaaacctggcgggatgatgcttctgcgagattacggccgctatgacatggctcagcttcggtttaaaaaaggtattttgaaagtgctgaatcctaaccactagagatcatgtcctttgcagggacatggatgaagctggaaatcatcattctcagcaaactaacacaagaacagaaaaccaaacaccactttttctcactcataagtgggagttgaacaatgagaacacatggacacggggcggggggcatcacacactggggtctgtctgggggtgagggggctgggagagggatagcattagcagaaatacctaatgtagatgacgggttgatgggtgcagcaaacctccatggcacatgtatacatatgtaataaacctgcacgttctgcacatgtaccccagaacttaaagtataattaaaaaaaaaaaaaggtatttggccactataatcaaaaaatggtgctgccatcagaatagaaactctagaattagaactccttatataaagccatttaatatgtgacagagtagtatattttttaagaaaactgaagaggcttgtataatctagatattgaggtctttttaagcaagacagctacctttagaagagcttttattagaaagacatttgaaagacagccgggcgcagtggctcatgcctgtaattccaacactttgggaggccgaggtgggtggatcgcctgagttcaagagttcaagaccagcctgaccaacatggagaaaccctgtctctactaaaaatacaaattagctgggcatggtggcgcatgcctgtaatcccagctactcgggaggctgaggcaggagaatcgcttgaacccaggaggcagaggttgcagtgagccaagatcacaccattgcactccagcctgggcaacgagtgaaactgtctcaagaaaaaaaaaaaaagatatttgaaagacataaataattttaaatgtggcatgacaaaagatgccattaaaaatgtaaaaggcaaatgacggagtaagaaggaatattttcagtgcatataatagataaagacttaatatctttgctcttcaaggagctctcatgaaactgataaggaaaagatcagtgacccacccaaaaaacaggcgaggagtatttagtcagttcacagaagaacatatctaaatggccagtaaacaacacttcaaggaaataaaaataacgagttagtacttcctattgctggccaattcaaagaaagaggtgcattccttcattactggtagaaaaagaaattgttacagcctttttttttgagatggagttttgccgttattgcccaggctggagtgcaatggcgtgatctcggctcactgcaacctctgcctcctgggtccacccgccttggcctcccaaaatgctgggattacaggtgtgagccactgtgcccagtgttacagcctttttttttttgagacggagtctcgctctgtctcccaggctggagtgcaatggcacgatctcggctcactgcaacctctgtctcttgggttcaagcaattctcctgcctcagcctcccgaatagccgagactacaggcatgtgccaccacgcctggctaatttttttgtatttttagtagagacagggtttcaccatgttggtcaggctggtctcgaactcctgaccttaggtgatccacccacctcagcctcccaaagtcctgggattacaggtgtgagccactgcgctcggcttacagcctttttttaagcacccaattattgttcaatccagtcattttttttgaatatagtcaagaactagcacataatacatgcaggagcaaaactttgtaaacaaagtgaatgcctctggatagggagatgttgtgcttgtcacctgaggtggaccccgtaccactgaacttggagggatttctgttctgtattcagtgagaggagagcaatgtgcaagggagtattttaaactccatccccctataccagtatctgcagggaaataagtacacacttgtgtgatgatttgggcattcaggaaggtctagaagtatgtgccaggccggtaaactgaggtaaggtcagggaggttagcagcagaagggaaagcatgttcatgatcaaaacaatatctgagttgtatttatgattctgtagacatgtgaagagacatgcaaaggacagtcaccaccaaaatggtaatgattgtctcaagtttccttaaactcagctatattgcttaattaaaaaaaataaaaataggccaggcacggtggctcatgcctttaatcccagcactttgggaggccacggtgggtggatcacctgaggtgaggagtttgagaccagcctggccaacatggtgaaaccctgactctactaaaaatacaaaaaattagctgggcatggtggtgggaacctgtaatcccagctacttgggaggctgaggcaggagaatcacttgaacctgggaggcagaggttgcagtgatccgaggtcacgccattgcacccagcctaggcaacaagagcgaaactccgtctcaaaataaataaataaataaaaagtttgtgctgttaatttaatggggttgggagagtgaacaagttgttttcatcaaacaattctagagttttggagtggggtgcttaggaacgtcatgttttctgacattgtgacttactcctgttgagctgctcttcccgaagcactgaggcaggagtgctctccacccaacaaactgacctcccagttaacattccttagcaatgcgagtcaaagaagtgcttttaagtgtctctgatttttaacacatcactctgcaggtcagtgtctatctggaaatttctacgtgagaggtgatggaaccagagtttacttcttcacacaaggtatgaaacacccatctttttacactaaaagtccccagtaccagatgagatggtcttcaaggcacgttcagaaggaaaactatctggtccctcctgccttttaggcaggctgtttcctgcggttccctgctgctcacaccctcttccaccctgggctaggctacccatggcagccaggcactggggcccccaggcagccctggcttgtccatgccttcagtcctgctctgctctccctgtctgccactgtccaaaatgggaagcctgcccactctgcaaggctcatctccagtccagcctgtttcaccctctacacggggttgtgctttggtgtgcccgggtcagggtgaaccctgggttctaggggtgctgggaactgctctcctctgcaactggcctatccacaggcttcatccttcacctgggccttccaaattctccgttcctgggcccttttcagggtcaccttctttgagcctttggttaagatgatgaaaccactttcctaaaacaattgctttgacatacatagatatttttgcataaattttaaggtgttcatagagcctaaaggccaaatataaaccaaaggtttttaaaaaagaaaaaaccgcggcccatacgcagtggcttcccctacctaaacatgaacttactgttaccaagccaccactgcatttataaccaaatggccatgtaaaaaacatgacagcaacttcccagagccccttttaacaaggacttagtagataaaaatgccttttcttgaggggaaaaatgcataaacatcttttattttccacactagaggaactggacacgcttttcaccactgctggactggaaaaagttcagaacctggtggatcgccgactgcaggtgaaccgaggaaagcaactgacaatgtaccgggtttggattcagtgcaaatactgcaagccccttctgtccagcaccagctgagaggcacctgctgccaacacgatgcaagcccattgtgtttccgggcttttttaaaaaaaaaattgtagcactgggcgtggtgcatgcctgtaatcccagccactcaggaggctgaggcggggaggatccattgagcccagcagtccaacctgggcaaaatagtgagagaccctgtatctgaaagtaataataaaaataaaaaatataaatgaggtctcgttgatgttggacaattcaagaattcagacttgaaccttaaacctaggaaaagttactttgtatcaggattctaacaattatgcttcatatttgtgaagtcctttaaaacataattttctcaagttctttctttgagatctcaatctgtcttagcattttgtaactaataactgaaattttattcaaaggaattgtaaaccttaaaccaccaatttatttccatgtgaaaaagtgttacatatgacaagtgttttttgactgtaattgcgttaaatcttttgagaatgtaaatgccgggctaggcaattgcagttaatacatacagaggttagtgaagggcttattaagttgtaggggaagcaagctgggaagaatcagatcagatattttcctgacaaaaaaaaatgaccctacagagagcatcaaaatgtggtgttcttgttaagtaattgatcgtggtcttcgctttaatcttagttccgccaggcacggtggctcacacctgtaatcccagcactttgggaggccaaggcgggcggatcagctgaggtcaggagttggagaccagcgtggccaacatggtgaaaccccgtctctactaaagataaaaaaattagctgagtgtgttggtgggtgcctgtaatccagctacttgggagactgaggcaggagaattgcttgaacccaggaggcagaggttgcagtgagctgagattgtgccactgcactccagcctgggcaacaaagcaagactctgtctcaaaaaaataaaaataaaaaaaaaatcttagttccatggaattttaagcattgttccccctctaacctgtgtctaaagaattaaaagaatttggccgggtgcggcagctcatgcctgtaatcccaacactttgggaggctgaggcaggcggatcacgaggtcaggagatcgagaccatcctggccaacacggtgaaacctcgtctccactaaaaataccaaaaaaattagctgggcatggtggcacacacctgtagtcccctgtagtcccagctactcgggaggctgaggcaggagaatcgtttgaacctgggaggtggaggttgcagtgagccaagatcatgtcactgcattccagcctgggcaacagaggaagactccgtctcaaaaaaaaaaaagaaaagaattttcactttttgcaaaattatcttttttaatgcacccttaagtgtttgacacaaaaggaattgagggaacttcttaattttaaccacatcatcacttcacttctgaatgtgatcattatcagtgttagatgc

SEQ ID NO: 7208 - DNA, 9474 bp, Homo sapiens
ttttttttttttttttttttttttttttgagacaggatttctgtcacccaagctggaatgcagtggtgccatcacagctcactgtagcttcaaccttccagggttcaggtgatcctcccacctcagcctcccaagtagctgggacaacaggcgtgtgccaccacccctgctaatttttgtcttttttgtagaaatggggttttgccatgttgcccaggccagggttcttaatatttttttaatgtatctgataaagccttaggatcatttctcaggctaatgtatttttcatttgttttctttttatatataacagctttattgagatataaagtgtgtaatacagtggtttttttgtttggttggttttttgttttgttttggtttggttttgaggtggcatcttgccctgtcgcccgggctggagtgcagtggcacgatcttggctcactgcaacctctgcctcccagtttcaagcgattctcctgcctcagcctcctgagtagctgggattacaagcgcccgccaccacacccagctaatttttgtatttttaggattcactgtgttggccaggctggtctcgaactcctgacctcgtgatctgcctgcctcggcctgccaaagtgctgggattacaggcgtgagccaccgcacccggctgtaatacagtggttttaagttaattcacagagttgtgcagccatcactgcagtcaacttcaggacattttcatcaccccaaaaagaatccctatacccattagcagtcactccccatttcccaatttcccccaatctctagccctaagcaaccactactctacaaatgcacaaatctctatatagatttatcttgggctaattttaagtatatgaagtaaaatagagaaaatcaattattttgaaatacagttctatcctcagagcccaattaaggactctgattttaaaaataatactcttagcccttcatattcaccttttctgcatccgaggattcaagcaaccatggattgaaaataaatagtataggccaggcgcagtggcccatgcctataatcccagcactttggaaggccaaggagataggatcacctgagcccaggagttcaagacgagcctgaacaacatagtgagaccccgtctctacaaaaaaattagccgcctggtgctgcggctcacgcctgtaatcccagcactttgggaggccgagacgggcagatcacaaggtcaggagatggagaccatcctggctaacacagtgaaaccccgtctccactcaaaatacaaaaaaaaattagccagtcgtggtggcaggcacctgtagtcccagctactcgggaggctgaggcaggagaatggcatgaacccaggaggcggagcttgcagtgagcggagatcgcaccactgcactccagcctgggcgacagagtgagactccgtctcaaaaaaaaaaaaaaaattgccaagcatgctggcatgcacgtgtagtctcagctactttggaggctgaggccagaggattggttggggctgcagtgagccatgatcacaccactgtactccaggtgacagagcaagaccctgtctcaaaaatcaataaaacaacaatttttaaaactataactgtttacatagcatttatattaggcgttatagatgatttaatgtatgcaggaggatgtgtgtgggttgtatgcaaatgctacacccgacaccattgtgtaagagacttgagctggataccaagggacaactatatgacctgtagaaaacttaaagaaaagcacaggccgggcgtggtggctcactcttgtaatcccagcagtttgagaggccaaggtgggtagatcacctgaggtcaggagttcgagcccagcctggccaacatggcgaaaccccatctttactaaaaatacaaaaattaaccaggcgtggtggtgggtgcctgtaatcccagctactcaggaagctaaggcaggaaaatggcttggacccaggagtggaggttgcagtgagccaagaccacgctattgcactccagcctgggtgacaaaagcaaaactccgtctcaaaaaaaaaagaaaagcacaaagaggccaggcacagtggctcatgcctgtaatctgaacactttgggaagccaaggtgggcagattacttaaggtcaggagttcaagaccaacctagtcaacatggtgaaaccctgtctctcctaaaaatacaaaaattaacaaggcatggtggtgggcacctgtagtcccagctactcaggaggctgaggtgggagaatcacttcaacctgggaggcagaggctgcagtgagctgagattgtcccactgtactccagcctgggtgacacagccaagacctcgtgtctcacaaaaaaaaaaagaaaaacatgaagaagaaaacaacgcttgccaggcgcggtggctcacccctgaaattccagcaccttgggaggccgaggcaggtggatcacctgaggtcaggagtttgagactagcctggccaacatggtgaaaccccgtctctactaaaaatacaaaaattagctgggtgtggtggtgcgcacctgtaatccgagctacttgaggggctgaggtaggaggatcacttgaacccaggaggcaaagactgcaatgagtcttttagaaagcagaagctgagtctgatagaacttagcccgtgaccttaatgggtactcggcagatgcagctgcctggctgattcgagaacaggacaggcatggaccctgctttcggagcagtgctgtggaatagaactttgtgcagtgatggaaatgttctgcatcttcactctcccttatggtgggcactagccacgtgtgaaacgtatctaatgggactgagaaactgaatttttaatttaagtagccacaggtagctagtgattaccatagcaaatgctgcagttccccgggtttttagtcttgattatacctcccagaagttgtctgctccaaaggtcaacagttcagcaggaagcagagcccatgcctttgagaggctggaggtattgcatactcccaaaaatcccagcgtctcactcaaattatgagcccaacagtgcagaagagctctgggctgttgtttctaaaacgcaagcatacagccttcctcctctcccatttttatttagacctgtactaacaaaaagaattctggcattacaaattgttttgtattttgatgccttcagaataaatatataatgtgcttcataattggaagcaattttgatggttttaaaatcaacattttttgtgttgctaccttgtgctgagacttgtgctagatagtgaggataccaagaaaaataagcacagggattttgtggtgttcatctttatctcctcagcatctaagataatacacaatgcatagtgggctctcagtagtgtttggtgaactaataagcgaaagatgtaatcgccgctgtgaaagcactcactcactatgtggtgggggccaacagacaggtacagatgtgttcctggtgtggagaaagtgccaaggtggctcagcgaagaaaaaagaattcttgtggtgctatcaagcaaggcttcatttgagggaaaagtaggatttctgtaggtggaaaaagagaagacattgatttgaaactccctggttgttttataaacttcatattagctatgtccacagagcctccaaaaggatataattcaaaaaggattttaaccaaaatgaaatatgttgtgactaatagatacagtttatttgaatgaatgatagtttttcccatttgatattttaactgtgctacacaagaatgagagtagacatagctcgatttgtagtctcattgttttgtcttttctgcccatttcagtgacccaggactctttgtttattgctgtgatttttcttccacagctatagaactggtccaggtgagtacgatgggaaattacctattggtaatttccactgattaaagggaaaaggttctcctaaaaatcaaggtctctggctgtgttcttatacggtctgtgttcttacggtctaaaagtaaaagatttactgataacgagcataccttgttttattgcagttcactttatcacactgtacagatgtcatatctgttcatatattgaaagtctgtggcaaccctgcatcaagcaagcctaccagtgccgtttctccaccaccatatgctcacttagtgtctgtgtgtcatgctttggtgattctcagaatatttcagacttttttactattatgtatgttatagtgtgtgacgttactgttgtacttggtttggggttccacaaatcacatctgtgtaagacggtcaacttaataaatgcatgtgttgtgactgccccaccaacctgccattccatttctctccctctcctcaggtctccttgttctctaagacacaatattgcaattaggccacttcatactctacagtgtcctctgtgtgctcaagtgaaaggaagagtttcaccacgttgcccaggctggtctcgaatgatagcttacacttgtgttgtaattattaaatttaatacacaattgcataaactaatgaaatacgattgcatgccggtgcggtgactcatgcctgtaatgccagcactttgggaggccagggtgggtggatcacgaggtcaggagttcaagaccagcctgaccaagtgaaaccccgtctctactaaaaatacaaaaaaattagccgggctaaaaatacaaaaaatggcacatacctgtaatttcagctactcaggaggctaaggcaggaggagaatcacttaaactcaggaggcggaggttgcagtgagctgagatcgcgccactgcactccagctagacgacagagcgagactccatctcaaaaaaataaaaataaagataaaaatacgttattggttggccacaatggcttaacgcctgtcatcccaacactttgggaggctgaggcagacagatcacttgagatcaggagttcaagactggcctaggcaacatggtgaaaccccatctctactaaagaaaaatacaagaaattatccaggcatggtggtgggcacctgtagtcacagctactcaaaaggctgaagcaggagaattgcttgaactggggaggcaaaggttgcagtgagccaagatcgtgccactgcactccagtctgggtgacagagtgagactccatctcaaaaaaaaaaaagggagaaagaaaaaaaatagtttattgctaaaacatattaataatcatctaaaccttcagtaagttgtaatctttgctagtggagggtcttgccttgatattgatggctgctgactgatcagggtggtgattgccaagggctggggtagtggttgctaagggctggggtgactggcaatttctttttttttttttttttgagacggagtctcgctctgtcgcccaggctggactgcagtggcgggatctcggctcactgcaagctccgcctcccgggttcacgccattctcctgcctcagcctcccaagtagctgggactacaggcgcccgccactacgcccggctaattttttgtatttttagtagagacggggtttcaccgttttagctgggatggtctcgatctcctgacctcgtgatccgcccgcctcggcctcccaaagtgctgggattacaggcgtgagccaccgcgcccggccggcaatttcttaaaataaggtaacaatgaagtttaccatatcaattggctcttcctttcatgaaagatttctctgtagcatgcgatgctgataggattttgcccacagtagagcttctttcaaattgaagtccattctctcaaaccctgctgctgctttatcaactaagtttgatgccatttcaaaacaaaaaacctttcttgccatttcaaaacaatgttcatagcatcttttctggagtagatttgatctcaataaaccactttctttgcccaaccgtaagaagcaactccttatagataaggatgctggttgaaagaaagaaagaaagaaagaataagactaaaaaagaagaagcaacaagattgcagcaattcagttacatcttcaggcttcacttttttttttttttttttgagacagggtctcactgtgttgtccaggctgaagtagagtgacacaatcatagcccactgtagccttgaattttgggctcaggcgaacctgatgagatgattccattggggttctttgagttacaagtaacagaaacatctagacaaactcaaagcaataaagtagaatgtcatagaacctaagggcacaaaatacagccccaagttcctggtatcttacctctcattgtccagggcccatttgttttttccctctttgcataccagttttctctagtcagtatttcctagttttgcacgtggccccaacgtgcttgcttcttccagtcccttacaagctcaccctgttcaggggttcatggtgcctcactaaaatgattgtgtcccagttctgaagtccctggaaagtctagttaacacaacctagctgataaatacagcagccctgtttgaatcagctttggccaatgagaaacaaactcacatatttggagaagatggacattgagggtagatgccttaaaatgtatctgttatggctgggtgcagtggctcacacctgtcatcccagcactttgggaggccacggccagcggatcatgaggtcaggagttcgataccagcctgaccaatatggtgaaaccccgtctctactaaaaatatgaaatttagctgggtatggtggcacgcacctgtagtcccagctacttgggaggctgaagaatcgcttgaacccaggaggcagaggttgcagtgagccgagatcgtgccactgcactccagcctgggtgacagagcaagactccatctcaaaaaaaaaaaaaaaaaaatgtgtctgttacaattggccaggcgtggtggccagcactttgggaggctgaggtgggcagatcacttgaggtcaggagttcaagaccagcctggccaacatggtgaaaccctgtctctactttaaaaaacacaaaaactaggccgggtgcagtggttcatgcctgtaatcccagcactttgggaggctaagacgggcagatcatctgaggtcaagagttccagaccagcctggccaatatggtgaaactccatctctactaaatacaaaaattagccaggtatggtggtaggtgcctgtagtcccagctactcgggaggctgaggcaggagaatcgcttgaacctgggaggcagaggttgtagtgagccaagatcacgccattgcactccagcctgggctacaagagcgaaactctatctcaaaaaaaaaaaaaatacaaaaactagcaggacgtggtggcatgcacctgtaatcccagctactggggaggctgaggcaggagaattgcttgaacctgggaaagcagaggttgcagtgagctgagatcgcaccactccagcctgggcaacagaacaagactctgtctcaaaaaaaaaaaaaaaaaagggtctgtcacaattatgtataatgctgttagggcagattaggaattggtagtgccatgcttttagaattattcatgcagttaaagaccaaatgaatattgaagcctatctttacttcagtttttgataacaaagtaaattttctacatctacagaaatagattttcctgaagaattctatggtttgtgtaatattttctagttgggagttgttttgaatcgtgtactttgttgtttgttttgagacagggtctcagtcactcaggctggagtgcagtggtacaatcaagctgactgcagccttgatctcctgggctcaagtgattctcccacctcctgtgtaactgggactacgggcacatgccaccacacctggctaatttttttttttttttgagatggagtctagctctgtcgcccaggctggagtgcagtggcgtgatctcggctcgctgcaacctccgcctcccaggttcaagcgattctcctgcctcagcctccagagtagctgggattacaggcgggtgccactgcacccagctaattttttgtatttttagtagagacggggtttcaccatgttggccaggctggttttgaactcctgacctcaggtaatccgcccacctcgacctcccaaagtgctaggattacaggcctgcacctggcatttttttattttttgtagagatgaagtctcactatgttgcctagctggtctcaaactcctgggctcaagtgatcctcctgcctcagcctcccagggtgctgggattctaggcgtgatccactgtgcctagcagatcgtgcttttggtttgtttgtttgtttgtttgtttgtttgtttttgtttttgagacggagtctccctctgttgcccaggctggagtgcagtggtgcgatctcggctcactgcaagctccgcctcccgggttcacgccattctcctgcctcagcctcccgagtagctgggactacaggcacctgccaccacacccggctaattttttgtatttttagtggagacggggtttcaccatgttagctaggatggtctccatctcctgacctcatgatctgcgcgcctcggcctcccaaagtgctaggattacaggcgtgagccactgcgtgcttatttaaagtatgtgctgtctctctccttatgaatgtttttttttttccctgttggtcactcattttcatgatcgttttccaattcttagatctgacttcatgcatgagaagtacagaaagtacacaagaataaagaataaaagtaggggagtcaggaatgttctattttaaacgcaactattagattcctcactgtctcccttcaattattcctgatctttactctttgagtcctccctgaaataacatgctattagattgatgcaaaagtaattgtcgtttttgccattacttttttttttttcttttctttttttagacggagtttcactcttattgcccaggctggagtgcaatggtacaatctcggctcactacaacctctgcctcctgggttcaagcgattctcctgcctcagcctcccgagtagctgggattataggcatgcgccaccacacccagctaattttgtatttttagtagagatggggtttctccatgttggtcaggctgctctcgaactcctgatctcaggtggtcctcccgccttggcctcccaaagtgctgggattacaggcatgagccaccacatccttgccattactttcaatagcaaaaaccacaattactttttcaccaatctatataatgattagaaatatatcccctactctggagggtgaggcaagtgatcctatcgcgtgaacccaacagtttgaggccagcctgggcaacatggggagattttgcctcaagaaaaaaaagaaaaaagaaataga

SEQ ID NO: 7209 - DNA, 4634 bp, Homo sapiens
acgacctgtgtgatgaagagaagagttacccagtgcccaagggagtcttgatattatcattctcatatttgttctttcagcaattgttccagacaagtaagtttgggtcccttggctggtagtgtcacaaaaaggaagctttggtgagggacctttttttttaaaataggttcttgctctgtcagcccaggctggagtgcagtggcacgatcatggctcactgcagccttaacctcttgggcttaaatgatcctccctcctcagcttcccaagtaggtgggaccacaggcacgtgccaccagtcctggccaatttttgtgtttttagcagagatggggttttgccatgttgcccagactggtcttgaattcctgggctcaagcgatcctcccaccttggcctcccaaagtgctgggattataggtgtgagccaccatgcccagcctggcgagggaccttgatattagagttgggctcaaagtaaaaagagttttgtttatgttctgatagacacaaagaagccacaccatttgtagtgatgtgagcatctcagccattttcctaaatttgtcttgatgtccaacttctgttctggcctcgaaacttctgcagtagttggttcttcatttccttgttgtggctcaacattgggaaagaatgggaaatcagtctctaatgagtatgtggggaaattcctattgatagtctcatcacatgccgttttagaactgtgaactgtgggtgtcacagctcttaggtaatgtctcattattggatttttattttattttattttatttttttgagatggagtcttgccctgtcgcctgggctggaatgcaatggcgtgatctaggctcattgcaacctccacctccccggttcacacaattctcctgcctcaacctcccgagtagctgggattacaggcacctgctaccatgcccagctaatttttgtatttttagtagatgcggggtttcaccatgttggccaggctggtcttaaactcctgaccttgtaatctgcttgcctcaaccttgcaaaatgctgggattacaggcatgagccactatgctggccttttttttttttttgaagacggagtcttgctctgttgccccggctggggtgcagtgatgagatcttggctcactgcaacctccacctcccgggttcaaccaattctcctgcctcagcctcccaagcagctgggattacaggtgtacgccaccatgcctggctaatttttgtattttttttttttagtagagatggtgtttcaccatgttggccaggctggtctcaaactcctgacctcatgacctcatgatccgcccgccacggcctcccaaagtgctggaattacaggcgtgagccaccacgcccagcctattggccttttaaatgctttaaataaaacaaccttattagcaacatgaaatttacattgaaccttaactaaggtgttctctgatgcttacagtgttttaggaaagtgtgatacagaattctataaaatcagattcagattaaaggaaagtcaaatgctatatcctaaaatacaccattaaaacttcatatgcataggtaaccagtggtcctgtgacactaccttctcttttttttttctgagatggagtctcactctgttgcccaggctggagtgcagtggtgagatttcagttcactgcaacctctgcctccaaggttaaagcgattctcctgcctcagcctcccgagcagctgggattacagacaagcaccaccacacctggctaatattttttgtatttttagtagagacggggtttcactatgttggccaggctggtcttgaactccttacctcaagttatccacccacctcggcatcccaaagtgctgggattacaggcatgagccactgcaacctgaccaaaactaccttctcaaggaagcagagtcagatggtggctcagagattcagataccattgactaattccatggaagcccttggcactgccagagtgcagtgagtctggacaggctgggggttggcacatgttagggtaaactatacccatgaaatcatgagattagagacttcaaacatctcctcattctgtgtcatcagagtcctgcaaaggatgattaagtaagttagtgttaaaggtcaaggtaagctggtgttaggaagccagattacatgactagagactgcagggaccagtgattgagatcctggtttatctcccagagtccaaggacccctcactggctgcacaggataggagctttgggtgattgaccttcctctagaaggccacacttcctctagaagggtactgaagtcatccaacctgagaggatgagtgtgaaataaaggcatatgcaggataacccaaaaggcctaccatggttttaaactttaataattgcagaggttgaccaggcacagtggctcacgcctataatcccaccactttgggaggctgaggtgggaggagtgcttgaagccaggagctcaagaccagcttgggcaacaaagcaggaccgttatctctactaaaaataaaaataaaaaaatttagccaggtgcatatctgtagtcccagctactcagaaggctgaggcaggagtatggcttaagcccaggagtttgaggctgcagtgaagtgagctacgatcacaccactgcactgcagcctgggtgacagagtgagaccctgtctcaaaaaaaacctatgaccttagaagtttcaatgctacaaactttttaaaaattgacatggactaaaacaaattattaaaatttaaaattcaagccagacacagtggcacacacttttagtcccagctacctagagactgaggcaggaggatcacttgagcccaagagtccagccgaggcaacatagcatagcaggaccccagctgttttttgtttgtttgtttgttttctgagatggagtttcactcttgttgcccaggctggagtgcagtgctatggtcttggctcactgcaatctccgcctcccaggttcaagcgattctcctgcctcagcctcccaagtagctaggattacaggtgcctgccaccatccctggctaatttttttgtatttttagtagagacagggtttcaccatgttggccaggctggtctcgaactcctgacctcaggtgatctgcctgccttggccgtttttttgttttttggttttttttaagagggaaacattcattatgcaaaatttaaatagactttgaaatttttttggtgaagtttgtagcatttagacttctgaagttatgaaagcttcaacctgcaccaagacttttgaagaacactgcatatggaaaacacagacctaagtgtaaaaccctctgtctgttatactcatttgcatactgattgtattgtaagttcttgaggacaagtcttcatttaacaaacagaaagatacagcccctacattgaaagagctcaggtctaatgatgcaggcagataagtcacctagcagaacccactggatgctcaggattcagctcagccacaggcgcacagggcaaagatggctatctaggacagtggggaagtgagccagatagagagcagagaacttttgtttgtttgtttgttttttggagacaaagtctcagttactctgcggcccaggccggagggcagtggtgcaatcttggctcactgcaacctccacctcccaggttccagaaattctcctgcctcagcctcctgagtgtctgggattacaggcacacgccaccacacctggctactttttgtatttttagtagagatggggtttaaccattttggccaggctggtctcaaactcctgacctcatgtgatccacctgcctcagcctcccaaagtgctggtattacaagcatgagccaccgcacccggccaggagcagggaactttcttacggcagaagcgggctgtcctcgggccccttcaggctgaaggcagtggatcgaggccacagctgtgagcaggcagctaatgtccttcagttctaactgaagcaagagtagaggagcttagatctcagacttggtgtgtcagttgaggaagtccactggctttttgggatatgctacagggaaagagaaccccgtctttaaggagacctgattgaccgtcattccctgctgctccacaggatgcagaaggctatcaacaggctgagcaggcttctgaaacctggcgggatgatgcttctgcgagattacggccgctatgacatggctcagcttcggtttaaaaaaggtattttgaaagtgctgaatcctaaccactagagatcatgtcctttgcagggacatggatgaagctggaaatcatcattctcagcaaactaacacaagaacagaaaaccaaacaccactttttctcactcataagtgggagttgaacaatgagaacacatggacacggggcggggggcatcacacactggggtctgtctgggggtgagggagctgggagagggatagcattagcagaaatacctaatgtagatgacgggttgatgggtgcagcaaacctccatggcacatgtatacatatgtaataaacctgcacgttctgcacatgtaccccagaacttaaagtataatt

SEQ ID NO: 7210 - DNA, 168 bp, Homo sapiens
cttggctaatttttttttttttttttttttttgcgacggagtctagctctgtcgcccaggctggagtgcagtggcgtgatcttggctcactgcaacctccgcctcccaggttcaagcgattctcctgcctcagcctccagagtagctgggattacaggcgggtgccac

SEQ ID NO: 7211 - DNA, 687 bp, Homo sapiens
tcagtggtgcaatgatagctcattatcacctcaaacttctggctcaagccatccctccgcctcagcctcctgagtagctaggactgcaggtgggcaccatcatgcctagctaattgttagatcctttttttttatgttctgcattttttcagttatttttacatatttctctcttgatccatgcagttataggatatatccttaattttagaaagtaaggacttttcgaccaggcgtggcggctcatgcctataatcccagcactttgggaggccgaggtgggcagatcacttgaggtcaggagttccagtccagcctggctaacatagtgaaaccccgtctccactaaaaaataaaaaatcagcccggcatggctgtgggcgcctgtaatcccagctactcaggaggctgaagtagaattgcttgaacctgggaggcagaggttgcagtgagccgagatggtgccattgcactccagcctgggtgacaagagcgaaactgcatctcagaaacaaagatgcctagctttcaccttgttgatgtttttctaaattttggaataataaatttatataggaatactgcaagaatagtccatttttttctgatgtcccaacatcaccaaatgtatccatcacaagtaggaatacatggaaacattaatgccagccactaaccattcatgtt

SEQ ID NO: 7212 - DNA, 382 bp, Homo sapiens
cacaaggtcaggagatggagaccatcctggctaacacagtgaaaccccgtctccactcaaaatacaaaaaaaaattagccgggcatggtggcaggcacctgtagtcccagctacttgggaggctgaggcaggagaatggcgtgaacctgggaggcggagcttgcagtgagcggagattgcaccactacactccagcctgggtgacagagtgagactccgtctcaaaaaaaaaaaaattgccaagcatgctggcatgcacctgtagtctcagctactttggaggctgaggccagaggattggttggggctgcagtgagccatgatcacacacaccactgtactccaggtgacagagcaagaccctgtctcaaaaatcaatcaa

SEQ ID NO: 7213 - DNA, 106 bp, Homo sapiens
atcccagcactttgagaggctgaggcgggtggatcacgaggtcaggagattgagaccatcctggctaacacggtgaaaccccgtctgtactaaaaaatagaaaaaa

SEQ ID NO: 7214 - DNA, 44161 bp, Homo sapiens
cctcgtggtggactcaccgctagcccgcagcgctcggcttcctggtaattcttcacctcttttctcagctccctgcagcatgggtgctgggccctccttgctgctcgccgccctcctgctgcttctctccggcgacggcgccgtgcgctgcgacacacctgccaactgcacctatcttgacctgctgggcacctgggtcttccaggtgggctccagcggttcccagcgcgatgtcaactgctcggttatgggtaagccgccggctcggcagtcctccgggtcgtcctttctgcccttgagcccctaacgcagcgccacgccaactaccgcttccccccaggcagacgcttgtgggtggccagagcatcttgactggattcggggacccttggggaccttcttccccgccaggctcgcgaagttaaagttcatctgctgagaacttctaactccacactttcttggttatcttggggactcaacactttgatcaagaacttttttattcctcccgcttaattttgtttgctttgagagagacttgggaactgcaatcgtttggttctccagtccgatctggtagcgttatttttaaaatttatttttattttttattactattttactagtgaagatagatgagctcagagactctcgaggatatagcatgaagttttctctttttgttagatggtgggaaagggactttctgcccagcgattttggtttgagcgggtgttgatgagtactagaaaacggctagtaccactctgcattgtttcatgcattgcaaggaggtaaaaattttttaaaaaattaataacaaagaaaacttaactctgaacctagtaattagaaatgcccagagtctgcacaatgtttggctcatggaaggctctcaataaatacctagtgtttgaacatactggagatattccatatgccttcagataacatggttacccctagaacaaagaacctagtgaagggggtggggtggaaaaaagacaatcactagttagaagagtcacactgtggtctacccaaaccctcttacagcctgtgacttctgcagagtcagtaaaaaatcagctataattttcttgtcaacagaacaaagattaagtcatttgttactaaagaaatacctttttaactgactgtatagcatttcataatcctgaacattgtaacttttttttttttttttttgagaatggagtcttgctctgtcacccaggctgtagttcagtggcgggatctcggctcactgcaacctccgcctcccgggtttaagcgattctcctgcctcagtctcccgagtagctaggattacgggcacatgccaccacgcccggctaatattttgtatttttagtagagacgggtttcactgtgttagccaggatggtctccatctcctgacctcgtgatccgcccgcctcggcctcccaaagtactgggattacaggcgggagtcaccacgcctggccttttttttttttttttttttaaatttgagtttgaaggttggggcagaaagagatcaggatttgcactgccctgtcacatgcaatctcccatgtcagagcattactctcaaacatggaaaaactttaaaatacacaactctccagatggacacagctgaatcattttcaggaaggctctgcctataaaattacctttggccttaattcagtaattaaaggcacccacaggtctgagccctcatctatgaaggttaaacgtatcattcctatcagcactaattggttttataggatacagacctctagtttgctgaataaactttggaaggattcagattatgaggttctaaactgtagagcctttgaggagaaaggtaccccatttcttctccgaatagatcattttgtgtcttctcctgggcttagcacattgtcttccttaggatctgatagtctgtttatttatctttttgttgtcataccttttattcttgcatttcccacttttgactagcattttgccttttctccgtttctggaagcctgtaattttcaacattccccatttctccttttgttcagtggaaaaatttcttcagtgttgggatgctctggaaaggtactgtagttttgggggtctccctgcctgctgggctgcatagcatatctctcttttttgagacaaggtctcactgtgttgcccaggttggaatgcagttgtgcaatcatagctcactgcagcctccaactcctgggctcaagcaatccttccacctcagcttcagccgctcaaatagctgggactacaggcaatgcaccaccataaccagcgaatttttaaaaattatttttgtagagacagggtctcactatgttgcccaaactagtcttgaagttctgacctcagccccgcaaagtgctaggattacaggcgtgagccactgcttctgcttgcattatctcaaatttttagagcctaacttcacagtcttgcctcggagcaggaactgtttgaggcaacaagatggagcctctggtttcttcactaggcagactgtgctcaaactgggtagcatgaaaggaaagcagcacaattaaaattgaaattgggggattctttcccctattgaaatccaaataattttcctttattgtgctttttttttttttctttaggaccacaagaaaaaaaagtagtggtgtaccttcagaagctggatacagcatatgatgaccttggcaattctggccatttcaccatcatttacaaccaaggctttgagattgtgttgaatgactacaagtggtttgccttttttaaggttagttttgttggaagttggatttacattttcaatgatttgatatctgaaacctcttctgattagtagaccctcagaattttaattttagattaagaagatgaccggaattgacaccactcttcccaagagtagtagtagttggtataattttgccactttatttaaaattatgattttagtaggtttacaaaataccagtgctacatttgaatatgtataaattatgtttaaaatttacattttggtaagtatgactaaattcttaatttattttccttattactaccactttatttctaaatgttgccatagtcatttggctttgttctaaatctgtaggaaagatagagagattacacattttgttttcttgcagttactatgctgtccttcctatcactacctgttggctgaggtagtgataggcctaaatgattcattatcttaaatgtactaaatatgttgagtaattttttcttctaaactaacagaaagagagaacctaggagttactcccttaggctggttaaagtgaaaggtagccaagtcaacccagcttgtttccttctctcattaggaaagaactattgttcattctcataacacactttttccaattgcaaacatactcagggttaaaatagtttagcacaaattgcagcccatttcatttgttcttcacaagctggaacttttcttgtaagctaaatattaaatggttcaagtaaattggatacataagcctgaaactaggcgtttctcattatacatagagtataaattaagacagactttttcatggtgaaaggtttacagcctttaaaacatctgggaagaagtgggaaagtagggaataactctgttaaatatgataaaagacaaagcaccaacaaaggcctagttctaaacttgttataatttctcatgggagttgtggtttgtcacaaggttatggcggtccaagcaagtttacaatattttttagaataataactcccagaaatatttttaaaataaggacctttctttaatatggaaaaaaaaaagatgaaatagagaggaagaggttgcctttcctcaactggatttgctggtgtgatatgcagctggtggaaaccagtttgtccatgctagctgttgatggccaccagtccactgaattagtggaaacccatgcttaaccagttgttaactatttttagtatcatttccagatgctacgcattttttttgtaaaaaacatacttacaatagtatctatataaatttttaaaattgtaatgtatatgtggtatatttaacctgaaaataatctttggtgtatacgttgatgagcctaggcctttgcagacctcttacagttactctgtcacagcccttcaaaggttctttgacttcagattaagaatcaattgcatgtggaatgcatgtgcaaaggaagagatattcaaggcaattgttaccatgtaccataaaccttgtacataattttttgtcattttcttttcctctgtctctatcccttcttctttgacacacaatagacacctagtcaatttattacaaaaaaaatgaatgaatgaagtggaattcagttgggaaataggttaaataaattatttaggagatgaggaataggtaaaaagagacaagtacatagtttattcttttgacttagaaaacttttgattcttaaattctgcagaattggagaaactggtggggaaacttctaaaatcattatttaattaccagagatgtaatagatatagacaaaagcagttttcttcttttattattttttcatcagttagttcttagcttaaatagtagtccaaagctggtagggacagagggaattagctggtggctgaatgaggaattgtatcactttttgtgaatcacggtgtaagcacatttggtgttttgccattgcctaagaacattagtcacattaggtcaatagaaaatcactttttaaagccaaataaagttatatgtgttcccaaccatgagttggaaagaattaatatatatgctgttggagggtagaaccctgcctaatcatatggttctggatggcattgatcgaatccttattctttcattaggaataacaatagaaaaaatactcctgccctactgatttcaggatatgtctattttaaagtgcccatttgacaaaaccattatcagggccatgttttctttttctgcagaaaaatcaaccactctggtcagtagttaggtcttatgacaagcaccataatttccttaggcagagtagaatataataggatacttctttttgaaacttaatataatcaggtagttccagataaacatagcttgcaaagtgataaaataccatgttattttagtaaatccaattgcaagagtgatgggaaacagagtttaaaaacttaagaaagatattaagatggagttgactttgaataataaagtcatccactgttgatgggtgacatttattaatacagaaagtttacagattttaccataagcatcagggtatttcctgcagctggggaaaccgtgcttgaaaggatgcgtaactcaaggaaaacacaagcccatgtaataagtattgcatgtgagaattgttcctatagaattagaaagcatcttttacattaaaatttatttttgtaaaaagagaaaacatcaaaacttgagtagtatttgctattcaaagagtcttacataaacgaaaacatactcaacctactgccattacagaaatatttgacaaattcttgccatgcttacctgccatcgttgttgttatcctacaaatcaattggattttcacgcctctccactgactggaaccctacaacttgcttccttttatcctctttatatatgcttcagatatgcttgaagtagattgtttcttattgttcttgctgctcgagtttgttgagtagttggtacatgcagagtatttgtatgttatgacatatataggttttgtccatggttcctggctcataactcactcccaagacccttgttacagaaaccagaatctctctctctgatcttctcctaccctcctttcatctgcccactgcagaactctaatctgattatggtttctaagaccctcataccagagagtattctgccccataccatagcagaaggaacactgcacagagacaccaagaagaatctgaacagacaggccttgttaggtttagatcatgtccttataacctaattatattttaacatggttatccatgctttaatcatgtgtattcaatgaacgctccataaaagcccaagaagaacagatttgagggaattctgaagcgctaaacatgtagggtctgacaggaaggtgaagaagaactcatcatgctggaagggtggtccaccctaactccgcagggacagaagctcctgtgtctgggacccttccagaacttgctctatgtatctcttcaagtgcctgtgtatttatatcctttcaaatatcctttgtaataaatcataaacatgtttccctgagtttttatgccactctgtcaaattaattgaacccaaagagggggttatgggaaccccaatttgaagccagtccatcagaagttctggaggcctggacttgagactggtgtctaaagtgggcaggcagtcttggggactaagccctcaacctacgggatctgaaactgtctcctggtaggtagcattggagttgtactggagggcactgagctggtgtctgctgcagaattgattgcttgcttgctggtggggagaacttcctacatattttggggtcaccgaagtcttttgtattgattgttgttgctgactgagaataggaaaaagcacgttgagtagtttttccacaccacagcattcttttaggctcctgcttttaccttctgcttccctcagcatcctgcatctcaccaggagagacacagcttctttgccattctcggcattccacttcggaatcaatcagaatagctcctattgctagaaacttgctttattaagttctgtttattcagggcttatctgaaagagaaacattttttatgatttgagatttctaagccattttaaaacttggttttaacagcttgagaaattgggggtatagtagggatggagatacatatatttggatgtgacttcaagctagataaaagtttggaaggaataaaagtttgacatctaaagtttttgcatagtttgagttgagcaggaggtactaggtatgtttttaaaatatttttttcagccaggcacggtgactcatacctgtaatcccagcactttgggaggccgagacaggcgatcacctgaggtcaggcgttcgagaccagtctggccaacatgaagaaaccccgtctctactaaaaatacaaaaattagctgggtgcggtgacacatgcctgtaatcccagctattcaggaggctgaggcaggagaattgcttgaacccaggaggcagaggttgcagtgagccgagatcacaccattgcactccagcctgggtgtctcaaaataataataataataaaaaaatgaaagattttttcttactcagcatcctccaggcattttattatctgagcactttatgggagttgcatattacatttagggcccactcaggtgggtgggtatctaagcatttgaaataaccttatgtaaactaataaggagtaatcaggcctgtggcaagatggaaacagtcttagaggcattcaaattcaaatttcctttaaaacactgggctggccaaaacaaaagacaatactatctacaggccagtttctaagattatcagattttagtagcatttaccatttcattgtacttggcacactttagcaaatttgcacttcttaaaagtacctgcaggcaatctcctatataaaaacacaatgcaggctagcttggctcctgcctttaattccagcactttgagaagttggagactagcgtggccaacgtggtgaaacctcatctccactaaaaatacaaaaattagccaggcatagcagcgcacgcctgtagtcccagttacttgggaggccgaggcagtagaatcacttgaacgctggagacagagcatggagtgagctgagattgcaccactgcactccatcctgggtgacagcgtgagactctgtctccaaacaaaacaaaacacacacacacacaatgtaacaacacgaaacagaatactgtgaaaatgcttaattatgtctgactttacatgatggctggatatgtgattattttttcttctttatgctcttatgtactttgttcatttttaatgatgatcatgtataaagctcctctgtgtagcattctctccaccaaattgcccagagacaggaagtcctgtaaaacaaactaagctccaaaaaatgacctcctgttgaataggcttttttttttttttttttttttttttttgaaatggagtctagctctgtctcccaggccctcgctccttccacctcctgggtttaagagattgtccttcctcagcctccagagtagattggattacaggtgcccgccatcacgcccagctaatttttgtatttttagtagagatggggtttcaccatgttgaccagactggtcttgaactcctgaccccaagtgatccgcccgcctggacctccccaagtgctgggattacaggtgtgagccaccacgcccagcctgaataggctttctaacctactgtttctcattttactttctctgaggcagtaaaagaaactgactctaaaagggagcagtagagaaggaactcagattttattttgaagattaagctactcaagggctgaggaaatatgtagaggggaagtagactcattatggctggaaattttatttggtgatagtgaagcaaatcttagggctttctaattgagctcttgtttgaaaggctccaatcttaatagaactataagctaaaaaaaatgaccatcagtgtttctaaagcaagttgctactcaaaacaagaacactttgggaggctggggctggtggatcacctgaggtcagaagatggagtccagcctcaacatggtgaaacccctctatactaaaaatacaaaaagtagccgggtgtggtggtgcacgcctatagtctcagccacctgggaggctggggcagaagaatcgcttgaacccgggaggtggaggttgcagtgagctgacattgtgccactgcatttcagcctgggtgacagagtgagactctgtctcaaaaacaaaacaaacagaaacaagaactctatgttgagaaatccatactagagggtttaatttctcactttgtgtgctagtgattaataaatttcaagcttatcacacagccagaaatgtcgcctgtgtttctacaataaaagatttgggaatattgtgacattttttcactgagccttctgggttcattattaagatataacaattttagaagacttattgagataggtatactttttaaaatttggattcaatatatcaagctcagcattttgtcttttttttgttttgttttaaacaactttgggtttacttgtaagagtatttcagtggaggaaaagtatcagaagtttagcactgagtgcctgcctaactattttatgtcttctttcatgatgatgcttaatctcaacataatgactcagtttaccattgtaaactctttgtaggatgtcactgattttatcagtcatttgttcatgcagctgggaactgtggggatatatgatttgccacatctgaggaacaaactgggtgagctccattgaaaaatttctaactttcttattaaaagcaagcttcctcacttcctgatggcttatgcaaattaatgcctatttattcatcagagggtgactggagagattatggttttcttatgaatttcttgcttgagcctgcttgtctgctgtttctaagttgtctgcactattttatgtgagtaattttctactttattatgttctgttttcacatgtcaaatcagctctcccaagaatgctacttgtaacctaagtagacgtgaaccgaaaagggtaaagacccagctaaaaaaaaggttgactcaagttcagttcacattcgtaaagtagttaggctgccttaggttgcttattcttttcttgaaaagaatccctcaagagagaaacatgtgaggccacagcagcttagatctgtcttccacagagaaggtggcttttacagagaaattgacatactcatcacttatctgacatgacccagctttgtaaaactggcttctattaaaatagtcttaatagactattcactgaggaggagagaatcttattcactctttacattctcttcacattttcagaatagatgtttaaatcattgctcacactggatccataaatgtctaaaatgttgatgaagaaataggtgattagagagtaaaattaatagagacttacccttccttgcattttaacataatattctttccccttttccttcctctgttacttggctcttaaataccagaagtgagatatgaaaaagggaactgggaacaagtattgaaagcaccataggtttatcttatattagcattttccaaactttataatgaaccagcagtgacccacacatctgccaggtaggaattgctcatcagttgtgtcgcgttatcttgttaagcttcagcaatgttccatacagccactaataacagatcaaagtgagcattagggttgaaattagtaagctgtttcttctcagttctttctggtagttgaataaatatagaatgtattaaatagttttctttatttcagaacttctcagagtctgtaatatattgtatggtggtagcttaggaggaagatgcaataggaaacttttcccagataggttcactattttttttttccacgaaaaataagctgttctcaaaatacagtttacaaaattttatccttaactcttcactctttctcctagttagggagaccgctccaccagtagaaaagataaaccctggtaatttgttgtgtaaatgggataaatagcctagtacctagtcatgtggattcaggcagcactgagcctaaattaaagtttgcaaggtatacatgttaatgtatctaagttactatatttagcctgtttcttaagtatgtttcagaaacatattcgtttttttcagtggcagttaccttcagatgcatgtgcttctaaagcatgttggttgcatgtgcagtacatgttgcttaagcatttagcttcagaatggcatctttcctgtgaatgtcttaacatttacaaaaatataccaggatctcaaatatcagtgctggtatttttttttttttttacttaaagaaactgatatgattaaatattaagagacaatatgatccttgttggcttgtaaccctagtttttattgtcttgtagttattaaatagagcatctgttgagggactcttttaaaaccacagccatgaacagacgttggggctaagagacagagcagcctgcgacagtgtggacctacctgtagcagctagcaaaggcctctagcagctacagtcccttctggagtctttatttgcatgcaaaatgcaaaggagtcctggtgacctacctccaaggcagctgccctcctgaacactcccttggaaaacagtaaacatcattttggaatgtgaacaaccagagactacacaggagaaaggaaaaaaaaattctgaagatgcaaaatcttgggtggcttcaccgttcagttttttaataaaaggaacaatatacaacacgttgttctttttctcttttgaaatcccttctattacagtgatttttttctaagattgtcaggatttgaagtgtatgttttgttttattcacagcgtaaattttattcacagtttaactgtctgcctgagtgtctttcctttctctaattaccttgaggaacccaagagcctgttgtaaggagaaaataaggcccttggatctcttgagattcacagatataagttattgaagggaagatggtcctatggaggacatatttaaagaagggaaaaaagaggctttctcagatatgtcagactgctatagtatacttctacagattatagacctccagtacctctggccagaaagatggtatcgtaaacaccctattttttttcttttcttttttcattaggtacaagctttgtgctaagaagttgacatactataagctacaaaagttctgtaaagtagatataactagtttcattttatagatagagaaaattaatctcttacagtgctaagctcacagagtttctaactgtaaaatgctagaacttgtctttcaagcctaaagacttccttggggctaaatagtgaaaaaagccatttcacaaataagtaaatggtatttagaggcatatttggatttcctggtaaattccagtctgtgagcatcatgaatattagtttaatgttgcatgggctcatgttgaagttttaagagaagaactgccttgaagcttaggtttccttagctattaggctactgactttcttgcctaaaccagggttttttcattgaagaccaaaacttaccttctccttcagtttgtagtttggaaattggtagaagagctttgtaaacttcaaattaagtacaaactaagtgtcatagtcaaatttactaatcttaattacagtattgttcaactgattgctatcttctagctctttcctgccgaataatggtcttgtttcctgctctgttggtttagagctgacttctttcagctttggtaagcctgaaattatggggttatgtttaattcatattgtctgggtggactttcctctcttgcatttctgcttgaatagaagaatttttctctagagagtagtttgtcatccttactctgttgattcagatgactctttgtatgatctgagaggtatactgttctgctattctgagaagaagtatttcagaaagatgaattaagagtacagtggactgctcccacctggaaacttttatctatctcacctctggacctgataaattctttatcactcaggaccttgatgacgctgctctctgaaaccctccccagctctctctattaccgtgagaaacatcagaactttggttcccattgcatatcgcaggtacctctgctttcatgccatgctgtaatggagtgattgggtagcatgttttcatctctttccagattgaaaatctgtatttctccctgtatatcttcaacacctaatgcacatagaactttgtaggtacctggaaaatgcaccacagttttcttttctttttgcagacttttcacaagtattaccaacttacaaagaattaattttgtaggattctagaaagacaaatcaggaatggtgccatatacatcttttttgattccctgctctaaagaatattatcaggttaccttcctgcagagttttaaaagaattgcatatttcaagctgactttcaggatgtaaatataaccaaagcaactgatatgtaaaaaatatattcaatggcattcctagattttcttctagggtgttttattgttttgggttttacatttaagtctttaatccatcttgagttaatttttgtataggtataagaaaggggtccagttttaattttctgcgtatggctagccagttctcccagcaccatttattaaatagggaatcctttccctattgtttgtttttgtacggtttgtcaaagattagatggttgtagatgtgtggtcttatttctgagatcttcattctcttccactggtctatgtgtctgtttttgtaccatgcttttttggttactgtagccttgtagtatagtatgaaagatagcatgatgcctccaggtttgttctttttgcttaggattgtcttggctatacgagcttttttttggttctatatgaattttaaaatagtttcttctaattgtgtgaagaatgttaatggtagtttaatgggaatagcattgaatctgtgaattgctttgggcagtatggccattttcatgatattgattcttcctatccatgagcatgtaacgtttttcccttcgtttgtgtcctctctcatttccttgagtagtggtttgtagttctccttgaagagatccttcacttcttctgtattcctagatattttattctctctgtagctattgggaatgggagttcattcatgattttgctctctgcttgccttttgttggtgtatagggatcctggtgacttctgcacattgattttgtatcctgagactttaccgaagttgcttatcagcttaagaagcttttgggctgagatgatggggttttctagatataggatcatgttatcttcaaacaaagacaatttgacttcctctcttcctatttgagtacgctttatttctttctcttgcctgattgccctggccagaactcccaatactatattgaataagaatggtgagagagggcatccttgtcttgtgccagttttcacggggaatgcttccagcttttgcccattcagtatgatattatctgtgggtttctcataaaaagctcttattatttgagatacgttccttcaatacctagtttattgagagtttttaacatgaagcgatgttgaattgtatcgaaggccttttctgtgtctattgagataatcatgtggtttttgtctttagttctgtttatgtgatgaatgacgtttattgatttgcatatgttgaaccggccttgcatcctggggatgaagccaacttgactgtggtagataagcttttggatgtgctgctggatttggtttatcagtatttcattgagattttttgcgtcgaagttcatcagggatattggactgaagttttctttttgttgtcgtatctctgccaggttttggtatcaggatgatgctggcctcataaaatgagttagggaggagtccctccttttcaattgtttggaatagtttcagaagaaagggtatcagctcctctttgtacctctggtagaattcaactgtaaatccatctggtcctggactttttttcattagtaggctatttattactgcctcactttcataacttgttattgatctattcagggatccaacttcttcctgattcagtcttgggagtgtgtatgcatccaggaatttatccatttcttctagattttctagtttctttgcatagaggtgtttgtagtatttgctgttggttgtttgtacttctgtgagatcagtggtggtatcctgtttatcattttttattgtgtctgtttgattcttctcttatttttgacaaagctgacaaaaagaagcaatagggaaaggactctctattcaattaatcctactgtatatctggctagccatatgcagaaaattgaaactgttcctgtttcttaatccatatacgaaaatcaacttacgatggattaaagacttaaatgtaaaacccaaaattataaaaccctggaatagaatataggcaatatcattctggacataggaatgggcaaagattttatgagaaagacaccaaaagcaattacaacaaaagcaaaaattggcaaatgagatctaattaaactaaagagctctgcacagcaaaagaaactactgtcagagtgaacaggcaaccaacagaatgggagaaaattttttcaatctatccatatgacaaaggtctaacatccagaatctacaaggaacttaacaaatttacaagaaaaaaggagccccattaaaaagttggcaaagaacatgaacagacacttcccagaagatattcatgtggccaataaacatgaagaaaagctcaacatcactgaccattagagacgtgcatatcaaaatcacaatgagataccatctcatgtcacaatggtgattattaaaaagtcaaacaacatgctagtgaggttgtagagaaataagaacgcttttacactgttggtgggaatgtcaactaattcaaccactgtggaagacagtgtggtgattcctcaaggatttagaaccagaaatatcattactgcatatagacccaaaggaatagaaatcattctattacaaagatacatgcacatgtatgtttattacagcactattcacaatagcaaagacatggaatcaacccaaatgctcatcagtgatagactggaaaaagagaatgtggaacataaacaccatggaatactatgcagcaataaaaaggaatgagatcctgtccttttcagggacatggatggagttggaagctgttatcctcagcaaactaatgcaggaacagaaaaccaaccaccacatgttctcacttataagtgggagctgaacaatagaacacatgggcacagggaggggaataacacacactggggccagtcagggggtggggggtcaagctgagggagagcattagaaaaaatagctaatgcattctgggcttaacccatttatgcctagtgttccatttctggaatgctaagcatgtggaagttctttatatcctgctcaaggtcattgccaaggtctgatttttcacattcaacaaattgcaacctctggcataaatgggttaatacctaggtgatgagttgataggtgcaggaaaccaccatggcacatgtttatctatgtaagaaacctgcacatcctacacatgtaccctggaacttaaaaaatttaaaatatatatgtatatatatttaatatggaattttaaaaattactaatgagttcttttatctgagtaattttgcatcaacatgcttttattatggaagagaagattcagtgagtacaaaattgcagatacatgtgtcagaagatccctgaatataataaggcttagtattctgtgtcataattgcctgtttgtattcctctctggtctttaaacttcattagggcaaggatcaactccatcttactaaccatttgattccctatgtattacacgatatatgaccaataataagccttcaataaatacttgtaaaataaagaatgttatgtaatatatcatgtggtattgttttattgatgtgttctttgaagtgttacctttgtgtccttagaggctatggtgggccctcaggccatatatgttggatgatttagtggaaaagagattagacttttatattttattctatttatttatttatgttttaatcttgtgtaagcctatagaggccaagatagggctcagagttaaaaacagtgatgttctaactttcaaaactactaaaaacaaaattagctatcaagggaaatcctgagtgttctgactgcaggggttccccaaagcctggaggaccgaagctttgaaatgctgcatggtgtgcctcacctctgttgagtatagtgaggaacatgagctgaggagtggattagatgaactcttaagatttttttccaactttacggtttgagtttatgagtaagtaagtgaggaatgagcccagggactttgactactttgctgtgcagtaaattgctgttttcttagctaattctggagtgtgtattttggttttaatgtaatgtcctttcagcactggaaataaacagatttatgaccctccattttcacatgtaaacttccagttccttcagtaaaatgctggaagttgcttggctgtaaccactgtaactatttcctggcagttttgcattttattacaattcgactttttaaatgcatggttcagtccagttaataggcagaaaactatagctattccttggaactgacatagggaagttggtttctttctgaggaaagatgtgacactctgatggatttggcaaaataccaattcagtaaaatttgcctggttcctttctgacagcaaatggaggtaattgtacgtatatagatttctacagtaaacaaagggcaaaaatggaaacattttttgttttttaatgttgctggaatataatatttccatatttggttaatcatcaaatcattcaactccatgcaaagtactcttttcaaaattacaaatcatcttgatggattagacttggatgtctaaattttttattatgtattctaaattatctataggtacattttgaaaattatatatacatgtatcactgtactacatttgttataaaatgtgaaatattaagcgattaaatactttattaatgtcataaaattgtgccctacccaaaatatattttaagaagatatcatttgaaaataatgtaaaatattcttcattattatgattttgttgccaaaagtaatgttagagtccctgttactgataattttcatgactgtaaattttcaacatttggaaacaaaattttctgatgtgttttaaaatcttaaagaatttcagtagattttgacacatttttgttaaaagtatgaaagtgtcacagctttagaaggatttagaataattatcaattggtattagggatgacaattttaatagacaaattttaactgaaacatttgctttattgatgtctaggactaaaaaaaatattatagtgatggaaccatttcaaaacatctgtttttaaaaacttctgtcaacatgtttgacagaagtcagaatagggtaattataaaaaaactgccattttcttatgtttgcatcattagtatttgcaaatccttgtttctttgcaagtatattttaaactacttgttcattttatgagtgttagcctgattaattcagataagatgctcaagtcagtttaagcaggcagatgtgaaaaagggaatatgctgtgccttaactatcttatagggacttactagcacactgtacataacagatgaacatctgatattagatctgatgggcacaccaatgttgtttcatatattaaataatagtggaagttttcaatttaattagtttatttatttatttatttatttttgagccggtgtttccctctttttgccaaggctggggtgcaatggcacatggttgcagctcactgcaatctccacctcccaggttcaaaggattcttctgcctcatcctcccaagtagctgggattacaggcgtgtgccactatgccaggctaatttttgtattattagtagagacaaggtttcaccatgttggtgaggctgctctcaaaatcccgacttcaggtgatccacccgcctcagcctcctaaagtgttgggattacaggcatgagccactgcgcctggccaattgtatttttatgttagaaatatatatgggagttacaatactttgtttccaatgttccgctggaaaccactggttgaaaggataggtcccagtgtcagctgcccagttggcagttttggatagaatataagttctatgaaggcatggatgaagtatccttcatggtaatgatggtaatgttagtatagtcacttgtttaatgttgtataactttttaactcttccaacttcaatttcatctatatctttcatagcagtccagtaaagtagtatcaattatagatatcattcctactttcagataaagtaactgaggctcactagttttgacttgctcaaggttacgtaaatgataagtgacagactggatttaaagggcggagtccactttactaaactgcctctgtcttctagccaagtttgttatgtaaagtaagtattcagacattggctaagtatattattaatcaagaaaacagtagaacaggtttaaggaatttttttttccctctcctcagtgtcaaaaagcagtcaagtaaaagatccaagataaataacttcagttcccaaaaataacttcaattccaaaatttccctatgactaggtatatctaattggatagctgataaaatgagtgggaaattgaagaagggatattttgagaatgtgtggcaacttaatggtaatattgaagaagcaaatggatagttattgaatcataatagttttttaaacttaaatactagggcttgatcttcatattttaggaaattatctatttgttgcagtagaaattagcataaatgaatggaaacttaaattatctcatctgtgcaaggcagtcttcagagactgatgtttatataagtgaaaactcagaaaaattttttggctgcatttcaagctggatagcggggtcaaaacttcaacttcttaattggtgatacaacgtcagaaatcacaaaagaagtatttcacaggaaaaaatgacataccccgaaaacattcaaatcaagaaaatcacaggggtacagtggatggtcccccttaaggtactgcgtacttggcttccccgctggtaaatgcctctcttttactaagttgttgtcgtgcagagtggcattgcagctctgtacttttacagaataatttcaggttctaaaattgatacattatttcagattgtaagaatagtataaaataaaattttaaaagggaaaataattccatcaatttaatggaatgtgtagggtttaagttataacaacaaaaacaaagttgtagttttttaggattactcatataaatagtgtgtctattaagaattactggctttatgaatattaaataagaaggctggccgtggtggatcatgcctgtaatcccagcactttgggaggccgaggcagacggatcacctgaggtcaggagttcaagaccagcctggccaacatggcgaaaccctgtctctactaaaaatacaaaaattagccgggcgtggtgacgcatgcctgtaatcccagctactcaggcggctgaggcaggagaattgcttgaacccggaagacggaggttgcagtgagctgagatcgcgccactgcactccagcctgggtgacagaacaagactccatcttgaaaaaaaaaaaaaattaagacaaccacagatataaggatttgcaattagaaagcttgaagggaaatttttggaacttctaggtcaacctaaaattacaaatagggaagcagctttggagaggaacatttgcacttctgaagtaatactgtgatttggactgtcagacattgtgatatattggcatcaccacacctctgttaattataaacttacctattctcagtgccttgttaactgttgaaataggacttgacatttgttgttcttcctcttctgttattcatttattcactcatttagtagttaattacttcctagtgccagatagttttctaggtactgaataaacaaaaatcctattgtcatagttatgtttttgtggaaagaacaacctgatagactatcgtgaaaaataaatgagttagtatacataaaacacagcccatgagatatagtctgtaattatcatccctgcttcatttatttatttatttatttatttatttagagaatggatctgattctgtcatccaggccggagttcagtggctggatcattgctcactgtaacctcaaaacacctggcctcaagtgattcccccaacctcggcgttccaaagtgctgggattaaaggcatgagccactgtacctggccattgctcctgttttaaagatgaggaaactgaaagtacagagaggaacgtgacttgctcaggatcacacagccaatcagtggcagagcagtctaggcagtctaggcctgaaggcattattctttctttctgttctgcgtcaaaaaccctaggcaggcatggtaaaaagactgaaagagccaaggcaacataggtacctgaagaatgggagaacacctatgaggactgctagaaattttaggcagccctttaaaggccttgggcaacaatttgaacgtgactcatgagtcagttaattctctgcacctttttttttttagagaatacaatggataaagcaatgacctttgtaacatgtaaacctgtatttgaatcctttcctctccatttaattttgcagagtcaccttttcttcattagaaagaaattttatcccaaagagattatcgtgaggctcaaataatataggtggaagccctttgggtttaaaaaaaagccttttctgtcatttctgggtatctcccgtcagtgattttagtaattgtttacctctctggctcttcgtgagaagacaaattgtaggaagaagtggaggatggcattgggtaggatgcttagttctagttccaccacttccttaggtcttttttttgtcccccaagactatatcatttctgtgttctcttgaacctgtaagatttatgagtaatctgtacaatatttataaagtatgaaatctctgccattgtggcacaaaagtagccatagacaatgtataaatgaatgggcatgctgttctccagtaaaactatatttatagaaataggcagtcttctccaattttagtttgctcacccctttcctatagaactcaggtttatcatatacaatgttacacattattcctttgaataaattgtttacctaatactttttaaatttgggcattttctaggacattctattgtttttatttttaacttgtgttatactgcagtgaatgtcttcctgtgtgtagcattttgtttgtgtatgtgtgtcaatatctataaagtagctcttaagaactctggaaacattgtcagactgcttcctcaaacagcagaggtgggagggagcatcggcctaaccctacctggcctgccttaccagcatgcaaccaaggagaagagaataggatcaagagccagtgccagagagaagtacataatacaactttatggagtttaggttgcatcctataaagttaccatgttacactgtttcgatctaccaaagtagaagttttacatagtttagtatgaagttaattttattaaccttttcacacaacacaccctctcatattgctgcccaacaatgtcctgggtctttgtttccatggtcatcatattgagtagggttttagcagggacttgagtagttgggaactgaactcatgctagtgaagccattcttcactagaagcagacatatgggatccagaatatcatgaacaaccagctgggtacagtggctcacacctgtaatcccagcactttgggaggctgaaggaagcagatcacctcaggtcaggagtttgagaccagcctggccaacatggtgaaaccctatctctactaaaaatacaaaaattagccaggcctggtagcacatgcctgtagtcgcagctacttgggaggctgaggcaggagaatcgcttgaacctgggaggcggaggttgcagtgagccgacatctcgccagtgtactccagcctgggcaacagagtgagactctgtctgaaaaaaagagaatatcatgaatatcaccaaagataaaagcaagatgcggatatgagtagcccagagtaacttttcctgtgctatataacacagtgagtggtgattcccacaattcaagtccagtttttctggattctaaagccatacatttttaactctccccctaaatatgatttgaattcagagagtcagatgcaataaggtaattttaactttaagtgtagtttagcccacacatttctctaaactgggggttggcaaactacaaacctctttttgtaagtaaagttttattggaacacagcctagctcattcatttatgtattccctttgcaccttttaggttgagtagttgtgactgaggtcttccagccttcaagcctaaaatatttactatctagtccttcaaaaagaagtttgccaacctctgcaaacaagtgaaataatgtgtattagagtagagcaggagtccacaaactacaacctctggagccaaaaccaccctactgtctgtttttgtaaacagaaattttatagaaacatagttgacccctgtgccaatttgtttgagtcttgcttttgatggcttttgtgctacaagggcagagttgaacagttgcaagagaactaagtggcctgcaaagcctagtggtctttgctgtctggccattataggaagtgtttaccaaaccctgcatttgatcatggaatcccagaatgtttatacctttgaggatttttttttctactttccatattttacaggcaacagaactaaagcctcgtaaaatcttgcccaaggttctacaaatagtcttttctattaaattaagtcagagcctgaaattgtctgtgcccaagtctctcctcagaaatttagcacagcattttccctttctgtctcccacatgctacacagtcatcctggatcatgtgccccgcctccatgaggagatgttctaacatgagggtgactaggctctggagccagagcatcttagttcaaatcctggatctgttaaaaataatagttatttttcagttctaacactgaaataagacaaaaggccatattactgaaataaagtgtaaagaatatatttaatactcaggttactttagccccctcatgatcagaatatgctaataaattgagagattgacagaaaaaaaggattctgtttcactgtggctcacacctgtaatcccatcactttgggaggccgaggtgggtggatcacttgtctggagttcaagaccagcctggccaacatggcaaaaccccgtctctactaaacaatacaaaaattagccaggcgtggtggtaagcacctttaatcccagctactcgggaggttgaggcaagagaatcgcttgaacctgggaggtgcaagttgcagtgagccaagatcacaccactgcactccagcctgggcaacacagcaagactccatccctggaaaaaaaaagttcatcatttgttcttgtagtttcctagtgtggcccttgtctcagtggaaaattgtagtgtgatagactgaggagaattctgtttctgccacttcgcctgttgccttggtaggagctccttatctctgagctgagctccttttgtccttggtaaaatgtggttattatcatctgcatcctcatagtcttcttgtaaggactgtgaagtcacttttgaaaaatgccttgaatatgccagatggtctgttttctttcttttttgttttgttttgttttgttttcccttggccttcattcctggaagtgttttgttatatacattttgtttggtggccaacagtgctaaccacagaaaagtttgtatgtcttctttttctagaataattcttacagtgtaacctctcagggtgaagtttttgttttgaaaggggcacatttactgtgaatgagagccatggaaatggacctgaaatttgaagacagattttacttggttttcttttctcttatttgtttgcagtataaagaagagggcagcaaggtgaccacttactgcaacgagacaatgactgggtgggtgcatgatgtgttgggccggaactgggcttgtttcaccggaaagaaggtgggaactgcctctgagaatgtgtatgtcaacatagcacaccttaagaattctcaggaaaagtgagttgctacaaatgagacatacgtttagttttgttttatagtatatatgaatatgtgtgtacatttttggaattttagtttgattatacaaaatatctttggcttagaaatattaggcatgctatgtaaaaccttactggaaaaataaattgaccaacattattgagagtattttttcaaagtgttccaaaagtaatggaccaatgattactttaaatgaaatcatgtaatggaccacagaattgcaaattactaataaagaaaagccattttgcttattgccatgtaataacatgttgcatgatacaagtagatacgtatgtttatgctgcaacaagtataggtgatactaattgggcaacttttaaacaagaccataaataactgaaatcaaagttcttagtatttatgcagcctgttggtttgcgagggctgccataacaaagtaccacagactgggtggcttaaggaaggttgttttttcacagttttggaggctagaagtccaagattgaggtgttgtcaggtttggtttcttccaaggccacactccttggcttgcagatgtctgcttgcttactgggctcctaaacagtcttttctgattgtcctaatgtcctcttcttataagggcatcagtcatattggattggggcccacccatatgacctaattttaccttaatgacctctttaaagctctgtctccaaatacagtcatatggctgtgatacagggggttagaatttcaacgtatgaattttgagggggacacaattcagactataaactgcagttaatgtttactgttaaattaaatctataactgactaaaccacacaaacaggagatttcaaattagactttattagttttggaaggaagagatgaaatgttgttactttttctgttttatgtagttgtaaaagccactaaaaatgtacatgtacaaatcatcccaagccaggcaacattagtaatgaatgactgcagcacagaggtaagagagatgatttaaaggaggatgaattgtctgcaaaggtgctgggcaagatctagactaattcatccccttcattttaagtttaggttttaaatagctttgtttggcttgatcctagagctacacatttacttttaacttgtttactttgtaccctatcatttaggatatgctatgtactattgtactctatttgatatttcaaacattctctcatttagtgaagaagctcccaaccggagtgctcagaacctacattgcctcacctgtgaagtgagcatgtgggactgaattgcctttgaggtctctttcagctcttaatgatctgttatcccatagtaagatacattatttttaatctcgttggatcttaaacaccaaaaataatagtatttaagacgtaggatgctatcttgtcattattttaatgcacatgtcaacacacgaggttttgctagatgttatgataaagcaagcgaaacagcaggctactgctcctcaaatatctacagtcaatgaaatattgactggcgttgtgggaaaatatctcaaaagtattttatttacaatttaaaatatattcttttgcctaaagaaacaatgaaacaactataacttgtttttgttattgtgttagtgtagtcatacatatgatacagttttataatctgcttgataagggtacgtctctgggtttttcacactttgcaacaagtgggaaagaacttcgacaaaaacattaaaacattatcaacctggttgcacgtttttctgattattttcagtgctcttaggtttttagaccatatcaaaattctctctctacacacatgatttataagggaaagaaaagtttgcagtatgcctaaaatgttcctcaggttaattatatcttgttttgcatagttgaatgtttatggaagtcttagatagtgagtcactctgaaaccacagactcttttttaatagtaataatatggtgagttctataattcctagcatctagcacacaggtatgataaatgttttaattaagtgaataatcagcttcctgaatttttctactttgtaaatatgctctttgtgtgttgaatctatttacatatatatccaagcatttggcacaaggtaaaccaatgtggctcagattttaatgttattgtgaatcacttggggatcttgtttaaaaaaaaaaaaaaaaaggagattctgattcaggtgatctgggctgagtacttacagtatgcatttctaataaacttctgggtgttgctactgatattggttcaagaactaaattctgagtaacaagtataaaccgaatgtccataaagtataatttcttttagtatcatatggttataatgcttgcattttgtatatatgttgcatacaggttttgcttttctcttttttcttattaaaaaggttataaaggtacactgtagaaactgtagggagtaggggaaagcttggcatctcatgccaccattcagaggtaaccatgtttggcattttaaaaatgcatttatagtgtgtgtgtgtgtgtgtgtgtgtgtgtgtgtgtgcgcgcatacatatatatgtatgtattatacatatacgttaatatacatataatatacatatattactgtgcaaaagttgataaattgattatgattatgtataaactttgatatcttctcatatttaatataatatagttgtgagcactcttccatatcattaaataactttctagacattttaaatgaatatatagaaaatgaaacatcattaatcagtcccttatcttagaatatttatttcggttatttacaatctattagtagtttaaaagtacttcatggaaaatccttatacatgcatcttagttaacttgaacttttatttttagagaagacatgccaggctgttctaggctattgatacatattgccaattaccttcctgaaagattgtaccactttccacttaggcacagagtgtgaatgcctgttttaattactctatttacatcagtaaagactatatctgaaattatctcatttttggggacaggtattctaataggctctacaagtatgatcacaactttgtgaaagctatcaatgccattcagaagtcttggactgcaactacatacatggaatatgagactcttaccctgggagatatgattaggagaagtggtggccacagtcgaaaaatcccaaggtaatcaagcacacattttatcattaataaaaatatgaatgctgaataccatcctccctcctaagcagtcctaccagtgttgctcgccattttattggtcatcccagttgtaactttttatgtgatctgttaacgatctttatctcctattgatacatattctgtcactctccaagtcctatttatgagtttttctttcacatgtctgttgtttccattgccccctttccattttctacactctggcatgcagctttgtcctgtttcccccatgctatggattagcctcctgccggtaaccacctgaggggttcttcctgcctgctgcataaagaaaaaccatggcaatatagtagagaaagagcttaagagacactaggctggccatgccacgtgggggatggagttcatattcaaattatcttgtccaaagctcataggtaggggtttttcaaaggcagcttgggggaaggggtgggggtggccaggtaacagatgcttgctgctgattggttggggtgggtgaaatcacagggagttgaagctgtcctcctgtgggctgaattgcttctaggtggggccataggagtggggttgctgggtccaggtagaaccacgggtgtcagacatgcaaaaataaaataaaataaaataagataaggtaagataaaataaaataaaataaaataataaataaaataaatataaaatttccctgaaaagatatttcaaaaagccagtcttagattctacaataatgatgttatttgctggagtaattgatggagttgcatgtcttataacctctggaataacggctgacaatctctcaagtctgcgccttagctggactcaggttcctcttctccccacagcctgactgcctccattagcttcacaaaagtggttgggtttcagggcaaggcccattgtcatttaaactgtagccgaaatgacttccaaagttagcttggcccaatagcccaggaatatttaagtggaaggcaagatgggggatgggttagcttagctctctttcactctcatagttttctcactggtataatttttgcaaaggcggtttcatgcctgccatctctttcgtcgctacctctcccagttcccattcttagctgttttatgaaatgcttctagtttcatcctcttataccaagttctgggagactgatttgagtaataataaaactccagtttcccatacagccggctctgcgtgaattaaactcattttctattgcaatttccctgtcttgataatcagttctgtgtaggccgtgaggaaggagaacccgttgggtgattacgagactgtgttactgcccactacctaatggatacatttagcctggtatccaaacccatctaattatgaccataactatatttatcaccttgctctgctttcaaacgatatgacacacaatgaatgaaaactttcatttttcatcttcatttgtgctgttccctttgcctcaaatagccctcaacttgcctacagtaactgtaaaatttgccacctaaaaaaaaatctcaaaatcctctctatgctttgatgtccagcaaaaaaaaaaaaaaaaaaaaaaaagttatcagtatagctctattactctcaaccagaggtggcatttttcatctttacccataagccccatggtatatttcttagtttgggaaattatatcataatactttgaatctgtctagtcagaaatttagataatttaaaaaaaaattatttttctgaaagtatagctggatctagcttaggatctacatctatctaatatagttccttaacatttgttaaatggccacggataagtcctgtaatgccatactttgctttaggatcatgtgactaaggggtaaggaattggaaagcaatggggagctagcagaatttgaaaaattatataggtaggttatttttccttaatacattgaaatagcctcaaattctcagagaatacaatgtttaatcctctaatatctgtagagttcatggctcaaatttgtattatttgaataaactactaatagattaataattactcaactaaaacactttgaaatgtgagagttcccttatctccctcgcaggcatatgacagaggtgtggcttctcacacctttggttgcccttgccctaccacccaaacccctagggggagcatgcagaggggcaggtgcagaggccatggggggtgcttttgggctctggccccacagcagtgtctaggagtggatgttggagactcctgaagcccaagtgggcatgtgttacagtgtgctctttcagcttagccgtctgcagatggcttgtgttaatcaggtcattagaccccatgccttattgcaagggcaggggtccaatgtgacagcctaagttcttgctcagtgtaccagaagaattggatcacacgtgggctggaaggatgagcacaaggttttattgagtggtggaggtggctctccgcgagacgactctcagccagagaaggaggatggaggggaaaggtgttcttcccctggagtccacttgttcctgttctcctctgggttcaaatacctcttccctccttttctgctgtgctgtcccaccactctccacagctctgtgccgctctgttcctctgctcctctggatgttcagctccttgtatctgtgcctgctaagattttgggtttatatgggggaaggatggggggcatggcgggccaaaaggcaccttttttggtgtgaaaacagaaatgcctgtcttctcttagggccttaggtcttcaggcttgagggtggggcctttgctgagggaccaccctcttctacccagtatttccctgtctcctgtccatatcaacattactaactttttcatctgcagactaataatgctaaggtgtggcatttttcaactgtgagactatgtgaaggtttttcctgtccaactgatggcatcctcccataattctacccctttcttaaaagaatcttttgcagtatttctccaagtttattctagagaatttcttgtctgtgaaatgctctagttaatcaaaattggaaaacggagcatatcatatccccttctcaaattcaccaaagtgaagtcctaatgtgtcttaatgtatctgcatgagacaggaagctgagatctattcaacaacaaaaatccaaacaagcatcaagaggaggagtgttagcacttgagcctagggagactgtggctcctgcctgaaagatgggagcctcagtcacagctgctttaccaagtgtcatatgctatgtttctgaggactcctgctaaagctcccttctccctccagccaaccacttttgttttagacaagggctgggtttatgaaggactgttttcatgactaaagctttatagaaggtttaagataaggagatggaattgagtgaagtaggaaatatgaaagcagatattataatctggcttcctgatttttcactagcatttttgtttataaattagttctgttctaagaatccaatgacgtaatagaaactctcaaagattcttaacttgagatatagggagtctttgaaactgctgaaattacagacagcatttattgtttatgagcatttctgaatctagagctttcactagatttgtaaagaatgtgggccaaaagattaagagccaatcctgtatcttgtactcaaaatgtttgtaattctcacctttttatcccccagactcctcttgctctctcttcattttcacagtgttactggaaaggggtcctgatccagaccccaagagagggctcttggatcttgtgcaagaaagaatttagggcgagtcctcaatgcaaagtgaaagcaagtttattaagaaagtaaaggaataaaagaatggctactccatagacagagcagccctgagggcagctggttgtccatttttatggttatttcttgattgtatgctaaacaagggatggattattcatgcctcccctttttagaccatagagggtaacttcctgacattgtcatggcattcttttttttttttgacagagtctcactgtgttgtccaggctggagtgcggtaaagcaatcttggctcactgcaacctctgcctcctgggtttaaatgattctcctgcctcagcctcccaagtagctgggattacaggcatgacccaccatgcccagccaatttttgtatttttagttgaaacagggttttgccatgttggccaggctggtcttgaactcctgacttcaggtgatctgcctaccttggcctcccaaagtgctgcaattacagatgtgagccaccaaacctggcctgtcatggcattcttaaactgtcatggtgctggtgggagtgtagcagtgaggaagaccagaggtcactctcatcgccatcttggttttggtgggttttagctggcttctttactgcagcctgtctgttctatcagcaaggtctttatgacctgaatcttgtgctgacctcctatctcattctatgacttagaatgccttaactgtctgggaatgcagcccagtaggtctcagcctcatcttacccagctcctattcaagatggagttgctctgggtcaaacacctttgacaacatcattaagcctcagttctcacactgtttttgttttgtttgtgtgtgcaatgatgggcaaatctctgccttataggatggtagaaaaaaggaacttaatattgtaatgactgttttgtgccagataattgctttaaactgtatcagcatcttatttagtcctgttaatgatatgaatgttatcttcataacagctgccattttattaaggacttatcagagaaaaacactgttctaagcacttgttacccattattacattgaattttcataacaaccctttgaggtaagcatgattatacccactttaatagaagtgaactgtagttttgtaatgttaggttccttgccaaatgttacacagatagtaagtgataaaatcatatgccctgaaattacattatgctgccaaacttaaatttcttttttatcctttatattagtatattcttaggtttaaacaagacaactagttaacacatactagattttgtccacagttcctggctcataactcccatagcccttgtcactatcttttaacgttggggcacattaggcctcagaagtaggcctcagaaaacagagtctctctctctctctctctctgatcttcttccgccctcctctcacctgcccagggcagcactctaatcttctcctgcctttctgatcttgggtcataagaccttcatttccaaagatgtcctgtgtcataccctaaaggaaggaacactgaacagagagaggctcagaagaatctggacaggccttgctgtgtttacatcattccctttatgtccagtcacatctctacatggttgtcagttgtgcctatttgatgaagtccccatataaggctcacaaggacagggtgcagagagcttccagatagctgaacaagtggaagttcctggagggtggcgtgttcagggagggcatggaagctgtgtgccccttcccccataccttgccctactcatttcttcatctgtttcatttgtagtatcttttataataaaccactaaacattagttagtatttctctgagttctgtgagtcactctagcaaattaattgaacccaaggagggtgtcataggatccccacattatagctggttggccagaagcacaggtaaacaacctagggctttcaattggcatgagaagtagggggcagttttgtgggacggagccctcagcctgtgagatctgatgccatctctaagtacacagtgtcaaaactggattggaggacacccagctagtattcactgtgaaattggttgcttgcttgatttgtggggaaaaacccacatgcatttgatcacagaagtcttttgtgttgacagttgatagtgttcagtgagagaattaaaaaaaaattgagtttcttcttcaacatactctctcaatgtgaaaccacagaaactatttccattcaaagatggaaatggtttgtttgcatcttagtttttatttatacatcttagaagaaatgtccaagctttgttttttctctcaccctatatataaaattacctatgaggcacagatttttatgatccttgattatatagactttgtccaaattgtgtgttttatagcattactgtaacttgttatagtaatctttgtgtatattatgtctcttaacattgtcttccatattgttaatgaccatctcatatttatctctgtatcatgtatatcttcaaccaatgtgactggcttaggagaaaaaattagtgaacaattaactagtgtttgtgtaatctatacaattgtcaaggttacaattgctatttttgaagaaatcgttgttgtttttctctttgtttcatctcagttccattttgtcatgtattcttttttttttttttttttttttttttgaggcggagtcttgctctgtcacccgggctggagtgcagtggtgcaatctcggctcactgcaagctccacctcctgggttcatgccattctcctgcctcagcctcccgagtagctgggactacaggcacccgccaccacgcccagctaatttttttttgtatttttagtagggacggggtttcactgtgttagccaggatggtctcaatctcctgacctcgtgatccgcccgcctcggcctcccaatgctgggattacaggcgtgagccaccgcgcctggccccttgtcatgtattcttaacctgtgttatatctaagagaagctgtgagagacgggaccatttgtggataggtgcagagggcatgaagtagcccagaaagaatctttgccattgactaaattttagcctagtaaaaaacatctggtaaccactgaaaaactagaacagtgtgatatgacaatgcccagttgaataagaaattcaaatagtttatagtaacaaaaaataatttttaccacattgtgactagtgccctaaaaacaaatttgaaggagcagagagagagaggaagtgagttttcgctgggggctggtgagtggaggctactttatgagcagttttgaaaattacaagttagggaaaaactcttaggggagttttaagtggtgagcaacaggcacttgaggttacaggagcagcagcataaagatatagaacagagaggccatttggcagtcttggggaaactccaagaagtcgaatgtgtctaaagctgtggttctctctctgtgtgtgtgtgtgtgtgtgtgtgtgcgcgcgtgtgtttgtgtgtgtgtgcatgtgtatgtatgtgtgaaatcgctaatacagagaagctgttagaacaattttctcacttcccaaaaatgtccgttcattcatgggcctaggcaactctcctttgtgtgtcttacagcccaacactgtcatataaggtgtggttctataatgaaacagttttatctgttgtttacggagctagtcagcctgtgttatgcttgttactggttgagggtgtccaggttcttggcttcttgaacaaagaattggacaaaactcacaaatgaggcaaggaaagaatgaagcaacaaaagcggagatttattgaaaatgaaagcacactccacaggatgggagtgggcctaagtaaatgattcaaggccctggttacagaattttctggggtttcaataccgtctagaggtttcccattggttacctggtgtatgccttatgtaaatgaagagggtggagttaagttacaaagtcatttactcagtataggccttgtgttaatggagagggtgttactcctgggggttgtggcccatgtaaacggagaggatgaagtgaagtgacaaagcccttcgcattcctgccattgctgaagtgtttccactttatttagttctaggaagtcagtgtgaattggccttatgttccctgcctccagaacctgttctcctgcctcacatagacccttttttccctttgccaacttcacttcttttacagccacctcactaccaatgtgtctgtctcctaagtcaaacatcagtgattcctctgttttctctaaacccttcttatgtcttctacttctcatctctttcttggtcaaaaatctttcaaaaatgagtaagaatgcagctattcaggcaaactaaaaataacatcacagtgatatacaaaaccagtgtcatttcacaaaggaaaattatcaatactagatcctgaaaaagaaacagcgaatgaaagccatttacacaactccattgtgtaattgacacattgaatcactcataaaacaggtgctctgggtctgaatctagatcctagctagtctggtagctgaaatcatagaattatagtagagtttaggaaatcatcctcaaaggaaagattatatgttgatatcaaatgtatatttcctttctaggcccaaacctgcaccactgactgctgaaatacagcaaaagattttgcatttgccaacatcttgggactggagaaatgttcatggtatcaattttgtcagtcctgttcgaaaccaaggtaaaaaaataagcctaagttttttgttaatttgtttggaactatttattgaacagttgctctgtgtgatggatttcggggatacctagatggaatgggcatgatcccctttttacagaaatagaaaataggtggcctatgaattattctttccttttatatccatgacaaactttagtaaaaaattttcttttctactgagcttagcatttattcagtactcttctcaatatattttccaggtagctagtgacaatcagagtgatatgtaagacaaactcatttgtcctcctagtaggaaagattctagtagaagcaaagaattgtgtaccattctgcaagtggtttgttggaatctttctttgatacctgttcctgtattcccccacccccattaatttagtcattaattactacatgaacccgtaaaataaatccttaaattattttcctggtagattttttgagctgtgtaaggacctttcaattcactttacattagaatacgatatgtgatggtaagtattaacccagcttcctgagtgatggcgtgagggcggaacccaggttcatgaaaagtattcctattattgaattttaccagttattttcagaagtttgatacaatgtgagttgatttcataacatgtcctctaactgcacttgatagcaaattatcttgttatcctgagttgtagccaacaatgacttggagaatctatgcaatactcagttttattacttctaagctcattttgaagataatactacccatggctgatttgttactataaaataggtttagtatttgctgtctggaaacattctgattagtgtctcctgggaggattataaatttatagtacccaaagataaactgttgtttccctttcctaaacttttagtgataatcagtctctgccgtgtctcattttcatcacttgccctccaagctcccatctcactgaattcttgcagtgttctgaatgttgagagccccaagtgggtcttataacagccagtcagcaacatttctgtttttcatctgacaccaagggtctcgtctctttgcttttctaccagttattctgggctcttcagctctaaagaaagtataggtcctgaaatctttccctaccttctcaatttcctggggagggcttctttggaaagtgggattggaaataagataaatttgaagataattgagaaatgaatggaaagtgaaattgaagggtccatgttaagagattgcaagttatgctatcaccaaatagattttttgtgcctgagaggattaattcatagtgcatattatgtgttgactttatcattgaggtcctggcacatgatagcattggcatgatataatttgagctactgatactatagtgttgcttctggtgttgttaccagaacatctaaaatatattaggatttttttaatggcagaggaaatgaagactaatatgacatagtccttgtcctagtgatttacagtttagcaagacatacaagcaaaacattaaagtaaagcatgataactactttaataaagcattttttaaattcattggtaacataagagaaggtagaagagtttagcaaacccttcccaaaagaaatgattgacaagttatatgagataataattcagggaaaggaaattcgactttctaaagccaaattatttgacattggttttcatatagcttggtaaaagctgttattttctcccatgttctttattctttgactgttataagtatgatttgtacagagaaatggcaatttcaaaacagagggctttgatggattaattgctttgaattgatccctcatctacagtatcttgtcaggtacttgagaaaataatgtacttaaagtttcctcttttgactttcttttggtattctatactgtaagttggggaaaaaagtattttctcttcctgctaattgggctacttgaaaattcccaccaactttgccaataccagtgttctgtataacccagaattcagaattagctgcaattaagggaattcacagcttttctgtagtcagagagcaaattgaaattaaagaaaaaagaaatagtgggaggacaaatgaggttttacctttacacttgaaaacagatttaagaacaagccttatacctagatttattaatactttgaggtatgagagggaagagaagcttagaaatacggcagaatgggctttctttgttcttctcccagctatgctgtttttatttattattgtatttttaagagagaagggaagtgtctctcctgggtcacattaattaggaaatacagagtgttttcataatgcgtaaagtctagtccatttaagtcttgtttcaaaatgctatttatattatttgagcaggaaggcagagaccttaaactgctccacccaattcattttacacaaaagattaaaaagaaaaaaacagtgtcaaaaggtcaagtgcccagtgttgcacaactaatgataggcaaaacaagagaggaggggaaaaaaaagaatcctgactcccgactcctagttcagtgtgttcttcactgttagaaggtgctgctgaacatagttataccatatgaagatcacactatctatttgagattgtagaaatttgattactgcagagctctggctgggctagattcacttcttattctttattgcattgcagtattcttaagagataaatggctcttttagaatcagattggccttggctgttgaaatgaggcattaattaccttggtagctgacacattcttacaggtcaggggcttgatgaagtttatcttcttcccttgttcctgtgattgctctgtaaatagaacacattcagagcccttgaatgcacttgcagcctgtgcctcccacagtgatcgatggtcagataatgggagtttaatgaccagtactgagagagattatttccatggctgctatgggccaagaaagctgggtggtcagaaagggaccttttccagactctcctgggttgtgttatttctttgacattggtttcctttcatgaggcgccaaggtgtatttgtaagttgtccagtgttgcacagctaatgaggggcaaaacaagaaaggaggaaaaaaaaagtatcctcactcctagttcagtgtgttcttcactgttggaaggtactgctgaacacagttatatgttcagtgtacaatgtacaatgttctttgacattccgtcatttgaaggatgggtcctatggatagtatcatctgcatggttttgaaaacaaaagatataagctaattttgccctgtctagtgactacgagacagggagagaaaatctgaatatttgttaaagtagacacagacccataaattgaaaaggacactaatcctgccttaggagacagtaaggcacttgtccctgctatctattagctgtgtgtccttggacagctcattgcttctttctgagccaccgttacacgttatctatcaagtgagcaggttgtacactagatgaattcacaggtccttcttccaagtgcttttctaatcttcataatttagataatctctcagtagcaaaacagtgtacaatatggtcaatctgagatttttagggggagaattttagggaacatcagaaatggcagtagttaaaaggaaataggactcacaggctgacttctctctataacttcacatggtagaagggatgagagttctctctggagccttttgtattaggtcactaatcccaaaggccccacctcctaagaccatcacttttgggattggggttttaacatgattttagagggacataaaccttcatctcattgcattagagatatttgaaagctcagctcacgtgtattcctccacagctcacatgtattcctccatcacccaacctgatggctttgaacgttgtagacataaatcctttcatcattatcaagaatattgccaaaagcttctcagaaattatgaggggtttttttagtttctaaaatattctcaaagaaagtcccatgtactaatgtttgccttttgatgaaaaaggatgaaatcttaatgattgccttaataagctcaacaatgcttgttagttgagtcttcttattgtgctgattcttataaacaacaacattcagtataaacattaatgtatgtgattcactaaggtttttgcatgattctctgtgaggcttcagatgtctcttggattatgtgtctttttttcatcgccagcatcctgtggcagctgctactcatttgcttctatgggtatgctagaagcgagaatccgtatactaaccaacaattctcagaccccaatcctaagccctcaggaggttgtgtcttgtagccagtatgctcaaggtaagtgttgcatttcagacaccatttatgagctatttacctgtgtgcagctggctgttgttggcaaaggcaaaaggatgatgcagtagagagagcgcagtgtctatagtcagaaaatctgagtgcaagtctggccctatcacttattaatggatgattgctcatggaatttactgtaccatccagcaaaatgtcaatagttactatatattgagtgagctctgcttgttacatatattgcctaacaatgctcaaaactctgagaagtagtaagtataatccctatttatgggcggggaacaggaactaagaaatttttctaataatttgaaggtctcacagcttttagcattggagtttcacttctaatcatcgtctccaaaacccaacttttattaaaactatactaacactggtttctctctgggagaattttaaaattctgtacttagggctgggcacagtggcttatgcctataaccctatcactttgggaggctgagatgggtgaatctcttgagtcctagagtttgagaccagcctgggcaacacggcgaaaccccttctctattaaaaatacaaaaaattagctgggcgtggtggtgtgtgcttgtagtcccagctattcaggaggcggaggtgtaagaatcacctgagcccaggaggtcaaggctgcagtgagccgatatcatgccactgcactccagcctgggcaaacggagtgaggccctgttatgaaaaaaaaaaaatctgtacttaggctttcagatcaggctgtatgtgatgtatgtcgaaaacacagctataattgattgagggagaaacgttaccattttaaagtttatgctttcaagcccagatttggccactaggaatttcccagctcactagtgaaactgctgatgagtgattatttgccagtgagcctttcattctttctaaaatatgtactactagttgtgacttgtaggctataggggctataatatatcaagacaatctttatcctcatgaagcttacagttaagtaagagatagagattaaataattataacaacagagtgaagaacagtgaagaaaaagtacagagttataatatatataatagggccaggactgcatgaggaaggtaggaaagacatttcggcaagaggttgtcagggaaaagacttgcttgagaaagagccaagttgtggggtctggctgcttagcaatgaccataatacctaacttttgctatttttacatgaagtaactaatttaaccctatgaggaaagtactactaccatctagattttacaggtaagtaagcagagatacagagaagttaaactcttcacacggctttggctttaaacctatataggcttcagagcctccccacttaaccactttgccatagctacatccatattaggtgctaagtagatatctgttaagtagaaggaggatgaaaggatagttagctagttggaaaatggatggatgaatgaagtgatgcttaagctaagaacaactttcaggggtaacatgcaaagaataatggagcaaagaagaaaaaatagaaaatgggataatcctttttctactaaggggtaaccatgtgtgttattcatcttcaggctgtgaaggcggcttcccataccttattgcaggaaagtacgcccaagattttgggctggtggaagaagcttgcttcccctacacaggcactgattctccatgcaaaatgaaggaagactgctttcgttattactcctctgagtaccactatgtaggaggtttctatggaggctgcaatgaagccctgatgaagcttgagttggtccatcatgggcccatggcagttgcttttgaagtatatgatgacttcctccactacaaaaaggggatctaccaccacactggtctaagagaccctttcaacccctttgagctgactaatcatgctgttctgcttgtgggctatggcactgactcagcctctgggatggattactggattgttaaaaacagctggggcaccggctggggtgagaatggctacttccggatccgcagaggaactgatgagtgtgcaattgagagcatagcagtggcagccacaccaattcctaaattgtagggtatgccttccagtatttcataatgatctgcatcagttgtaaaggggaattggtatattcacagactgtagactttcagcagcaatctcagaagcttacaaatagatttccatgaagatatttgtcttcagaattaaaactgcccttaattttaatatacctttcaatcggccactggccatttttttctaagtattcaattaagtgggaattttctggaagatggtcagctatgaagtaatagagtttgcttaatcatttgtaattcaaacatgctatattttttaaaatcaatgtgaaaacatagacttatttttaaattgtaccaatcacaagaaaataatggcaataattatcaaaacttttaaaatagatgctcatatttttaaaataaagttttaaaaataactgcat

SEQ ID NO: 7215 - DNA, 1115 bp, Homo sapiens
gtaacagatgcttgctgctgattggttggggtgggtgaaatcacagggagttgaagctgtcctcctgtgggctgaattgcttctaggtggggccataggagtggggttgctgggtccaggtagaaccacgggtgtcagacatgcaaaaataaaataaaataaaataagataaggtaagataaaataaaataaaataaaataataaataaaataaatataaaatttccctgaaaagatatttcaaaaagccagtcttagattctacaataatgatgttatttgctggagtaattgatggagttgcatgtcttataacctctggaataacggctgacaatctctcaagtctgcgccttagctggactcaggttcctcttctccccacagcctgactgcctccattagcttcacaaaagtggttgggtttcagggcaaggcccattgtcatttaaactgtagccgaaatgacttccaaagttagcttggcccaatagcccaggaatatttaagtggaaggcaagatgggggatgggttagcttagctctctttcactctcatagttttctcactggtataatttttgcaaaggcggtttcatgcctgccatctctttcgtcgctacctctcccagttcccattcttagctgttttatgaaatgcttctagtttcatcctcttataccaagttctgggagactgatttgagtactaataaaactccagtttcccatacagccggctctgcgtgaattaaactcattttctattgcaatttccctgtcttgataatcagttctgtgtaggccgtgaggaaggagaacccgttgggtgattacgagactgtgttactgcccactacctaatggatacatttagcctggtatccaaacccatctaattatgaccataactatatttatcaccttgctctgctttcaaacgatatgacacacaatgaatgaaaactttcatttttcatcttcatttgtgctgttccctttgcctcaaatagccctcaacttgcctacagtaactgtaaaatttgccacctaaaaaaaaatctcaaaatcctctctatgctttgatgtccagcaaaaaaaaaaaaaaaaaaaaa

SEQ ID NO: 7216 - DNA, 1109 bp, Homo sapiens
gtaacagatgcttgctgctgattggttggggtgggtgaaatcacagggagttgaagctgtcctcctgtgggctgaattgcttctaggtggggccataggagtggggttgctgggtccaggtagaaccacgggtgtcagacatgcaaaaataaaataaaataaaataagataaggtaagataaaataaaataaaataaaataataaataaaataaatataaaatttccctgaaaagatatttcaaaaagccagtcttagattctacaataatgatgttatttgctggagtaattgatggagttgcatgtcttataacctctggaataacggctgacaatctctcaagtctgcgccttagctggactcaggttcctcttctccccacagcctgactgcctccattagcttcacaaaagtggttgggtttcagggcaaggcccattgtcatttaaactgtagccgaaatgacttccaaagttagcttggcccaatagcccaggaatatttaagtggaaggcaagatgggggatgggttagcttagctctctttcactctcatagttttctcactggtataatttttgcaaaggcggtttcatgcctgccatctctttcgtcgctacctctcccagttcccattcttagctgttttatgaaatgcttctagtttcatcctcttataccaagttctgggagactgatttgagtaataataaaactccagtttcccatacagccggctctgcgtgaattaaactcattttctattgcaatttccctgtcttgataatcagttctgtgtaggccgtgaggaaggagaacccgttgggtgattacgagactgtgttactgcccactacctaatggatacatttagcctggtatccaaacccatctaattatgaccataactatatttatcaccttgctctgctttcaaacgatatgacacacaatgaatgaaaactttcatttttcatcttcatttgtgctgttccctttgcctcaaatagccctcaacttgcctacagtaactgtaaaattttgccacctaaaaaaaaatctcaaaatcctctctatgctttgatgtccagcaaaaaaaaaaaaaa

SEQ ID NO: 7217 - DNA, 379 bp, Homo sapiens
atactagctgcatgcttggaaatttcaccttaacattctgagtttcagagttttgtgcaaaacccacgtattttctgcattaaaattcactataatgatgtttttaccctccttgaactgcagtagggctccaggagtatgcaccatttaaagtttggcttcctggacctcctggcatgctgccacatacctttgatcttttcaccacatggtggcacagaaacagcactggaaggcatagccagggtcggaatcattggaaggcctccaaggagatgagatacattttctttttattgttactgattgaatgtaatttccatcctattttgtgcccagcctcactgctatgtgaacatataaacagacctttgaaatc

SEQ ID NO: 7218 - DNA, 3582 bp, Homo sapiens
agtataaagaagagggcagcaaggtgaccacttactgcaacgagacaatgactgggtgggtgcatgatgtgttgggccggaactgggcttgtttcaccggaaagaaggtgggaactgcctctgagaatgtgtatgtcaacacagcacaccttaagaattctcaggaaaagtgagttgctacaaatgagacatacgtttagttttgttttatagtatatatgaatatgtgtgtacatttttggaattttagtttgattatacaaaatatctttggcttagaaatattaggcatgctatgtaaaaccttactggaaaaataaattgaccaacattattgagagtattttttcaaagtgttccaaaagtaatggaccaatgattactttaaatgaaatcatgtaatggaccacagaattgcaaattactaataaagaaaagccattttgctgattgccatgtactaacatgttgcatgatacaagtagatacgtatgtttatgctgcaacaagtataggtgatactaattgggcaacttttaaacaagaccataaataactgaaatcaaagttcttagtatttatgcagcctgttggtttgcgagggctgccataacaaagtaccacagactgggtggcttaaggaaggttgttttttcacagttttggaggctagaagtccaagattgaggtgttgtcaggtttggtttcttccaaggccacactccttggcttgcagatgtctgcttgcttactgggctcctaaacagtcttttctgattgtcctaatgtcctcttcttataagggcatcagtcatattggattggggcccacccatatgacctaattttaccttaatgacctctttaaagctctgtctccaaatacagtcatatggctgtgatacagggggttagaatttcaacgtatgaattttgagggggacacaattcagactataaactgcagttaatgtttactgttaaattaaatctataactgactaaaccacacaaacaggagatttcaaattagactttattagttttggaaggaagagatgaaatgttgttactttttctgttttatgtagttgtaaaagccactaaaaatgtacatgtacaaatcatcccaagccaggcaacattagtaatgaatgactgcagcacagaggtaagagagatgatttaaaggaggatgaattgtctgcaaaggtgctgggcaagatctagactaattcatccccttcattttaagtttaggttttaaatagctttgtttgtcttgatcctagagctacacatttacttttaacttgtttactttgtaccctatcatttaggatatgctatgtactattgtactctatttgatatttcaaacattctctcatttagtgaagaagctcccaaccggagtgctcagaacctacattgcctcacctgtgaagtgagcatgtgggactgaattgcctttgaggtctctttcagctcttaatgatctgttatcccatagtaagatacattatttttaatctcgttggatcttaaacaccaaaaataatagtatttaagacgtaggatgctatcttgtcattattttaatgcacatgtcaacacacgaggttttgctagatgttatgataaagcaagcgaaacagagcaggctactgctcctcaaatatctacagtcaatgaaatattgactggcgttgtgggaaaatatctcaaaagtattttatttacaatttaaaatatattcttttgcctaaagaaacaatgaaacaactataacttgtttttgttattgtgttagtgtagtcatacatatgatacagttttataatctgcttgataagggtacgtctctgggtttttcacactttgcaacaagtgggaaagaacttcgacaaaaacattaaaacattatcaacctggttgcacgtttttctgattattttcagtgctcttaggtttttagaccatatcaaaattctctctctacgcacatgatttataagggaaagaaaagtttgcagtatgcctaaaatgttcctcaggttaattatatcttgttttgcatagttgaatgtttatggaagtcttagatagtgagtcactctgaaaccacagactcttttttaatagtaataatatggtgagttctataattcctagcatctagcacacaggtatgataaatgttttaattaagtgaataatcagcttcctgaatttttctactttgtaaatatgctctttgtgtgttgaatctatttacatatatatccaagcatttggcacaaggtaaaccaatgtggctcagattttaatgttattgtgaatcccctggggatttttttttaaaaaaaaaaaaaaaggagattctgattcaggtgatctgggctgagtacttacagtatgcatttctaataaacttctgggtgttgctactgatattggttcaagaactaaattctgagtaacaagtataaaccgaatgtccataaagtataatttcttttagtatcatatggttataatgcttgcattttgtatatatgttgcatacaggttttgcttttctcttttttcttattaaaaaggttataaaggtacactgtagaaactgtagggagtaggggaaagcttggcatctcatgccaccattcagaggtaaccatgtttggcattttaaaaatgcatttatagtgtgtgtgtgtgtgtgtgtgtgtgtgtgtgtgtgcgcgcatacatatatatgtatgtattatacatatacgttaatatacatataatatacatatattactgtgcaaaagttgataaattgattatgattatgtataaactttgatatcttctcatatttaatataatatagttgtgagcactcttccatatcattaaataactttctagacattttaaatgaatatatagaaaatgaaacatcattaatcagtcccttatcttagaatatttatttcggttatttacaatctattagtagtttaaaagtacttcatggaaaatccttatacatgcatcttagttaacttgaacttttatttttagagaagacatgccaggctgttctaggctattgatacatattgccaattaccttcctgaaagattgtaccactttccacttaggcacagagtgtgaatgcctgttttaattactctatttacatcagtaaagactatatctgaaattatctcatttttggggacaggtattctaataggctctacaagtatgatcacaactttgtgaaagctatcaatgccattcagaagtcttggactgcaactacatacatggaatatgagactcttaccctgggagatatgattaggagaagtggtggccacagtcgaaaaatcccaaggtaatcaagcacacattttatcattaataaaaatatgaatgctgaataccatcctccctcctaagcagtcctaccagtgttgctcgccattttattggtcatcccagttgtaactttttatgtgatctgttaacgatctttatctcctattgatacatattctgtcactctccaagtcctatttatg

SEQ ID NO: 7219 - DNA, 3581 bp, Homo sapiens
agtataaagaagagggcagcaaggtgaccacttactgcaacgagacaatgactgggtgggtgcatgatgtgttgggccggaactgggcttgtttcaccggaaagaaggtgggaactgcctctgagaatgtgtatgtcaacatagcacaccttaagaattctcaggaaaagtgagttgctacaaatgagacatacgtttagttttgttttatagtatatatgaatatgtgtgtacatttttggaattttagtttgattatacaaaatatctttggcttagaaatattaggcatgctatgtaaaaccttactggaaaaataaattgaccaacattattgagagtattttttcaaagtgttccaaaagtaatggaccaatgattactttaaatgaaatcatgtaatggaccacagaattgcaaattactaataaagaaaagccattttgcttattgccatgtaataacatgttgcatgatacaagtagatacgtatgtttatgctgcaacaagtataggtgatactaattgggcaacttttaaacaagaccataaataactgaaatcaaagttcttagtatttatgcagcctgttggtttgcgagggctgccataacaaagtaccacagactgggtggcttaaggaaggttgttttttcacagttttggaggctagaagtccaagattgaggtgttgtcaggtttggtttcttccaaggccacactccttggcttgcagatgtctgcttgcttactgggctcctaaacagtcttttctgattgtcctaatgtcctcttcttataagggcatcagtcatattggattggggcccacccatatgacctaattttaccttaatgacctctttaaagctctgtctccaaatacagtcatatggctgtgatacagggggttagaatttcaacgtatgaattttgagggggacacaattcagactataaactgcagttaatgtttactgttaaattaaatctataactgactaaaccacacaaacaggagatttcaaattagactttattagttttggaaggaagagatgaaatgttgttactttttctgttttatgtagttgtaaaagccactaaaaatgtacatgtacaaatcatcccaagccaggcaacattagtaatgaatgactgcagcacagaggtaagagagatgatttaaaggaggatgaattgtctgcaaaggtgctgggcaagatctagactaattcatccccttcattttaagtttaggttttaaatagctttgtttggcttgatcctagagctacacatttacttttaacttgtttactttgtaccctatcatttaggatatgctatgtactattgtactctatttgatatttcaaacattctctcatttagtgaagaagctcccaaccggagtgctcagaacctacattgcctcacctgtgaagtgagcatgtgggactgaattgcctttgaggtctctttcagctcttaatgatctgttatcccatagtaagatacattatttttaatctcgttggatcttaaacaccaaaaataatagtatttaagacgtaggatgctatcttgtcattattttaatgcacatgtcaacacacgaggttttgctagatgttatgataaagcaagcgaaacagcaggctactgctcctcaaatatctacagtcaatgaaatattgactggcgttgtgggaaaatatctcaaaagtattttatttacaatttaaaatatattcttttgcctaaagaaacaatgaaacaactataacttgtttttgttattgtgttagtgtagtcatacatatgatacagttttataatctgcttgataagggtacgtctctgggtttttcacactttgcaacaagtgggaaagaacttcgacaaaaacattaaaacattatcaacctggttgcacgtttttctgattattttcagtgctcttaggtttttagaccatatcaaaattctctctctacacacatgatttataagggaaagaaaagtttgcagtatgcctaaaatgttcctcaggttaattatatcttgttttgcatagttgaatgtttatggaagtcttagatagtgagtcactctgaaaccacagactcttttttaatagtaataatatggtgagttctataattcctagcatctagcacacaggtatgataaatgttttaattaagtgaataatcagcttcctgaatttttctactttgtaaatatgctctttgtgtgttgaatctatttacatatatatccaagcatttggcacaaggtaaaccaatgtggctcagattttaatgttattgtgaatcacttggggatcttgtttaaaaaaaaaaaaaaaaaggagattctgattcaggtgatctgggctgagtacttacagtatgcatttctaataaacttctgggtgttgctactgacattggttcaagaactaatttctgagtaacaagtataacccgaatgtccataaagtataatttcttttagtatcatatggttataatgcttgcattttgtatatatgttgcatacaggttttgcttttctcttttttcttattaaaaaggtgataaaggtacactgtagaaactgtagggagtaggggaaagcttggcatctcatgccaccattcagaggtaaccatgtttggcattttttaaatgcatttatagtgtgtgtgtgtgtgtgtgtgtgtgtgtgtgtgtgcgcgcatacatatatatgtatgtattatacatatacgttaatatacatataatatacatatattactgtgcaaaagttgataaattgattatgattatgtataaactttgatatcttctcatatttaatataatatagttgtgagcactcttccatatcattaaataactttctagacattttaaatgaatatatagaaaatgaaacatcattaatcagtcccttatcttagaatatttatttcggttatttacaatctattagtagtttaaaagtacttcatggaaaatccttatacatgcatcttagttaacttgaacttttatttttagagaagacatgccaggctgttctaggctattgatacatattgccaattaccttcctgaaagattgtaccactttccacttaggcacagagtgtgaatgcctgttttaattactctatttacatcagtaaagactatatctgaaattatctcatttttggggacaggtattctaataggctctacaagtatgatcacaactttgtgaaagctatcaatgccattcagaagtcttggactgcaactacatacatggaatatgagactcttaccctgggagatatgattaggagaagtggtggccacagtcgaaaaatcccaaggtaatcaagcacacattttatcattaataaaaatatgaatgctgaataccatcctccctcctaagcagtcctaccagtgttgctcgccattttattggtcatcccagttgtaactttttatgtgatctgttaacgatctttatctcctattgatacatattctgtcactctccaagtcctatttatg

SEQ ID NO: 7220 - DNA, 1666 bp, Homo sapiens
ctttttttttcatgattggttgcagttttcctacagttctcattaacaggtgctccttgatcactatgacacgcgatgatactttatctctctggttagggttggttatcttaattaattgcttatatttatatttaactgaaactagcctcaagatgccactttattaaagtttgagagtggtaagaaattacaaaactattccattaaaaaaaatagaaaagaaaaccaaataaaccagaagaacatataaactatgattagtcaaatcaaatctctgcatttaaaagtaaacatcatttactagatgtctactggactagaaatatgtgtcttctgaacagtaactgaggagtttctgcaaattattctgcaaattgtaaataggcatctctacctttttattacattaattttatcacacagtatgaagtttttttaaaaacaaagccaatgatgtacatatattcaaaagcacaagattctctgaaaatatagaaaatactgctaggcttattttacgaagacaaaggacaataggaagctgggaagaataccagcaaacagctatacgttataaggcctctgtatcacaaaaatgaagggaaaataaagccaatctaaagtattacgtacttaaattaataaactggattggaagcaatcattccattataaatttcctttcatacatagcaatcccactgagatgatacctttgtaaaatcaggcaaaaatcaattgttaatattctagagatggacaaaccacagattaagtacctaaataatcatgtttccaatcaccaattaactaagtagaattctcttaattgtatctattaaggcctactaattgacagaaaaagggcagagttgaggacttggagaaagaagacagaagcattcctctgcctgattcataaaggtcagaatcccctggccgttgttgtaggaacccagccatcaccagtcacaaagaaaaaggcagcagcacactttgagtatccaaagggcctctttactgaggctgcatggctgttgtgggcttagtccaacatgatgatgtaggacaagaacctaccagttcaatcaacatgcaattaaaactcctgatgaaggacggcccagggcagtccattggtttggggcaggggacgcagagaagcaaagcctgttttaattaagaaaatactaggcactcctctttaaatcctcaaaaaatgaggatgaacaagattccaaaaccaacaatcacaatgtgtgtgaaagtaccagcaacaagaatgaagtgggactgaatatgtgctttcctacaaatgaaacctgtttgatggtgtaaggaaaatggatgagctgtggtcaagaataggccgaggcagacatctagtccagcatgactcagcgagtttggagtgcaggcacacagctctgcctgttatgtaaccatgccatgtgaggtgcattaagtaaccactcatgtgtgctcatgcttgactcggagccactattgtctgtaaaaggtataattaccctgctaatgctgtatgtaacggcttgcacctgtggctcatcctcaggcttgtacccatggcttgcttgtgcccatggcttgcttgcacccacagctcccgtgtgtccagagaataaagccatgttgaaatgcc

SEQ ID NO: 7221 - DNA, 1666 bp, Homo sapiens; identical to SEQ ID NO: 7220

SEQ ID NO: 7222 - DNA, 429 bp, Homo sapiens
catttccatgcacctcacattcgacaggactcaatgtacacgtaacagaggggctacagtggcctggtgccagcaatgtttctttttggcttcacaaactctataaaaatgaagttttttgaagagctaagggaaattattccttaaaaatgtagaaagtgagaatagaagtgctacaatgtccaagggcactcactgaccaggactgagggtccagattcttgttagaggaaagcctgccacatataagacataggcacagtctaactcagtcgttttcaaactcatctcacggcccttttacaggctcacaaatgatcgcagaccctaaagagcttttgtttatgtgagttgtttctatcagtgtttaccatactggaggttaaacccaagaaagttttgcaacatgaagacacaggcacacatccc

SEQ ID NO: 7223 - DNA, 429 bp, Homo sapiens; identical to SEQ ID NO: 7222

SEQ ID NO: 7224 - DNA, 3821 bp, Homo sapiens
ggaaagtttcaccagagcccttttccaccatgacagtgctcctcctgctcattcctctcagcaaacgagagccattttccaagagttttgatgggaaatcatcaggcatccactttgcagtcctgattgggcttcttctgactttttgtttcctaatcttaaaaagctgtaaagggcacccatttctcttcagttcacaatgcagagactacactgacaaggtgaaatttccaggagcctcagttctttagggatagactgaatggttggtattatgtcttatagtagtatcttgaacttgatggaacttatgttgagaaataaagtttatatttttttatttttcttttaattccattttccatgaacttttaaaagtcccctcatacatgtttacagatgtccatagaaacgttattcagatactgaataaacaaccaaaaaaacattgttttatcaatgaggaacctgttaaatctacataatacagctataaaaataattatgtagttctataattaccgacatgaagacatctgagtaaaaacctatttctgatgttatagaagaacaagtatagtacactcttgaatgtaaatttctctgtgtatgcattcatatatactgtacattcagaatcctggaaaggggcttgcacagatgttaccagtgtatgtctcagagtgacagaaggacatatgagttttccttttcccttatacttctttaaaaacacactgattttttttgcacaatgaatatcaatcatattaacatataaagatttaattttttccccagaagaaaacaaaaagattgagctttgtgtaccatccacggacaaaaatgctatgtgttttgcagactcaggtagtagtccctgcgtgtgctgggggtgagatggggaggagccgctgatttctcagcaggccacaccactttcttccctagcaaagctgcacaatgttttcagcagtgtctgcaatgagagctaaatgacctccatctagaacaaatgtaacctgggcacttgctcttccacggatgctcatgagtaaaaggaagctggagttctttacaaaagaagctttgctatgagaaataaaaacaacaaactgttttttacaatttttatttggtgttaactccacaagaaaacaaacaaaaaaaaatcagttactctggtgtacgtgaaatcagaacaatacaaccacgggaaaaacaatctcagcccaggaatggaaactggtacttcagtgctatggaaatgcaatgcgcttcataccacagtgcgtttcagcgtttgccaactttttaaaaatgctttttctttgtgatcatccattcacaaaactaaaaagccacactttcatctctgttgctgaaagcctctgagcttcagctacttaactatgaaaacaaataaatacataatttgtgaatccctttgctcacttcgaatccgtcccattcacctgtggaaggtgctgcatcttctcacctgtgtctgaggaagtgtgcacctttgccacctggagccctttcctaataaacagcagctgtccaaaatcaactgtgctcaaggttgtgtctgaaatctatttatttggtctttgctacacaagcaacgatttctagaataatcgtcactgtagtgatatgaggaatttacaactttcaatccttttttacttttgctgttaaattatatttcagtgcagatgcttatcaatttttaggaagctccagaagaatgaaaaatacataaaaacgtatctgaagttcgtaaataaataacagcaacataaaaccttacacatgcgcgcgcgcacgcgcgcacacacacacacacacacacacccacccaccttaaagtgtcaaaaaatgtgttgtataaaaataaaccctaacacgtgggaagatcgacccggcgggcacaccaggtccctctcggtgaggacacacagaccctcaatgactccacagtctttgatggtactttcttttctgtgttatcaattaagaaaaaggcaacaaaacccaaatgttcaaagcaaatcatagatttcacagccagttcagctcccagctaataaattatatgtgtgtttactgcctgcccaaatgagtggtgaagctgtctagagcgcatcagacttttctgccattcctgatgctccaggcatgctacgctgatttcacagattaggttttttttgtttttgttttttaaacaatgagttggttaaaaaagaaaaacaatgtaaaaaatgtaaaatgtttcggctgtgcacatactgctcctcctggcctctgcctgtggcacaatgccatgagagccggaggagcggatcgccatgcacagacgcgactcacaagatgcgccggctccccgggctcaccaaggagaaacgggagccagtcccacggagcgacagtcagcaaaaccaccacacagggatgtggaaaactcatgactctacccgccccaacccaccacacacagaacttgcccagaacattctctcaaacacaaaatgagatcgaagctatactacatcacagccaagaagcggctagctgcagcagccaaagatttctctgggtgatgaggtggcctttactgcatgtcaaatgttcacaatttcaagttttgggggtttcaattcaacataggtcaccagaaagtaacaatctgtaactaaggtccttagcacgtatggaacactcaccacaaagaaccctgcatggggttttggtgtaaatgtaactgcagtatgagagcaggtaaggggtggggtatgcacccttaccccactgtgtctcgcatacgaccccacaccccaaatccttggcttcttcagttagcaagaaagtcacgaaccatagtatcttccgtgatactttaggggaaaagaaatcctaagagagaaaacacagtatttggtgagtcttgaaaagcacacctctgcggttcctactggaaatgtacatgagattttgctgaatggagaccaccgctgagtcacccaggcttccctctcgccttcagaaaggcatcaagccactgtagggtaagaatggatatcccagttcttggagaacaaagcctaaatgctccaaagctgaagtctctgaagagcagaagtggttgttgacactgcaatgctagtaaggtcatagtgatataaccgcagtcggaaggaaaattaactgcagttaagatgcaaaaagcagtgatacttctaagacaagcacatgcacacccattcttgatttgacaacacaatctagtctatttcaaatagccaagaatttaacagctgggaaaaaaaatctttaacaggatagctgtcctcaactctaaaataagcaagaagagaaagataattattaccaatctgaatcagttaattgaagaggaaacctaagttgttgttttagattaacaggtctcactgaagagtaattttccatcacatatcatttttaaacaataatttgtactattttgcaggtttagagatgagttcgagaaaagagctcctcttcactagggcccacccactcgcctccgccttctgagcctgtctcttccgaggtggagctggcgctggagcacatctttccgcggaagccatctgactttgctccagaatctctctctcctgtacatcttgcttcataaacagaagacacctaagattaaaacaattttcaacacatcaaaaagacttttttttccccaaaagggtgagatactctatctatatacaaagaagaaataataaatcatcagtgttttcctgtggagttacaaa

SEQ ID NO: 7225 - DNA, 3817 bp, Homo sapiens
ggaaagtttcaccagagcccttttccaccatgacagtgctcctcctgctcattcctctcagcaaacgagagccattttccaagagttttgatgggaaatcatcaggcatccactttgcagtcctgattgggcttcttctgactttttgtttcctaatcttaaaaagctgtaaagggcacccatttctcttcagttcacaatgcagagactacactgacaaggtgaaatttccaggagcctcagttctttagggatagactgaatggttggtattatgtcttatagtagtatcttgaacttgatggaacttatgttgagaaataaagtttatatttttttatttttcttttaattccattttccatgaacttttaaaagtcccctcatacatgtttacagatgtccatagaaacgttattcagatactgaataaacaaccaaaaaaacattgttttatcaatgaggaacctgttaaatctacataatacagctataaaaataattatgtagttctataattaccgacatgaagacatctgagtaaaaacctatttctgatgttatagaagaacaagtatagtacactcttgaatgtaaatttctctgtgtatgcattcatatatactgtacattcagaatcctggaaaggggcttgcacagatgttaccagtgtatgtctcagagtgacagaaggacatatgagttttccttttcccttatacttctttaaaaacacactgattttttttgcacaatgaatatcaatcatattaacatataaagatttaattttttccccagaagaaaacaaaaagattgagctttgtgtaccatccacggacaaaaatgctatgtgttttgcagactcaggtagtagtccctgcgtgtgctgggggtgagatggggaggagccgctgatttctcagcaggccacaccactttcttccctagcaaagctgcacaatgttttcagcagtgtctgcaatgagagctaaatgacctccatctagaacaaatgtaacctgggcacttgctcttccacggatgctcatgagtaaaaggaagctggagttctttacaaaagaagctttgctatgagaaataaaaacaacaaactgttttttacaatttttatttggtgttaactccacaagaaaacaaacaaaaaaaaatcagttactctggtgtacgtgaaatcagaacaatacaaccacgggaaaaacaatctcagcccaggaatggaaactggtacttcagtgctatggaaatgcaatgcgcttcataccacagtgcgtttcagcgtttgccaactttttaaaaatgctttttctttgtgatcatccattcacaaaactaaaaagccacactttcatctctgttgctgaaagcctctgagcttcagctacttaactatgaaaacaaataaatacataatttgtgaatccctttgctcacttcgaatccgtcccattcacctgtggaaggtgctgcatcttctcacctgtgtctgaggaagtgtgcacctttgccacctggagccctttcctaataaacagcagctgtccaaaatcaactgtgctcaaggttgtgtctgaaatctatttatttggtctttgctacacaagcaacgatttctagaataatcgtcactgtagtgatatgaggaatttacaactttcaatccttttttacttttgctgttaaattatatttcagtgcagatgcttatcaatttttaggaagctccagaagaatgaaaaatacataaaaacgtatctgaagttcgtaaataaataacagcaacataaaaccttacacatgcgcgcgcgcacgcgcgcacacacacacacacacacccacccaccttaaagtgtcaaaagatgtgttgtataaaaataaaccctaacacgtgggaagatcgacccggcgggcacaccaggtccctctcggtgaggacacacagaccctcaatgactccacagtctttgatggtactttcttttctgtgttatcaattaagaaaaaggcaacaaaacccaaatgttcaaagcaaatcatagatttcacagccagttcagctcccagctaataaattatatgtgtgtttactgcctgcccaaatgagtggtgaagctgtctagagcgcatcagacttttctgccattcctgatgctccaggcatgctacgctgatttcacagattaggttttttttgtttttgttttttaaacaatgagttggttaaaaaagaaaaacaatgtaaaaaatgtaaaatgtttcggctgtgcacatactgctcctcctggcctctgcctgtggcacaatgccatgagagccggaggagcggatcgccatgcacagacgcgactcacaagatgcgccggctccccgggctcaccaaggagaaacgggagccagtcccacggagcgacagtcagcaaaaccaccacacagggatgtggaaaactcatgactctacccgccccaacccaccacacacagaacttgcccagaacattctctcaaacacaaaatgagatcgaagctatactacatcacagccaagaagcggctagctgcagcagccaaagatttctctgggtgatgaggtggcctttactgcatgtcaaatgttcacaatttcaagttttgggggtttcaattcaacataggtcaccagaaagtaacaatctgcaactaaggtccttagcacgtatggaacactcaccacaaagaaccctgcatggggttttggtgtaaatgtaactgcagtatgagagcaggtaaggggtggggtatgcacccttaccccactgtgtctcgcatacgaccccacaccccaaatccttggcttcttcagttagcaagaaagtcacgaaccatagtatcttccgtgatactttaggggaaaagaaatcctaagagagaaaacacagtatttggtgagtcttgaaaagcacacctctgcggttcctactggaaatgtacatgagattttgctgaatggagaccaccgctgagtcacccaggcttccctctcgccttcagaaaggcatcaagccactgtagggtaagaatggatatcccagttcttggagaacaaagcctaaatgctccaaagctgaagtctctgaagagcagaagtggttgttgacactgcaatgctagtaaggtcatagtgatataaccgcagtcggaaggaaaattaactgcagttaagatgcaaaaagcagtgatacttctaagacaagcacatgcacacccattcttgatttgacaacacaatctagtctatttcaaatagccaagaatttaacagctgggaaaaaaaatctttaacaggatagctgtcctcaactctaaaataagcaagaagagaaagataattattaccaatctgaatcagttaattgaagaggaaacctaagttgttgttttagattaacaggtctcactgaagagtaattttccatcacatatcatttttaaacaataatttgtactattttgcaggtttagagatgagttcgagaaaagagctcctcttcactagggcccacccactcgcctccgccttctgagcctgtctcttccgaggtggagctggcgctggagcacatctttccgcggaagccatctgactttgctccagaatctctctctcctgtacatcttgcttcataaacagaagacacctaagattaaaacaattttcaacacatcaaaaagacttttttttccccaaaagggtgagatactctatctatatacaaagaagaaataataaatcatcagtgttttcctgtggagttacaaa

SEQ ID NO: 7226 - DNA, 435 bp, Homo sapiens
cttctctgatccatgaaggatccaaaatcctaattccacatgttcagtcacttggacaaaatgttagccatgttagggtaggataaagaattatttcattttcaaagtctttgagtacctgctatgcaccaggaactttactgggcacagggactccagcagtggaaggcgcatgccaggctcgctggggagatgaacgagcaaaccaacatgtgccagttgcagtgacacagtaccgatggtgaggggggcactgcagacgggtgtgttgggaagggagtttgcagtgacacagtacagatggtgaggcgacactacagacctgtgtgttgggaagggagtttgcagtgacacagtacagatggtgaggggacactgcagacctctgtgttgggaagggagtttgcagtgacacagtacagatggtgaggggac

SEQ ID NO: 7227 - DNA, 538 bp, Homo sapiens
gatcatgccactgcactccagcctaggtgacacagtgagactgtctccaaaaatgagctatgcacagatttcaaaaattttttgcaccaaaataaacttgtactaacttgttataacatgtcttaagatctactttgaggcactaagaagggtatgactgtttgaaaagagcacctatcagagcaacatgaattctgctaaaaatggaagcaaggacatcaaatttatggtgatgcttgggtggaagaatggtgagatcagtgatttttttttttttttttcctgagacagagtctcgctctgttgcccaggctggagtgcagtggcgtgatctcggctcactgcagcttccgcctctcaggttcaagcaattctcttgcctcagcctcctgagtagctgggactacaggcacatgccaccacgcctggctaatttttttgtatttttaataaagacagggtttcaccatgttggccaggatggtctcgatctcctgacctcgtgatccacccacctcagcctcccaaagtgctagga

SEQ ID NO: 7228 - DNA, 435 bp, Homo sapiens
cttctctgatccatgaaggatccaaaatcctaattccacatgttcagtcacttggacaaaatgttagccatgttagggtaggataaagaattatttcattttcaaagtctttgagtacctgctatgcaccaggaactttactgggcacagggactccagcagtggaaggcgcatgccaggctcgctggggagatgaacgagcaaaccaacatgtgccagttgcagtgacacagtaccgatggtgaggggggcactgcagacgggtgtgttgggaagggagtttgcagtgacacagtacagatggtgaggggacactgcagacctctgtgttgggaagggagtttgcagtgacacagtacagatggtgaggcgacactacagacctctgtgttgggaagggagtttgcagtgacacagtacagatggtgaggcgac

SEQ ID NO: 7229 - DNA, 443 bp, Homo sapiens
gatcatgccactgcactccagcctaggtgacacagtgagactgtctccaaaaaggagctatgcacagatttcaaaaattttttgcaccaaaataaacttgtactaacttgttataacatgtcttaagatctactttgaggcactaagaagggtatgactgtttgaaaagagcacctatcagagcaacatgaattctgctaaaaatggaagcaaggacatcaaatttatggtgatgcttgggtggaagaatggtgagatcagtgatttttttttttttttccctgagacagagtctcgctctgttgcccaggctggagtgcagtggcgtgatctcggctcactgcagcttccgcctctcaggttcaagcaattctcttgcctcagcctcctgagtagctgggactacaggcacatgccaccacgcctggctaatttttttgtat

SEQ ID NO: 7230 - DNA, 335 bp, Homo sapiens
gggattgacagccacctgtgaagactcacctgctaggatctggctggctgtcttggtcgctgatcatgtccgaagaagtacaccactttcttaatcatgcagcttttaaaaatctcctcagccccacacttgagggtctctctcctagattctaatgtctagccctacacgaatgcagtatgctgcccttgatgtgataggacaacagaggacctgcacacatgctactggtcctgactgtgttttccttccataaacactgttctggcaagctggttttatgtgctgctggaccatttgcttatgtttgcacaataaaccagaaattaaacttt

SEQ ID NO: 7231 - DNA, 335 bp, Homo sapiens; identical to SEQ ID NO: 7230

SEQ ID NO: 7232 - DNA, 335 bp, Homo sapiens; identical to SEQ ID NO: 7230

SEQ ID NO: 7233 - DNA, 315 bp, Homo sapiens
tacttttttttttttttgagacggagtctcactctgtcacccaggctggagtgcagtggcacaatctcctcttactgcaagctccgcctcccgggttcacgccattcttctgcctcagcctcccgagtagctgggactgcaggtgcccgccaccacgcccggctaactttttgtatttttagtagagacggggtttcaccgtgttagccaggatagtctcaatctcctgacctcgtgatccacccacctcggcctcccaaagtgctgggattacaggcgtgagccaccgcgcccggccagtgatatacttttaaa

SEQ ID NO: 7234 - DNA, 400 bp, Homo sapiens
cagatttatacatatttaacttgaagatttttgttcaaacttataaataaaagcaacatatgtgtgaagcagtctgcaataaattgtagcattgtgatatgagaactggttttaaattttgcaaattaatattttatttaacatttgaattgcttaaattgatataaaactgctttttaaaaattgtattacctttctgctagaattcattcttgtacttaattaaatctttttggcagtttccagtttcaagaattccatgcatgttcacagacatcattttctgtactgtaaagcatttgtttcttgatttgctgagttgaagtattcaatttaagtcattagctaaacagaagtcctcagtttatgctaatattgttttgtcataatgtcaatcagc

SEQ ID NO: 7235 - DNA, 295 bp, Homo sapiens
ttttttttttttttgagacggagtctcactctgtcacccaggctggagtgcagtggcacaatctcctcttactgcaagctccgcctcccgggttcacgccattcttctgcctcagcctcccgagtagctgggactgcaggtgcccgccaccacgcccggctaactttttgtatttttagtagagacggggtttcaccgtgttagccaggatagtctcaatctcctgacctcgtgatccacccacctcggcctcccaaagtgctgggattacaggcgtgagccaccgcgcccggcc

SEQ ID NO: 7236 - DNA, 400 bp, Homo sapiens; identical to SEQ ID NO: 7234

SEQ ID NO: 7237 - DNA, 7280 bp, Homo sapiens
atggggtggctcccactcctgctgcttctgactcaatgcttaggggtccctggtgagtgcccccaaccttgatccccatctgccttcaggaggggcttggccccattctcctattctgggatgagaaaaaagtcagggagccagaggctcagtgggcatggggcagtgaccttggcctcttgagcacagctgggaagccctaggaacacatagacatggcccacttaggcctctattagcacgtctgctctagcactgaagcagtgttaggaccacacagatgcacgcacacagcaggcagtgacccctcctgagcctgatctacccctctaacctagcgtatgcctttgtgcaggtgagagcccagctttggagtctgaatgcctagccagggcccctggctgggtaatgtgatggctctgagccttagcattctcatttgagagatgagatggggcaagctccatcacccactgctctcacagagcgtgtgtgttagatctgagcccggtgcctgggccactacacagaggcaccggtgataactaccaagtctgggcctgcttcccaggggaaattttttgacaagtatctgtgcaggggggctagactggcccttgaaagtgcatacagggtccatcccagaagccttgtagctttgatcccctgaatgaacaaactgtggacatgccaatacacattactgacatgtatgcccacctgacctgcacccactctgcagggcagcgctcgccattgaatgacttctaggtgctccggggcacagagctacagcgccgctacaagcggtggtgcccgggccttggcaggaggatgtggcagatgctgaagagtgtgctggtcgctgtgggcccttaatggactgccggtgagtggccactgggcatagataagactgggggcaggggagcctgggccgtggcgttaccttgtgccttcttctctccagggcgttccactacaatgtgagcagccatggttgccaactgctgccatggactcaacactcaccccacacgaggctgcggcattctgggcgctgtgacctcttccaggagaaaggcgagtgggggtggagaggggcagggtgggagacaggggacctcagcccaagttgatcttctgtctcttgctcccagactacatacggacctgcatcatgaacaatggggttgggtaccggggcaccatggccacgaccgtgggtggcctgtcctgccaggcttggagccacaagttcccgaacgatcaccagtgggacaaacaccttccctccgtcccggcctgggaccttcccccagcacacactatagtgatgctctgggccctcaggtacatgcccacgctccggaatggcctggaagagaacttctgccgtaaccctgatggcgaccccggaggtccttggtgccacacaacagaccctgccgtgcgcttccagagctgcggcatcaaatcctgccgggtgggtaagcggcgccgggtcaagctgggagagtggagggacaagcccacgcccatccacgaacccactggctctttgtctccagccgcgtgtgtctggtgcaatggcgaggaataccgcggcgcggtagaccgcaccgagtcagggcgcgagtgccagcgctgggatcttcagcacccgcaccagcaccccttcgagccgggcaagtacgcgtaggcggtatcggcgccctgggggccgggctagggaaggtccaggactccaggggcagggctccgtgtagggcaactgggcggggccagataagccagagtcccagggtcttcttcacgccccattaccgcccccaggttcctcgaccaaggtctggacgacaactattgccggaatcctgacggctccgagcggccatggtgctacactacggatccgcagatcgagcgagaattctgtgacctcccccgctgcggtaggcggcggggaccaggcctgggagggtacctgggaaccttggggaggggcgtggcttggccggggaggtcagaggggctgggcgtgacctgagagcatatcccgtggagtaccgtacacctgggaaaggcgggtttggtcccagccccagagggatctcagctgtcgctcggggccggacctatctcggtccatctaagggtccgaggcacagccccgccaagaggccacaagtgtcagctgcttccgcgggaagggtgagggctaccggggcacagccaataccaccaccgcgggcgtaccttgccagcgttgggacgcgcaaatcccgcatcagcaccgatttacgccagaaaaatacgcgtgcaagtgaggtgggggggcgggcgttgggacgtgctgctgcgggtgagacgggaggagggtagtcacgggcttagggctggaggctggcgggctagggctgagtgcagcgcctgcttagagaccttcgggagaacttctgccggaaccccgacggctcagaggcgccctggtgcttcacactgcggcccggcatgcgcgtgggcttttgctaccagatccggcgttgtacagacgacgtgcggccccagggtgaggcccaagcttgggggctacagagccggggctggaagcctggaaccggagggccggggcggggtctcggcctgatggctgcccgcaccggccgcagactgctaccacggcgcgggggagcagtaccgcggcacggtcagcaagacccgcaagggtgtccagtgccagcgcgggtccgctgagacgccgcacaagccgcagtgaatccctggtgctcccggccccgccagggccctaaccctggggcggcatgctttgatgtctgggaccagagcctggaaatggttgagactaccctgccacgacttcgctcccgctcccgcctcggttcacgtttacctccgaaccgcatgcacaactggaggagaacttctgccagacccagatggggatagccatgggccctggtgctacacgatggacccaaggaccccattcgactactgtgccctgcgacgctgcggtgagcactagtgacgcttgccccatgaccctgcctcagccctcaccaccaaaggctggctcccttaaccgcagtgaactttgtctttcagctgatgaccagccgccatcaatcctggacccccccaggttaggagttgggccagttatgggtcaggccctttagcccacgacatccacacagtctgggtttcatccagcccaccccatcctacagaccaggtgcagtttgagaagtgtggcaagagggtggatcggctggatcagcgttgttccaagctgcgcgtggctgggggccatccgggcaactcaccctggacagtcagcttgcggaattggtgaggcacaactgcctgtctcccacagagaggagctgaggttgtgtcctctgtggttatgccactgggggctgggaatctatccctgcccccagaggtcctagccagaagatggcaggtctagcatctgtcccaggagtctgttccctgtcctaattccccactcctctaggcagggccagcatttctgcggggggtctctagtgaaggagcagtggatactgactgcccggcagtgcttctcctcctggtgagcctcccttgtgtttggggacccagtctcatcccaccttcccctttccccaggcaagctaacaagtgagccttggggcaacggactgagagtcacaaatgacctagcagagcttctctcccagccatatgcctctcacgggctatgaggtatggttgggcaccctgttccagaacccacaacatggagagccaggcctacagcgggtcccagtagccaagatgctgtgtgggccctcaggctctcagcttgtcctgctcaagctggagaggtatgtggacaacctgggagggtgtgaggtggggctgagccttgtggcctcagaccctgagtgcccccattcttgctaaagatctgtgaccctgaaccagcgtgtggccctgatctgcctgccgcctgaatgatatgtggtgcctccagggaccaagtgtgagattgcaggccggggtgagaccaaaggtaagagcatagtgcacaggactgctggtggccaggaggcccagccctggatcttcctccaggaccgtctccttctccccattcccctcactgcaggtacgggtaatgacacagtcctaaatgtggccttgctgaatgtcatctccaaccaggagtgtaacatcaagcaccgaggacatgtgcgggagagcgagatgtgcactgagggactgttggcccctgtgggggcctgtgaggttggtggcagggccctgggccagccctggaagggtatggggggctagaaatgaactattttatcatgaagcaggctagtcatggctgtggcccagggccctcatcagttctcctacctgccagggtgactacgggggcccacttgcctgctttacccacaactgctgggtcctgaaaggaattagaatccccaaccgagtatgcgcaaggtcgcgctggccagccgtcttcacgcgtgtctctgtgtttgtggactggattcacaaggtcatgagactgggttaggcccagccttgacgccatatgctttggggaggacaaaacttgtaagtacagtcaaggacaagacttgtactcaaggctgagatttaataaaattcatatttttactacttcaccaaggactttcttaaatgaaaatggtttttccccctacaagtaaacagtaataaagaagagaattattcctagtgcagtttgttttcatggtcttaatttttgctaagactccactgcttttgccttatcaatacaagtgccaacacagtgaaaaggcaaatatcatcttagtattactctgaaaatagttctgagctaatggcctactgaaaggaaaagagtggctcctgctattctattagacttattacaattatcttaagtattctttctaccctcctttaattgaatggaaacagggatggattggaggagctgtttttctcctttctttcccccggcaatatttactatttaatgccacttactaacactcaaagaaacaaaaccaaacttctcaattgacagtgcagtgacccaacaaagacacgggttcttgaattcaaagtggagcaggagagacggtaaatacacatttactttaatatatatatatttattatttatgtgtttaaagcacaaattagtttggtaaaaaacatctcatgtctgttttatttccacatccctgagactgacaaggggatgcctatcaattaattcatttagagagccatacaccccaagaaataaattatttgtcctctggagcttgtcacagggggatttttaaaaaaacattaaacagaaagacaactgtgcatcttagaaagataaaaggccaattcttcctctccggctgataggttcttaataatagtgatatctactaataagatgttttacatagtgtaaagcatgttcacatacaaattacttagcctctttgagcctcagttttcttatatgtaaagctggattaatagtacattttgtgtttaaaaagatgatgtatatgaagtgtttaccatttttcttggcatctagttcagttctcagtaactgatgtggtggtggtggtggtcatagtagcagtaagatccgtagtaatagtagcagcagttgttttagaaattagtaactgaggcctggcaaagttaaaggctctttcattaacacccagaggggaagaaatgaagctggtcttcagaggcaggctattttcactctgtgtcccaaattttcccccctagaccgtttttatacttctggggctctcagaaaatattctcagctattctgttagcttgatctcctaccatctgagagtgggcttccttcaaacaaccaaatttccaggtatttctaaactgcccttcccctacaccattctttgattcagtatttcaagacccctaagagaaatggtacatttacgtgtaagcacaggatagtgaagtatttacaacaagtgctttggagccagcaaatatggatcagaatgcagctttcctttcctacatacatgacattgggcagctaatttctaagattttacttctttgtctatgaaagtggagtactagtacttgctttgtgcaactctgatggttgttacatgaggtagcatctagaaacagcttgcacattgccagacacccagtggaaggtcaatgaatgactatttgaggactaactattacagaaatgtttactcttctgagtcctgatttctagtctcctggactaaataggttcactgttttcctcccggttcagtttccagacacatcacagaattataagaatattaaaaactcaggcttatacctacgcaggattttctataaccctctttctgctttgagctcctaaaggtatttcatagaaaaatgaccttatttttaaatagagggggcagttgaaaatcagtgaacggacctaccccctaatgatttttttctcagacataattataataattagcattataaagtgctaattatctttggacacagaggacctgcacaccagagacagaggtccgcattaagtaaagtgaatttcactttcttcagttgtgagatttctcttttttcttctttgtaatgatgcaaagatatatcatccaccaagcctcatttaaaagctttttccagttaaggaaactatctcttggccatccacagccagactccatattgagattatggatattcaaagaaattgtctttcccttgtatattgtcataactttttgtgaaatgttcgttttatagttccaggccagcacctagaaccttgctagaataaaaaactgcagaaatcatgagtttctagtttggatgaaagagcacacctattaacaaatgatagacggctatcctactgtgagtcctgaaaactggtggtgtgattgttgaatgggttaggggtatagcagagaaactcagtgtgggctacatacaatttcagcttgaatcacacttaacagatcctctgttccaaccatttaaatttacaaagaagaaactaaggcacagaactacttgagaagagaagcagaattgaaaactagagctcctgattgttctcaaaataatttttatcatactgcatcgggttctaagtgagagggcttcttatttagtaatgccaaggtcatgtgttaacatgt

SEQ ID NO: 7238 - DNA, 7293 bp, Homo sapiens
ggagtggctcccactcctgctgcttctgactcaatacttaggggtccctggtgagtgcccccaaccctgatccccatctgccttcaggagggggttggccctattctcctattctgggatgagaaaaaagtcggggagccagaggctcagtgggcatggggcagtgaccttggcctcttgagcacagctgggaagccctaggaacacacagacacggcccacttaggcctctattagcacgtctgctctagcactgaagcagtgttaggaccacacagatgcacgcacacagcaggaaatgacccctcctgagcctgatctacccctctaacctagcgtatgcctttgtgcaggtgagagcccagatttggagtctgaatgcctagccagggcccctggctgggtaatgtgatggctctgagccttagcattctcatttgagagatgagatggggcaagctccatcacccactgctctcacagagcgtatgtgttagatctgagcccagtgcctgggccactacacagaggcaccggtgataactaccaagtctgggcctgcttcccaggggaaatttttttgacaagtatctgtgcaggggggctagactggcccttgaaagtgcatacagggtccatcccagaagccttgtagctttgatcccctgaatgaacaaagtgtggacatgccaatacacattactgacatgtatgcccacctgacctgcacccactcatgcccactctgcagggcagcgctcgccatcgaatgacttccaggtgctccggggcacagagctacagcacctgctacatgcggtggtgcccgggccttggcaggaggatgtggcagatgctgaagagtgtgctggtcgctgtgggcccttaatggactgctggtgagtggccactgggcctagataagactgggggcaggggagcctgggccgtggcgttaccctgtgccttcttctctccagggcgttccactacaatgtgagcagccatggttgccaactgctgccatggactcaacactcgccccactcaaggctgtggcattctgggcgctgtgacctcttccaggagaaaggcgagtgggggtggagaggggcagggtgggagacaggggacctcagcccaagttgatcttctgtctcttgctcccagactacatacggacctgcatcatgaacaatggggttgggtaccggggcaccatggccacgaccgtgggtggcctgtcctgccaggcttggagccacaagttcccgaacgatcacaagtgagacaaacaccttccctccgtcccggcctgggaccttcccccagcacacactatagtgatgctctgggccctcaggtacatgcccacgctccggaatggcctggaagagaacttctgccgtaaccctgatggcgaccccggaggtccttggtgccacacaacagaccctgccgtgcgcttccagagctgcagcatcaaatcctgccgggtgggtaagcggcgccgggtcaagctgggagagtggaggggcaagcccacgcccatccacgaacccactggctctttgtctccagccgcgtgtgtctggtgcaatggcgaggaataccgcggcgcggtagaccgcaccgagtcagggcgcgagtgccagcgctgggatcttcagcacccgcaccagcaccccttcgagccgggcaagtacgcgtaggcggtatcggcgccctgggggccgggctagggaaggtccaggactccaggggcagggctccgtgtagggcaactgggcggggccagataagccagagtaccagggtcttcttcacgccccattaccgcccccaggttcctcgaccaaggtctggacgacaactattgccggaatcctgacggctccgagcggccatggtgctacactacggatccgcagatcgagcgagagttctgtgacctcccccgctgcggtaggcggcggggaccaggcctgggagggtacctgggaaccttggggaggggcgtggcttggccggggaggtcagaggggctgggcgtgacctgagagcatatcccgtggagtaccgtacacctgggaaaggcgggtttggtcccagccccagagggatctcagctgtcgctcggggcccgacctatctcggtccatctaagggtccgaggcacagccccgccaagaggccacaagtgtcagctgcttccgcgggaagggtgagggctaccggggcacagccaataccaccaccgcggcgtaccttgccagcgttgggacgcgcaaatcccacatcagcaccgatttacgccagaaaaatacgcgtgcaagtgaggtgggcgggggggcgggcgttgggacgtgctgctgcgggtgagacgggaggagggtagtcacgggcttagggctggaggctggcgggctagggctgagtggagcgcctgcttagagaccttcgggagaacttctgctggaacctcgacggctcagaggcgccctggtgcttcaccctgcggcccggcacgcgcgtgggcttttgctaccagatccggcgttgtacagacgacgtgcggccccagggtgaggcccaagcttgggggctacagagccggggctggaagcctggaaccggagggccggggcgaggtctcggcctgatggctgcccgcaccggccgcagactgctaccacggcgcgggggagcagtaccgcggcacggtcagcaagacccgcaagggtgtccagtgccagcgctggtccgctgagacgccgcacaagctgcagtgagtccctggtgctcccggccccgccagggccctaaccctggggcggcatgctttgatgtctgggaccagagcctggaaatggttgagactaccctgccacgattttgctcccgctcccgcctcggttcacatttacctccgaaccgcatgcacaactggaggagaacttctgccagacccagatggggatagccatgggccctggtgctacacgatggacccaaggaccccattcgactactgtgccctgcgacgctgcggtgagcactagtgacgcttgccccatgaccttacctcagccctcaccaccaaaggctggctcccttaaccccagtgaactttgtctttcagctgatgaccagccgccatcaatcctggacccccccaggttacgagttgggccagttatgggtcaggccctttagcccacgacatccacacagtctgggtttcatccagcccaccccatcctacagaccaggtgcagtttgagaagtgtggcaagagggtggatcggctggatcagcgtcgttccaagctgcgcgtggctgggggccatccgggcaactcaccctggacagtcagcttgcggaatcggtgaggcacaactgcctgtctcccacagagaggagctgaggttgtgtcctctgtggttatgccactgggggctgggaatctatccctgcccccagaggtcctagccagaagatggcaggtctagcatctgtcccaggagtctgttccctgtcctaattccccactcctctaggcagggccagcatttctgcgcggggtctctagtaaaggagcagtggatactgactgcccggcagtgcttctcctcctggtgagcctcccttgtgtttggggacccagtctcatcccactttcccctttccccaggcaagctaacaagtgagccttggggcaacggactgagagtcacaaatgacctagcagagcttctctcccagccatatgcctctcacgggctatgaggtatggttgggcaccctgttccagaacccacaacatggagagccaggcctacagcgggtcccagtagccaagatgctgtgtgggccctcaggctcccagcttgtcctgctcaagctggagaggtatgtggacaacctgggaggatgtgaggtggggctgagccttgtggcctcagaccctgagtgcccccattcttgttaaagatctgtgaccctgaaccagcgtgtggccctgatctgcctgccgcctgaatggtatgtggtgcctccagggaccaagtgtgagattgcaggctggggtgagaccaaaggtaagagcatagtgcacaggactgctggtggccaggaggcccagccctggatcttcctccaggaccgtctccttctccccattcccctcactgcaggtacgggtaatgacacagtcctaaatgtggccttgctgaacgtcatctccaaccaggagtgtaacatcaagcaccgaggacatgtgcgggagagcgagatgtgcactgagggactgttggcccctgtgggggcctgtgaggttggtggcagggccctgggccagccctggaagggtatggggggctagaaatgaactattttatcatgaagcaggctagtcattgctgtggcccggggccctcatcagttctcctacctgccagggtgactacgggggcccacttgcctgctttacccacaactgctgggtcctgaaaggaattagaatccccaaccgagtatgcacaaggtcgcgctggccagccgtcttcacgcgtgtctctgtgtttgtggactggattcacaaggtcatgagactgggttaggcccagccttgacgccatatgctttggggaggacaaaacttgtaagtacagtcaaggacaagacttgtactcaaggttgagatttaataaaattaatatttttactacttcaccaaggactttcttaaacgaaaatggtttttccccctgcaagtaaacagtaatgaagaagagaattattcctagtgcagtttgttttcatggtcttaatttttgctaagactccactgtttttgccttatcaatacaagtgccaacacagtgaaaaggcaaatatcatcttagtattactctgaaaatagttctgagctaatggcctactgaaaggaaaagagtggctcctgctattctattagacttattacaattatcttaagtattctttctaccctcctttaattgaatggaaacagggatggattggaagagctgtttttctcctttctttcccccggcaatatttaccatttaatgccacttactaacactcaaagaaacaaaaccaaacttctcaattgacagtgcagtgacccaacaaagacacgggttcttgaattcaaagtggagcaggagagacggtaaatacacatttactttaatatatatatatttattatttatgtgtttaaagcacaaattagtttggtaaaaaacatctcatgtctgttttatttccacatccctgagactgacaatgggatgcctatcaattaattcatttagagagccatacaccacaagaaacaaattatttgtcctctggagcttgtcacagggggatttttaaaaaaccattaaacagaaagacaactgtgcatcttagaaagataaaaggccaattcttcctctccggctgataggttcttaataatagtgatatctactaataaggtgttttacatagtgtaaagcatgttcacatacaaattacttagcctctttgagcctcagttttcttatatgtaaaactggattaatagtacattttgtgtttaaaaagataatgtatatgaagtgtttaccatttttgcttggcatctagttcagttctcagtaactgatgtggtggtggtggtggtcatagtagcagtaagatccgtagtaatagtagcagcagttgttttagaaattagtaactgaggcctggcaaagttaaaggctctttcattaacacccagaggggaagaaatgaagctggtcttcagaggcaggctattttcactctgtgtcccaaattttcccccctagaccgtttttatacttctggggcctcagaaaatattctcagctattctgttagcttgatctcctaccatctgagagtgggcttccttcaaacaaccaaatttccaggtatttctaaactgcccttcccctacaccattctttggttcagtatttcaagacccctaagagaaatggtacatttacatgtaagcacaggatagtgaagtatttacaacaagtgctttggagccagcaaatatgaatcagaatccagctttcctttcctacatacatgacattgggcagctaatttctaagattttacttctttatctatgaaagtggagtactagtacttgctctgtgcaactgtgatggttgttacatgaggtagcatctagaagcagcttgcacattgccagacacccagtggaaggtcaatgaatgactatttgaggactaactattacagaaatgtttactcttctgagtcctgatttctagtctcctggactaaataggttcactgttttcctcccggttcagtttccagacacatcacagaattataagaatattaaaaactcaggcttatacctacacaggattttctataaccctctttctgctttgagctcctaaaggtatttcatagaaaaatgaccttatttttaaatagagggggcagttgaaaatcagtgaacgggcctaccccctaatgatttttttctcagacctaattataataattagcattataaagtgctaattatctttggacacagaggacctgcacaccagagacagaggtccgcattaagtaaagtggatttcactttcttcagttgtgagatttctcttttttcttctttgtaatgatgcaaagatatatcttccaccaagcctcatttaaaagctttttccagttaaggaaactatctcttggccatccacagccagactgcatattgagattatggatattcaaagaaattgtctttcctttgtatattgtcataactttttgtgaaatgttcgttttatagttccaggccagcacctagaacctggctagaataaaaaactgcagaaatcatgagtttcttgtttggatgaaagagcacacctattaacaaatgatagacggctatcctactgtgagtcctgaaaactggtggtgtgattgttgaatgggttaggggtatagcagagaaactcagtgtgggctacatacaatttcagcttgaatcacacttaacagatcctctgttccaaccatttaaatttacaaagaagaaactaaggcacagaactacttgagaagagaagcagaattgaaaactagagctcctgattgttctcaaaataatttttatcatactgcatcgggttctaagtgagagggcttcttatttagtaatgccaaggtcatgtgttaacatgt

SEQ ID NO: 7239 - DNA, 663 bp, Homo sapiens
aggtacgggtaatgacacagtcctaaatgtggccttgctgaatgtcatctccaaccaggagtgtaacatcaagcaccgaggacatgtgcgggagagcgagatgtgcactgagggactgttggcccctgtgggggcctgtgaggttggtggcagggccctgggccagccctggaagggtatggggggctagaaatgaactattttatcatgaagcaggctagtcatggctgtggcccggggccctcatcagttctcctacctgccagggtgactacgggggcccacttgcctgctttacccacaactgctgggtcctggaaggaattagaatccccaaccgagtatgcgcaaggtcgcgctggccagccgtcttcacacgtgtctctgtgtttgtggactggattcacaaggtcatgagactgggttaggcccagccttgacgccatatgctttggggaggacaaaacttgtaagtacagtcaaggacaagacttgtactcaaggctgagatttaataaaattcatatttttactacttcaccaaggactttcttaaatgaaaatggtttttccccctacaagtaaacagtaataaagaagagaattattcctagtgcagtttgttttcatggtcttaatttttgctaagactccactgctttt

SEQ ID NO: 7240 - DNA, 3374 bp, Homo sapiens
cttgccagcgttgggacgcgcaaatcccgcatcagcaccgatttacgccagaaaaatacgcgtgcaagtgaggtgggcgggggggcgggcgttgggacgtgctgctgcgggtgagacgggaggagggtagtcacgggcttagggctggaggctggcgggctagggctgagtgcagcgcctgcttagagaccttcgggagaacttctgccggaacctcgacggctcagaggcgccctggtgcttcacactgcggcccggcatgcgcgtgggcttttgctaccagatccggcgttgtacagacgacgtgcggccccagggtgaggcccaagcttgggggctacagagccggggctggaagcctggaaccggagggccggggcggggtctcggcctgatggctgcccgcaccggccgcagactgctaccacggcgcgggggagcagtaccgcggcacggtcagcaagacccgcaagggtgtccagtgccagcgctggtccgctgagacgccgcacaagccgcagtgagtccctggtgctcccggccccgccagggccctaaccctggggcggcatgctttggtgtctgggaccagagcctggaaatggttgagactaccctgccacgattttgctcccgctcccgcctcggttcacgtttacctccgaaccacatgcacaactggaggagaacttctgccagacccagatggggatagccatgggccctggtgctacacgatggacccaaggaccccattcgactactgtgccctgcgacgctgcggtgagcactagtgacgcttgccccatgaccctgcctcagcccccaccaccaaaggctggctcccttaaccccagtgaactttgtctttcagctgatgaccagccgccatcaatcctggacccccccaggttaggagttgggccagttatgggtcaggccctttagcccacgacatccacacagtctgggtttcatccagcccaccccatcctacagaccaggtgcagtttgagaagtgtggcaagagggtggatcggctggatcagcgtcgttccaagctgcgcgtggctgggggccatccgggcaactcaccctggacagtcagcttggggaatcggtgaggcacaactgcctgtctcccacagagaggagctgaggttgtgtcctctgtggttatgccactgggggctgggaatctatccctgcccccagaggtcctagccagaagatggcaggtctagcatctgtcccaggagtctgtttcctgtcctaattccccactcctctaggcagggccagcatttctgcgcggggtctctagtgaaggagcagtggatactgactgcccggcagtgcttctcctcctggtgagcctcccttgtgtttggggacccagtctcatcccaccttcccctttccccaggcaagctaacaagtgagccttggggcaacggactgagagtcacaaatgacctagcagagcttctctcccagccatatgcctctcacgggctatgaggtatggttgggcaccctgttccagaacccacaacatggagagccaggcctacagcgggtcccagtagccaagatgctgtgtgggccctcaggctcccagcttgtcctgctcaagctggagaggtatgtggacaacctgggaggatgtgaggtggggctgagccttgtggcctcagaccctgagtgcccccattcttgttaaagatctgtgaccctgaaccagcgtgtggccctgatctgcctgccgcctgaatggtatgtggtgcctccagggaccaagtgtgagattgcaggctggggtgagaccaaaggtaagagcatagtgcacaggactgctggtggccaggaggcccagccctggatcttcctccaggaccgtctccttctccccattcccctcactgcaggtacgggtaatgacacagtcctaaatgtggccttgctgaacgtcatctccaaccaggagtgtaacatcaagcaccgaggacatgtgcgggagagcgagatgtgcactgagggactgttggcccctgtggggccctgtgaggttggtagcagggccctgggccagccctggaagggtatggggggctagaaatgaactattttatcatgaagcaggctagtcattgctgtggcctggggccctcatcagttctcctacctgccagggtgactacgggggcccacttgcctgctttacccacaactgctgggtcctggaaggaattagaatccccaaccgagtatgcgcaaggtcgcgctggccagccgtcttcacacgtgtctctgtgtttgtggactggattcacaaggtcatgagactgggttaggcccagccttgacgccatatgctttggggaggacaaaacttttaagtacagtcaacgacaagacttgtactcaaggttgagatttaataaaattaatatttttactacttcaccaaggactttcttaaacgaaaatggtttttccccctgcaagtaaacagtaatgaagaagagaattattcctagtgcagtttgttttcatggtcttaatttttgctaagactccactgtttttgccttatcaatacaagtgccaacacagtgaaaaggcaaatatcatcttagtattactctgaaaatagttctgagctaatggcctactgaaaggaaaagagtggctcctgctattctattagacttattacaattatcttaagtattctttctaccctcctttaattgaatggaaacagggatggattggaagagctgtttttctcctttctttcccccggcaatatttaccatttaatgccacttactaacactcaaagaaacaaaaccaaacttctcaattgacagtgcagtgacccaacaaagacacgggttcttgaattcaaagtggagcaggagagacggtaaatacacatttactttaatatatatatatttattatttatgtgtttaaagcacaaattagtttggtaaaaaacatctcatgtctgttttatttccacatccctgagactgacaaggggatgcctatcaattaattcatttagagagccatacaccacaagaaataaattacttgtcctctggagcttgtcacagggggatttttaaaaaaccattaaacagaaagacaactgtgcatcttagaaagataaaaggccaattcttcctctccggctgataggttcttaataatagtgatatctactaataaggtgttttacatagtgtaaagcatgttcacatacaaattacttagcctctttgagcctcagttttcttatatgtaaaactggattaatagtacattttgtgtttaaaaagataatgtatatgaagtgttt

SEQ ID NO: 7241 - DNA, 496 bp, Homo sapiens
taaatatccattctgtgtattgaagtataaatgagtcccacttaagaaaaaacaaaacaaaccaacttccaatgatttaaaaatactaacgtgaccctcttacgtttacctaaagctagtgtttctcaaacatcagctgtatcagaatccctgaaggacttgttaaaacaaattgctggtctctactctgagcttctgattcattaaatgtgggatggtacctgagaatctgcatttctaacacgttcccaggtgaccctgatgctgttgctctgagaaccactttgagatccacatctctaagctcatcagtctgtccgttacaccttacaagacatactttcctaatctgacacccttctatttgtctttttttggaatgctttagaaatttagcagttatcttttttatgtattttacatttgttacagctttccttggtggacagatatgagttttctacttgaaaataaacacgtttttctttaaaatatc

SEQ ID NO: 7242 - DNA, 373 bp, Homo sapiens
ctctgggctctgccgccgggcgtgggctgacctgcctacagctggggcctgataaggcagcagcaaaagggtggaggggaggcagtgttgaagctggggcaagtaattttccccaatttacagggaaaaaccgaaattcagaaaagtttaatgtcagccaggggctggaacccagacctctggcagctgtcactttcacaatgcccttgggctgactaggctgcagaggggtttcaccccaaccccagggcacctcaagtggccccaccaaaccttcctaacacctgaccactaagtagggaggcctctcagggggctagctgtgctaggcccttgcaactgacctgtgggacctgaggcctggcccctcatg

SEQ ID NO: 7243 - DNA, 496 bp, Homo sapiens
taaatatccattctgtgtattgaagtataaatgagtcccacttaagaaaaaacaaaacaaaccaacttccaatgatttaaaaatactaacgtgaccctcttacgtttacctaaagctagtgtttctcaaacatcagctgtatcagaatccctgaaggacttgttaaaacaaattgctggtctctactctgagcttctgattcattaaatgtgggatggtacctgagaatctgcatttctaacacgttcccaggtgaccctgatgctgttgctctgagaaccactttgagatccacatctctaagctcatcagtctgtccgttacaccttacaagacatactttcctaatctgacacccttctatttgtctttttctggaatgctttagaaatttagcagttatcttttttatgtattttacatttgttacagctttccttggtggacagatatgagttttctacttgaaaataaacacgtttttctttaaaatatc

SEQ ID NO: 7244 - DNA, 760 bp, Homo sapiens
gctgatgaccagccgccatcaatcctggacccccccagttaggagttgggccagttatgggtcaggccctttagcccacgacatccacacagtctgggtttcatccagcccaccccatcctacagaccaggtgcagtttgagaagtgtggcaagagggtggatcggctggatcagcgttgttccaagctgcgcgtggctgggggccatccgggcaactcaccctggacagtcagcttgcggaattggtgaggcacaactgcctgtctcccacagagaggagctgaggttgtgtcctctgtggttatgccactgggggctgggaatctatccctgcccccagaggtcctagccagaagatggcaggtctagcatctgtcccaggagtctgttccctgtcctaattccccactcctctaggcagggccagcatttctgcggggggtctctagtgaaggagcagtggatactgactgcccggcagtgcttctcctcctggtgagcctcccttgtgtttggggacccagtctcatcccaccttcccctttccccaggcaagctaacaagtgagccttggggcaacggactgagagtcacaaatgacctagcagagcttctctcccagccatatgcctctcacgggctatgaggtatggttgggcaccctgttccagaacccacaacatggagagccaggcctacagcgggtcccagtagccaagatgctgtgtgggccctcaggctctcagcttgtcctgctca

SEQ ID NO: 7245 - DNA, 310 bp, Homo sapiens
aagagaaatggtacatttacgtgtaagcacaggatagtgaagtatttacaacaagtgctttggagccagcaaatatggatcagaatgcagctttcctttcctacatacatgacattgggcagctaatttctaagattttacttctttgtctatgaaagtggagtactagtacttgctttgtgcaactctgatggttgttacatgaggtagcatctagaaacagcttgcacattgccagacacccagtggaaggtcaatgaatgactatttgaggactaactattacagaaatgtttactcttctgagtcc

SEQ ID NO: 7246 - DNA, 1522 bp, Homo sapiens
tggtcatagtagcagtaagatccgtagtaatagtagcagcagttgttttagaaattagtaactgaggcctggcaaagttaaaggctctttcattaacacccagaggggaagaaatgaagctggtcttcagaggcaggctattttcactctgtgtcccaaattttcccccctagaccatttttatacttctggggcctcagaaaatattctcagctattctgttagattgatctcctaccatctgagagggggcttccttcaaacaaccaaatttccaggtatttctaaactgcccttcccctacaccattctttgattcagtatttcaagacccctaagagaaatggtacatttacatgtaagcacaggatagtgaagtatttacaaaagtgctttggagccagcaaatatgaatcagaatccagctttcctttcctacatacatgacattgggcagctaatttctaagattttacttctttatctatgaaagtggagtactagtacttgctctgtgcaactgtgatggttgttacatgaggtagcatctagaagcagcttgcacattgcgagacacccagtggaaggtcaatgaatgactatttgaggactaactattacagaaatgtttactcttctgagtcctgatttctagtctcctggactaaataggttcactgttttcctcccggttcagtttccagacacatcacagaattataagaatattaaaaactcaggcttatacctacacaggattttctataaccctctttctgctttgagctcctaaagctatttcatagaaaaatgaccttatttttaaatagagggggcagttgaaaatcagtgaacgggcctaccccctaatgatttttttctcagacataattataataattagcattataaagtgctaattatctttggacacagaggacctgcacaccagagacagaggtccgcattaagtaaagtggatttcactttcttcagttgtgagatttctcttttttcttctttgtaatgatgcaaagatatatcttccaccaagcctcatttaaaagctttttccagttaaggaaactatctcttggccatccacagccagactgcatattgagattatggatattcaaagaaattgtctttcctttgtatattgtcataactttttgtgaaatgtttgttttatagttccaggccagcacctagaacctggctagaataaaaaactgcagaaatcatgagtttcttgtttggatgaaagagcacacctattaacaaatgatagacggctatcctactgtgagtcctgaaaactggtggtgtgattgttgaatgggttaggggtatagcagagaaactcagtgtgggctacatacaatttcagcttgaatcacacttaacagatcctctgttccaaccatttaaatttacaaagaagaaactaaggcacagaactacttgagaagagaagcagaattgaaaactagagctcctgattgttctcaaaataatt

SEQ ID NO: 7247 - DNA, 1017 bp, Homo sapiens
cgcaaatcctaaagctccttttggagatgatataggatgtgaaatacagaaacctcagtgaaatcaagaaataatgatcccagccagactgagaaaatgtaagcagacagtgccacagttagctcatacagtgcctttgagcaagttaggaaaagatgcccccactgggcagacacagccctatgggctcatggtttgacaaacagagtggagagaccatattttagccccactcaccctcttgggtgcacgacctgtacagccaaacacagcatccaatatgaatacccatcccctgaccgcatccccagtagtcagattatagaatctgcaccaagatgtttagctttataccttggccacagagagggatgaactgtcatccagaccatgtgtcaggaaaattgtgaacgtagatgaggtacatacactgccgcttctcaaatccccagagcctttaggaacaggagagtagactaggattccttctcttaaaaaggtacatatatatggaaaaaaatcatattgccgttctttaaaaggcaactgcatggtacattgttgattgttatgactggtacactctggcccagccagagctataattgttttttaaatgtgtcttgaagaatgcacagtgacaaggggagtagctattgggaacagggaactgtcctacactgctattgttgctacatgtatcgagccttgattgctcctagttatatacagggtctatcttgcttcctacctacatctgcttgagcagtgcctcaagtacatccttattaggaacatttcaaaccccttttagttaagtctttcactaaggttctcttgcatatatttcaagtgaatgttggatctcagactaaccatagtaataatacacatttctgtgagtgctgacttgtctttgcaatatttcttttctgatttatttaattttcttgtatttatatgttaaaatcaaaaatgttaaaatcaatgaaataaatttgcagttaagatctttaa

SEQ ID NO: 7248 - DNA, 336 bp, Homo sapiens
atgggaaaggccgtatggctctcagaaggacttcaaagcggggaagcttacactttattgagcaaatgtgattcctttcttctaaaatcaaagcatgatgcttgacagtgtgaaatgtccaattttaccttttacacaatgtgagatgtatgaaaatcaactcattttattctcggcaacatctggagaagcataagctaattaagggcgatgattattattacaagaagaaaccaagacattacaccatggtttttagacatttctgatttggtttcttatctttcattttataagaaggttggttttaaacaatacactaagaatgactcctat

SEQ ID NO: 7249 - DNA, 3608 bp, Homo sapiens
cagtgcattaaaggagttcgagcaggtgccgggacacttgactgatgagctccacctgttctcccttgaggacctggtcaggatcaagaaagggctgctggcacccttactcaaggacattctgaaagcttcccttgcacatgtggctggctgtgaggtgagggtgcacccagagcagattcgttcccgatgcaccagggcctgtgctgggtgttccgcacttgacttcatttaactctcacaaaccctgagggaagtgccggtgacctagttagagatgagaaaactgaggtcagagctgtgaagtaacagctgagatacccctgctggtaagtggcagagccgggatgcaagcctggaccaatggacttcatctgggtgcccagttctgctcagggcccactctgccctgatgcaccaagtatagtcatgtggaaccaggattcaatggaacaggaggctctgtgtctacacggattgaagaattgtagtgcagcaatgataaatgaaattagatcatttcagagtgcatgtttacaattaggaccttactctggtactttaaaactgctttgatatggaattggatgaatgtacatttttatcttttttttgattctgacccattcattgctgcaaaacacaacaaccttttccttctagaggctggaatcatagacactgaaacactgatgtttataaagttctgtaatagtgaaaactcagcttatccatcaagagaaggttgtaactttttgatgtcttcttttacagctgtgtcaaggaaagggctttatttgtgaattttgccagaatacgactgtcatcttcccatttcagacagcaacatgtagaagatgttcaggtatttaataacttaataacataagcttaataataggttaactaattaaactaagtttagtaacttaagcacaaaattaacttaagctgaataatagcttaataatttaagcacagttatttaaagtacagtcatgctggtgtgtgcttgtatgctggattggagataatgaagttttgggcacagaaggaggagtatttgggtggggcagggataaaggataatgtcttctggtgcagggtttggatagaggagatggtccctttgttgcctgtgcccacctctctgtcttgtaattggatcattcatgcccagtggtgaagtctctggctgcttttgtgccacggaggcagagttgagtagctgttgtagagaccacatggccctcagggtctaaaacatttgctatctggctctttacagaaaaggttgccgacccttctgtggtattagtgcccgagagaatcccgtgttctgtaaactctgtttaatgggagagatcctggtaatgaactctgccttcacccttgataggggcatatcctcctctcaggccactccagtgttgtctccccaaccctttaggcagtgttgcaggactggctccccagcaaagagactctggggcagagacttgcctacaaaaagtttcatgttcttcaacttaatacctgtaggggtgtgcaggcagcaagactgggagagggagaagttgaactgtggtggggttgcagtggagccctcagctcatctcacggggagctctggagtttggtggcctttcagcattgttccaaactggggacaaattggggccggcctactcactatatagtgatcagtcattgaatgcaggctggtgccaggaaggggacaaagcagctttctcgatgtagggccatatctagagaaacaatgtggcttcccaagagttatcagccaccacctctcttggcagctggggaaacgcctgcctcagtgcttgagcagatccagggggcactgcagtgtccgttacatcaggctctctgagcctcctgttcatgacctgttggaagagtccaacaggtctgctgaaatgtgacctgctgaaacgtgcgtttcagcctggctggtttctttttagaagactctgggctctggattcagacccctctccctccctaggatggagacgaatgtctgcagaaatgtgagaaaacaagatagaccgtttgctaacggctctcttccttgcttgcagcgtgcagggcttgctttcacaaacagtgcttccagtcctccgagtgcccccggtgtgcgaggatcacagcgaggagaaaacttctggaaagtgtggcctctgcagcaacatgatgcccctgagtactgtgaaaaagactgttcaacatgccttatgataacactgatttgtgtctattattggtgacattgttttagatattgggtattgtatattaaggaaaaagatggtctatattctctttattgcatatacttaatgtttcaaaagaatgcagattctgtgtttaagcacagggctgatagttgtggttttgtttacaaatgttctgttttggctgctattggttttttaaagaggttttttatacttttgtatttgaatagttatgtttcactgatgctgagccagtttgtatgtgtgtgcatatatgtgaactgtaactgacaagatgaattactcagtttctctttctctaaagcttgtttgatgaaactggttggtcctttcagtgaacaaaaatatgaccccaaatctgtttgctctggcttttatttcttcaggaagcagacttccacttaaatgccattttgtgattgtgtcaatcatacacattttatttacttcagagtttgaatagagagtacacatttcttctgcagatttatttcatgatgagtttgagttgcttagcagggcgtgtgggtcccgttgaagtgcagtttgaagcaactgcttctagatggcactctttcaggtggcacaaattgaacctgtatttgtcatctctgttccacacactgcaatgtcaagggatgcagaagtgagtagaattccatccctgcccttgaggatcttgctttaacagatgtaaaactgaacataaggtatttgcagatttaaacgaactgggggaaataatgaacagtgtgattctagtaataacattaaaatcatagacattgactaataaggttaaatgaatcacaaaacctttatgaatttcttttttctaatagttcttatatgttttcctgaaacatgtgagcctattcttttttcttctactttctatatactttctcccacttgagaaaggggccttgaggctgggtcccttcatggtatacctttagactgaacggtttgcaacctagggcttgggcattacattccctgggattcacatgccctaactaaacctaccttgattttctcagacagcacaggcaggcaataaagcgtcacagattgtcccctaaccccatccagccatgtgtatgagtgtgttttattcaatgggatagtactgagcacatgaaagaaatgaatgacttctgtcaatctcttttcattcagtcttctcattctgtcaattgttttctcatccgcagtgcctctgccagaactgtgctcacatccattatttaagccagatcttttctaagtattatagaagtgtagaggcacatagaataaataaaaccagacttcaaacaa

SEQ ID NO: 7250 - DNA, 8184 bp, Homo sapiens
ttttcaatttgctgagcatcggccaaagcctgtatgcgaaagccaaggagctggacagagtgaaggtgagccgcagccccaaccccatccctctcattggaagtgtcctgtggcaggaaatgcacatcacactagcttggggaacccacagatacatcctctaagaggcaaatggatcataaagcgagtgaagcggctgggcgcaggggctcacgcctgtaatcccagcactttgagaggccaaggtgggcggattgcctgaggtcaggagttcgagactagcctggccaacatggtgaaatcccatctctactagaaattaaaaaaaaaaaaattagtcaggtatagtagcacacgcctgtaatcccagctactcgagaggctgaggcaggagaatcgcttgaacccgggaggtggaggttgcagcaagccgagattgcactactgcactccagcctgggtgacagagcaagaccctgtctcaaaaaaaaaaaaaaattagtgaagcttacactttggagcccctctcctgcacaggctctttccaaggccccacactgaatcttatacttagtattatgtttttcttgaagaaggccccaaagttctgtaagttttaggttctacaaaacctggatccatccagggcacactttgtggatcagcagactcagttgtgaaggcttgctgtataggcggtttgctttcaaggtttgttttatacaagtgcagcatttcaagcttagaaataacatttaaatttgacttgcacttttcccgtgtcatttattacatttaacttttccccgtgtttggtttctcccattaggaaattcaggagcagctcttccatatcaagaagctgttgaagacctgtaggtttgctaacaggtactattctcagctgggacaggctgccttccctccatacatctgctaatcctattagtgcctcctgcatctggctcccccattacacagggcttcttagcacagtgatgacctcatggctttccttgggaaatcatgccatctctttgaattactaagccaatagtgggatgcattagtctgttctcaagtagctaataaagtcataccagagattgggtaatttataaaggaaagaggtttaattgactcacagttttgcatagctggggaggcctcacaatcatggtagaaagtgaacaaggagcaaaagcacgtcttacatggtggcaggcaaagagagagcatttgcaggggaactctcctttataaagccatcagatcagccaggcacagtggctcacacctgtaatcccagtactttgggaggccgaggtgggtggatcacgaggtcaagagatcgagaccatcctggccaacatggtgaaactctgtctctactaaaattacaaaaattagctaggcgtggtgctgcatgcctgtagtcccagctacttgggaggctgaggcaggagaatcgcttgaacctgggaggcagaggttgcagtgaatcaagatcgcaccactgaactccagcctagagacagaacgagattccgtctcaaaaaaaaaaaaaaaaaatcaaatctcgtgagacttattcactaccatgagaacaacacaggaaagacgtgcctcatgattcaattacctcccaccaggctccttccatgacatgtgggaattatgggagctacagttcaagatgagatttgggtggggacacagcctaaccgtataatggagaatttaactcattaagaagaatggtttagttggaggatgaacaactctagccagtgacctttttattattattattgttatcattaaattgtggtaaatacatataaaatttaccatcttaaccatttttagaatacacttcagtggcattaaagtattaacatcgttatgcaatcatcaccaccatgcagcccccaaactcttttcatcttgcaaaactaaaactctgtatcatttaacaactccccattccctcttcctcttagcctaactcctggcagccactattctactttctgtctccatgattttgcccacacacatgccttatataagaggaatcttacagtatttgtctttttgtgactggcttgtttgacttagcataaagtcctcaaggttcattcatgttgtagcatgtgtcagaatttccttccttctttttttttgagacggagtctccttctgtcgcccaggctggagtgcagtggcgcgatctcggctcactgcaagctccgcctcccgggttcacgccattctcctgcctcagcctcccaagtagctgggactacaggcgcccgcaaccacatccggctaattttttgtgtgtttttagtagagacagggtttcatcatgttagccaggatggtctcgatctcctgacctcgtgatctgcccgcctcggcctcccaaagtgctgggattacaggcatgagccaccgcgcccagccagaatttccttccttcttaagtttgaataatatttcattgtatgtatatactacatttttttaatccatctattcatccgtggacactagggttgcttcccctccttggctattgtgaataaagtggatatgaccatgagtataccaggggccttttaaaaccccttatagggaggcatgtctaaccaagtggaaccatggtcttcaaaaattgtacttttggaagtttatcctaaggacataccgatggatataggtagagatttaaagtatagttttttttgttgtttttggttttgttttaagacagagtctagctctgtcacccagtttggcgtgcagtggtacagtcttggctcactgcagcctctgcctcccaggttcaagcgattctcgtgcctcaccctcccaagtaggtgggattacagacatgtgccatcacacctggctaatttttgttatttttagtagagacaaggtttcaccatgttggccaggctggtcttaaactcccgacctcaggtgatccgcctgcctcagcctcccaaagtgctggggttactagttttgtttttaaataagaaaaggcattaaaagtctattaagaggtattatgctctctccctgggtgatgggatcattgatactccaaacctcagtgtcctgcgatatacctgtgtaacaaacctgcacacatacccccaaatctaaaataaaagttgaaattattttaaaaatctaggtgttcgtaatagggcagtacttacattaataccatgtccgtagaatagaatactatacaaccagtaaagacttaggcatgaattcattgagagagagatttttaagtagaaaaagcataggttgctcaaggaagttaagattgtttattgtacttggtggaattatagagtttttaaataaatggtttagctttaaagcgttttttttcagtctctaatctttaatgatgatgtattgctttttaattaaattttgggggaaggagcatgtattctggagtcatttggttttgagcctttgcttcatggccttggcatggcattggtctcagggcctcggtttttgcatccacaacatagaacaatacctatacttcctaccttgtacaaaaaatcttgaatatccattctgggcttcagataaaaaaaattagtagatctgtattaagtccagggggatggtcagcaccaaccgatcactgctggactgagtgttagacacgtgtcgggggaccatgaggatacaaacggaggcagcatttagctcagttaggagtgagatagggtagaccgcaagcaaggattccaggagaaaaaggctgagcttgaagagtaaggtggagcaaagaagagggattggggattctccaggcagaggatgccgcaggagtgggcacctcaggctgggtgcagaattgaagagaatttggcattgtagcatgccaagtccagtgtaggccatggctgtcttggaagtgcagggaatagtgcttctactagccattgagagaattcaggtcgacacctgccgggtttggagaagatgaagttttgaatgccctagggaccatgaccactggcagttggctgcatgagccttaagctcagtgcctgactcgtgcatttggaagtcataggcttgccgagtgagtgagaattttcgcagctgagccaacagtccataaggctgatagacttgaaatgtagctggaagaaataaggtaggattttgatttcttgggtaatcaaaggggtctaggttcacattctttaagacctaaaaactaatggtcagttttcgtttgctcaatgtgtgcatgggcaggctgtaaaagaaacaggtctctgcttattcagctttttgaaatcagctttcatggaattttaactttcctggcttccaagcaaacttgcaacatgtagaatggtggcgagcatggttcactgttgttcttggagctatttattttttaaattgagttaaaaaaaaattaagtgtgagtgccaagagaaaacaactggccccattcttccctgtcctctgtgtgggtgggtttctgcattcctctttgtttcctctctggcagtgcattaaaggagttcgagcaggtgccgggacacttgactgatgagctccacctgttctcccttgaggacctggtcaggatcaagaaagggctgctggcacccttactcaaggacattctgaaagcttcccttgcacatgtggctggctgtgaggtgagggtgcacccagagcagattcgttcccgatgcaccagggcctgtgctgggtgttccgcacttgacttcatttaactctcacaaaccctgagggaagtgccggtgacctagttagagatgagaaaactgaggtcagagctgtgaagtaacagctgagatactcctgctggtaagtggcagagccgggatgcaagcctggaccaatggacttcatctgggtgcccagttctgctcagggcccactctgccctgatgcaccaagtatagtcatgtggaaccaggattcaatggaacaggaggctctgtgtctacacggattgaagaattgtagtgcagcaatgataaatgaaattagatcatttcagagtgcatgtttacaattaggaccttactctggtactttaaaactgctttgatatggaattggatgaatgtacatttttatcttttttttgattctgacccattcattgctgcaaaacacaacaaccttttccttctagaggctggaatcatagacactgaaacactgatgtttataaagttctgtaatagtgaaaactcagcttatccatcaagagaaggttgtaactttttgatgtcttcttttacagctgtgtcaaggaaagggctttatttgtgaattttgccagaatacgactgtcatcttcccatttcagacagcaacatgtagaagatgttcaggtatttaataacttaataacataagcttaataataggttaactaattaaactaagtttagtaacttaagcacaaaattaacttaagctgaataatagcttaataatttaagcacagttatttaaagtacagtcatgctggtgtgtgcttgtatgctggattggagataatgaagttttgggcacagaaggaggagtatttgggtggggcagggataaaggataatgtcttctggtgcagggtttggatagaggagatggtccctttgttgcctgtgcccacctctctgtcttgtaattggatcattcatgcccagtggtgaagtctctggctgcttttgtgccacggaggcagagttgagtagctgttgtagagaccacatggccctcagggtctaaaacatttgctatctggctctttacagaaaaggttgccgacccttctgtggtattagtgcccgagagaatcccgtgttctgtaaactctgtttaatgggagagatcctggtaatgaactctgccttcacccttgataggggcatatcctcctctcaggccactccagtgttgtctccccaaccctttaggcagtgttgcaggactggctccccagcaaagagactctggggcagagacttgcctacaaaaagtttcatgttcttcaacttaatacctgtaggggtgtgcaggcagcaagactgggagagggagaagttgaactgtggtggggttgcagtggagccctcagctcatctcacggggagctctggagtttggtggcctttcagcattgttccaaactggggacaaattggggccggcctactcactatatagtgatcagtcattgaatgcaggctggtgccaggaaggggacaaagcagctttctcgatgtagggccatatctagagaaacaatgtggcttcccaagagttatcagccaccacctctcttggcagctggggaaacgcctgcctcagtgcttgagcagatccagggggcactgcagtgtccgttacatcaggctctctgagcctcctgttcatgacctgttggaagagtccaacaggtctgctgaaatgtgacctgctgaaacgtgcgtttcagcctggctggtttctttttagaagactctgggctctggattcagacccctctccctccctaggatggagacgaatgtctgcagaaatgtgagaaaacaagatagaccgtttgctaacggctctcttccttgcttgcagcgtgcagggcttgctttcacaaacagtgcttccagtcctccgagtgcccccggtgtgcgaggatcacagcgaggagaaaacttctggaaagtgtggcctctgcagcaacatgatgcccctgagtactgtgaaaaagactgttcaacatgccttatgataacactgatttgtgtctattattggtgacattgttttagatattgggtattgtatattaaggaaaaagatggtctatattctctttattgcatatacttaatgtttcaaaagaatgcagattctgtgtttaagcacagggctgatagttgtggttttgtttacaaatgttctgttttggctgctattggttttttaaagaggttttttatacttttgtatttgaatagttatgtttcactgatgctgagccagtttgtatgtgtgtgcatatatgtgaactgtaactgacaagatgaattactcagtttctctttctctaaagcttgtttgatgaaactggttggtcctttcagtgaacaaaaatatgaccccaaatctgtttgctctggcttttatttcttcaggaagcagacttccacttaaatgccattttgtgattgtgtcaatcatacacattttatttacttcagagtttgaatagagagtacacatttcttctgcagatttatttcatgatgagtttgagttgcttagcagggcgtgtgggtcccgttgaagtgcagtttgaagcaactgcttctagatggcactctttcaggtggcacaaattgaacctgtatttgtcatctctgttccacacactgcaatgtcaagggatgcagaagtgagtagaattccatccctgcccttgaggatcttgctttaacagatgtaaaactgaacataaggtatttgcagatttaaacgaactgggggaaataatgaacagtgtgactctagtaataacattaaaatcatagacattgactaataaggttaaatgaatcacaaaacctttatgaatttcttttttctaatagttcttatatgttttcctgaaacatgtgagcctattcttttttcttctactttctatatactttctcccacttgagaaaggggccttgaggctgggtcccttcatggtatacctttagactgaacggtttgcaacctagggcttgggcattacattccctgggattcacatgccctaactaaacctaccttgattttctcagacagcacaggcaggcaataaagcgtcacagattgtcccctaaccccatccagccatgtgtatgggtgtgttttattcaatgggatagtactgagcacatgaaagaaatgaatgacttctgtcaatctcttttcattcagtcttctcattctgtcaattgttttctcatccgcagtgcctctgccagaactgtgctcacatccattatttaagccagatcttttctaagtattatagaagtgtagaggcacatagaataaataaaaccagacttcaaacaa

SEQ ID NO: 7251 - DNA, 381 bp, Homo sapiens
tctaatctttaatgatgatgtattgctttttaattaaattttgggggaaggagcatgtattctggagtcatttggttttgagcctttgcttcatggccttggcatggcattggtctcagggcctcggtttttgcatccacaacatagaacaatacctatacttcctaccttgtacaaaaaatcttgaatatccattctgggcttcagataaaaaaaattagtagatctgtattaagtccagggggatggtcagcaccaaccgatcactgctggactgagtgttagacacgtgtcgggggaccatgaggatacaaacggaggcagcatttagctcagttaggagtgagatagggtagaccgcaagcaaggattccaggagaa

SEQ ID NO: 7252 - DNA, 147 bp, Homo sapiens
gagagaagagagaagatgcagggaagaaaaaaagcagaggttggggtgatgcatctacaagccaaggagcaccaagaattgctggcagcccccagaagccggagagaggcagggggcagattcttcctcagagccttaaaaaaaaaa

SEQ ID NO: 7253 - DNA, 147 bp, Homo sapiens; identical to SEQ ID NO: 7252

SEQ ID NO: 7254 - DNA, 2913 bp, Homo sapiens
ggagagctctctgaggttattctcagcttcagccccctcaatgactcactgaatgagctccagaccactgtggagggccagggcgctgatctggctgacctgggggcaaccaaggaccgtatcatttctgagattaacaggctgcagcaggaggccacagagcatgctacagagagtgaagagcgcttccgaggcctagaggagggacaagcacaggccggccagtgccccagcttagaggggcgattgggccgtcttgagggtgtctgtgaacggttggacactgtggctgggggactgcagggcctgcgcgagggcctttccagacacgtggctgggctctgggctgggctccgggaaaccaacaccaccagccagatgcaggcagccctgctggagaagctggtcgggggacaggcgggcctgggcaggcggctgggtgcccttaacagctccctgcagctcctggaggaccgtctgcaccagctcagcctgaaggacctcactggtgaggggacaaaaggcatgaggggacccctttcaagccccttatttttcttctccctcccccagcccagcttccaactcatctgctttctccttgcttttcccaacatgaattgcagccccagccagtattccaggtgttatagtttgcctgcaagagatgatgcaaggtcctagctcccgccctccctctggctgctcactaggcctgtgggtggagagaggatgttgctctgccagccagggatccagcatatgcagcaagggaccccatggccccctcagcctgcaaagctccacctgttccatccatcttctccctgttcatgaagccaccacccaccttccttacccattggaaactccttttatggccctccttcaactcaattttgtcactgtagggcctgcaggagaggctgggcccccagggcctcctgggctgcagggacccccaggccctgctggacctccaggatcaccaggcaaggacgggcaagagggccccatcgggccaccaggtatgtgcactgagacccttgctgcagtcagggttgccactgccccctccaaccctgacccccgctggcagccccaggcttgacattccactctgaacttgacaaggggaattgggtactacctgaccgataagggaaaatcagaggaaagtgaggaggaactgtgatagtcactgtgtttggttaatgggtattaggaggctaatggataatgttggccccactgcagtactggagactaaagctgagtctattatagctgtctggggtgtgaaaggctgggatggcccagcagttgaacagaatggaccctacctattcctgtttttcttgataccccaattcctgctttgaagtccacgtagcaccgagcacaacaggagagcctcagcagatgtttgctgagtgacttagtgagagctgctttatttctcactgctccctttcctcttctcacaggtcctcaaggtgaacagggtgagtgcctttcatttgattctggagggagaagtgactaggggttggaggatagaggtcctcgggcagccctgggctggggatccagcaggggaagggggctggcactctgccctgagcatcccctttaacatccacccttcccactcaggagtggagggggcaccagcagcccctgtgccccaagtggcattttcagctgctctgagtttgccccggtctgaaccaggcacggtccccttcgacagagtcctgctcaatgatggaggctattatgatccagagacaggtagtcctgggaggggctgggttgaacggttggagaaatgggtgaggtgtgcagtgatatcttcccattcttgccttttccgacagtgtgaatcttcattctctgatttggggagaccccggctctttcttcatttattcattctcaggcagtggggagaagaagtagtcattcattcattcagcagatctttactggggcctgctcctgcccaggcactgttttaagtgctgggaatgcatagtgaacaaagcccccagttccctgccgctcacattccagtgaggtgaaaagacccagagggtccctcctcagtccaggagttctggtgcgctccccggagcttccctggcccccctgactgctatccttgtccccaggcgtgttcacagcgccactggctggacgctacttgctgagcgcggtgctgactgggcaccggcacgagaaagtggaggccgtgctgtcccgctccaaccagggcgtggcccgcgtagactccggtggctacgagcctgagggcctggagaataagccggtggccgagagccagcccagcccgggcaccctgggcgtcttcagcctcatcctgccgctgcaggccggggacacggtctgcgtcgacctggtcatggggcagctggcgcactcggaggagccgctcaccatcttcagcggggccctgctctatggggacccagagcttgaacacgcgtagactggggtcccgcccgacgtgtctacgtcggctgaagagacagcgggggcggcgggctcctggggtctcgcctgagacggggcacctagccctgggcgagcgccgcacccgggcccgcagcggcaccgcgcccagagcggcctctccccacgcccggggcgcgccggctcagggaggctcggggccgcccatgcagacttttggcctggcgcgatcccccaagaacccctccagggccggcctgcggaggagccgatcctcgcaccctccgctccctccactggccctccaggtcgattccctgggctccaggctcccccgcgcgcgcgccgcccaccgccatactaaacgatcgaggaataaagacacttggtttttctaaaaaaaactaaacgaaccgt

SEQ ID NO: 7255 - DNA, 2984 bp, Homo sapiens
ggtcaacactttctcagtggtctcttggcaatggcaccccagtcacaagtaaaggaggagactactttgtcttttactcccatggactccaggcctctgcatggcagttctggatagaagtgcaggtgccaatttcccagcattgtttgtttcattgattaggttcccaggtggtatttagcaagaaccttgggttcagtattctggcttctgagaactggagaactaattgattttctctggcaggtttcagaagaacatcctgaaggaatggtcaccgtggccattgctgcccactatctgtctggggaagacaagagatcccctcaactggatgctctgaaggaaaagttcccagattggacatttccctctgcctgggtgtgcacctacgatctctttgtattttaatcttgtggatgagctctaagtacatgcccagtggatactccatgtgacatggtttctccctatgttacgtggatgtttgtaacgtaagtcaatgaattttaatgatcatatgttcaaagagctttctgggttaacgcttttcagggccaagcactataagggtttagctgtggcgcagtgatgcatggcctgttgacacttgaaaatgccagtcttttggcacttcagcacatgtgggtactgccactacacacacgtcattttatatgaccttaaggacaaagccaacaatccacttcaatagctgcccctttaggatcaagaaagatgtacactgtcagagcattgttaatgagacaaaagttgtttccaatttaagccccaaaaccatttgttgtattagtggatggtgggtaaaatatcattcactgaggtaatgattccccttgagaatataactctgtgtaggtcactggaaagtgattgccatagggctgggagagaagcattgcactcttgaggctgtagcctgtgtcaagctgtttcttcaggcagcctctcaaatgtgctttgtctctctgtgctgaggcctggaccctgtgctgagctggtgactcactgtcctgacaagtggacacacagatgcactgctgtgctgctttcctgaggtggttttctatgcctgttttcctctgaaacatgtctgttacccctctccatcttaccaagttgaaaaggggaatatttggccacatacccctctggttttcgtaggttcttttggttcagaatattgtttgtgccagtacatgaccttaacttccttcctcagagcactgagctgccatctgggctattctggggtagaaggaaggctgggagtggtgggaattttataaatatttattctcttttctttgtttcataggagtcttgtgttatacaaggttagtccttcatggtataatcttactgatgcactgggcctatctttttgttttccagccagttgaatagattagtttttctcagtaacttactatccagcagactggctttcctgagacttgaggttgtggcttatactggaatgagaccactgtacgtgtaggtggttcagatcctgcgtaatggcagcatgaggacttaaaaggtggttttcattttgaagatggctatgtagcttgtaaggtgtatcacagcagtacctctcatggctttttggttccagcagtgagggcattggtgagatcaatggtaaactgtgcaagctttctttttatcattaggaaatgtgaaacgttggacaaattttgagttttaacaaggacaaaaagttgaaagaaaaggcacagttaacaaaaaagggtggctagatttatcttgggtgatggaggaaatgagagaggaatgctcttgaaaggtggtctgtggatctgtctgaatagaaagagcacagtaagtatgcattgccggagaaaacgtccttgaagctgcttgtctcatgtgtatgatgtgctttttaaatcatgcccctcgttgcctgcctaatctgtgactccctaaaaactaactgggcccatgtagatggggctgcaaccagagctgaataacatgttaggctcacacatgcatcagcactgcacactggaatcattgctcttcctggactttgtagaaatcagtctcaagtgcttcaagagtctggctcctgctacttttatctgtcaggtagcacataaggtttgcagggtttatattttgtatagaatcacagttgtggagaaaaagtaataatttctcaatgaattttaaaaatgggcctattttctatccccgtggttcatctgatataattagtgttccctgtgaattccccccctctatgggaaggatgcctttactctttatcagtaataaattatgactgttttcatattgccttagggttatttccctgtgtaaaccattgtcttttgttttggttttctttagcattatgaagctttggtattgtacaaggtcagtagtaagatgctcactagtctcagggcttgtgtaatattctgggaggtcatttaaatgccagaaatggtcaagcaattatacacagtatttatgactctgttaagcataccgtttgtctgtcacattagtagattctgagattaaaaaaaatttttaaagagtgatcatttaaataatttctaaaagggtcttttcaagctctaacaaagtcactaacaaatgcattattttctacagaattagatgttagtagtacagtactgcatattcagggaaaaagtgtgaggaattgatttcaaaatagttcgttcttgtgtttgacctaagaatgattgtcgcatgaagtgtttgtttttacagtttagcatatataaacaaacatgataggattccttaagatgttaccacccagggggccacaagccagcctgctgtctcaggaagctgtagaaggagtgtttgtcaatttcttgtcactggtttgctgacttactgaggattaattgttgccttacaatgttactgaaataaactgtttaatatac

SEQ ID NO: 7256 - DNA, 708 bp, Homo sapiens
tgaacaacttctaacctaatactcctcttcttcttttagggccaataaagtcaagatgcagttatggctatttacatttgtttttagccaagatgcagttacgactctttttaaattttttaaaattatactttaagttctggggtacatgtgtggaatgtacaggtttgttacatatgtatacatgtgccatggcagtttgctgcacccatcaacctgtcatctacattaggtatttctcctaatgctgtccctcccctagccccccaccctctgacaggctctggtgtgtgatgttcccctccctgtgtccatgtgttctcattgttcaactcccacttatgagtgagaacatgcggtgtttggctttctgttcttgtgttagtttgctgagaatgatggcttccagcttcatccatgtccctgcaaaggacaggaactcaaccatttttagggctgcatagtattccatggtgcatacgtgccacattttctttatccagtctatcattgatgatgggcatttgggttggttctgagtctttgctatcgtgaacagtgctgcagtaaacatacatgtgcatgtgtctttatagtggaatgatttatagtcctttgggtatatatccagtaatgggatggctgggtcaaatgatatttctagttctagatccttgaggaatcgtcacactgtcttccacaatggtt

SEQ ID NO: 7257 - DNA, 927 bp, Homo sapiens
tatggatctgtttatccttttcttcctcatttttgtgctgttttgtaagatttctagcaatggcttccttttctgtcagtgtaagaaagtccagattctttaggaagtttgtgttggtgtggatgaataatatttatctctttcaacttttttgactggatttttcttgcaggaccctgaattttcttttgcttcttttcatcttcaccacccaaatgccaaaggattcctcttccttcttttttatttttccctgagaagctttggttttgaagactgttacttcaataatatacttttaagtccctgccctgtaaacctttctttgactggacactatagtagtattttcagatttagggtggactgacttggtctgcatttgccacaaagccttgcagcagaagcagggtgggcacaagtgtgtgagattgctccctgagatttaaaaatttacggttatttcaaatgtgggtattctctgtctttaagttaggctgagggtgtgtttttgtttagttttatctattttagttttagtttgacttccactgtcatcagtttccttggaagttcccagtgatgactaaattttcagaactgagctaatattttccagcttgaagggaaaaactagtaaaacatattttaaggtgttacatgatcaactctgaaaattacaactccattcataatggcagtcctattcagtactgttacagcacttcgcagttttgccaacactttcatatgctttttctaatataatcccctcaatgaagaaattgtgacatagattaaattcctgatgtcatgcagcagttaagtgataggaccaacttaacacaggctttctcatttacagtctgtgccttttctcctgtacctcattatttaaccttgttgattcacactaagtgtccaaac

SEQ ID NO: 7258 - DNA, 11343 bp, Homo sapiens
gccggccgcggcccgcgggggcgacgcagcagcccgctgtccccgcgccgccggcgggggagctgatccagccgtcggtgagcgagctgtcccgggccgtgcggaccaacatcctgtgcaccgtgcgcggctgcggcaagatcctgcccaacagccccgcgctcaacatgcacctagtcaagagccaccgcctgcaggtgagcccgacgcggccggcggcccggggggccgggcctggctccaacaaagcgcccggcgccggcgcgcgaagccggcctcggggggacgagcgccctgcgcgctgccgctgccgctgccccaccggcctctgccctccccggccggaggcggctctcgaaccctcgcggcaggcgccgcaggtgcggcctctgggggggaggaggagctgggagccccgggtccgccgtacgcgccagttccctggttccctggctccctggccccgagtgtcgtgccggacgccggcccaggctttttacacttttttgcctgtgagttcttaacggcgttttggcgagggacgcatcgtctccattatattaatgagaaacagattatgcaacctagatgatgcggggctttaaaccggggcctctggttctgaagccctgtgcttgccacgacacccacaatgccgcccttgggtcctgcccagtggactgtatgtgccacaataactagaagagagggttttaaatgttctcaccaccaagagacaatacgtttgaggtcgaggacatgttaaacactctgacttgatcactatgcaatgtatatgtccatccatgctgcacaccgcaccccatcagtaggaataattactgtgtgtcgattatgaataaaaaaatgttttaaaggagcggtaggtttgcctctaaacaccatcagtcagtttcacggtgttggtaagatcagctcaggactgagacctaagggaaattgcccctgtggctcttctttaagagggggacacagtaaatacaccatgacaatagtctcaacaaccctccacgttatgcaaaacagggcagtcattttcaaccttgggacacatctgtgacgagcttattaaaaatccagatgtccagccccaccccggacctgttaagtcacaatctctcagtcattacaatggcaagtttccttccaccactctaggccagcagtgacataattcaaaagcgcaagtcattgaaagcagttctgcgaatatgtagcttttgatgatcaggagtaaatttagagtacccagaatattgcatgttctgtctgcccatagtcaggcttctgataagaatttcacagcagaaaactctgaggttgtagtctctagtaggacagatgtgtcgccaatgaagagtgatctgctcttaccaccatctaaaccgggatgcaacaacgttctcaattgaagatcagggagccagtcaggaaatgtacctgaggtatgctgaggaagaccgtgcaggtggggccgaattgttggactgaaaagctctgggtttctttcagcactcaagtgtaactctgggaatggctttcaacctgttgttttgttttcatactaaattttaactaaatcctttttttccctattgtttttgtgtttttttgtttgtttttgagacagagtctcactccatcacccaggctggagcgcagtggcgccatctcagctcactgtaacctctgcctccggggttcaagcagttctcctgcctcagcctccctagtagctgggattacaggcacctgccaccacaccctgctaatttttttttgtatttttagtaaagacaggttgcaccatgatggccagcttggtctcgaactcctgaccctcaggtgatccacccacctcagcctcttaaagtgctgggattccaggtgtgagccaccgcgaccgacctaaatcctttatttaatcataacttaggtggatgaactatttcttaatagtttctgttgttcctttctgtggagttgttgttaggagctctagctctttaaagaccctggtaaacatctgttgaacataaagataccatttgcctttcaggactggttagtatacagtaggtttgtttctaattatgttgggttttttttgttttgtttgagacagagtctcactctgtcgcccaggctggagtgcagtggcgccatcttggatcactgcaacctctgcctcccaggttcaagcgagtctcctgcctcagcctccctagtagctgggattacaggtgcataccaccacgcccagctaatttttgtatttttagtagaggtggggtttcaccatgttggccaggctggtctcgaactcctgacctcaagtgatccacccgcctcagcctcctaaagggctgggattacaggtgtgagccactgtgcccagccagggcaaacttttttttagcaggaattatacctcaccagatccatcatttttttcttgacaagcagactgactttcctgtcttgtcctggctttctaaccgcagtgccccgtggcccctgagcagctcctgtcttggtgtcttcctttaatgaaggttgtctgtgtgatgcaatagccatctatatgatggtgcccagtatggagatctgtaccctgtctggttactacatagaaggcttttcagggtcttgctctgttaacccaggttgctgtcaggctcttgagctcaagtgatcctcctgctttagcctccccagtagctgagactataggctcctgccaccatgccctgcctcaaacattgttctttttgtttgtttgtttgagacagtctcactctgtcgcccagactggagtgcagtggcatgatctcggctcactgcaacttccgcttctcgggttcaagcagttctcttgcctcagcctcccgagtagttgggactacaggcatgctccaccacgcccgactaatttttgttttattagtagaaacagggtttcgccatgttggtcgggctggtcttgaactcctgacctcaagtgatccgcccgcttcagcctcccaaagtactgggattacaagagtgagccactgcgccaggcctcaaacatcaatgttgatacctgttttcaaagtactggaagaaggtaggggtaaggacaaggaaccgggaggaaggctggctgggaagctatcttaggttttaagagctgtgttgaccagagactccatccactttctgccctgagtatcttattggcaggttttcttatagtcagtggaaattttcggtcttagttacagctgcttgcataatttctttcattgtttatatattttctagattatattttcttcccctccccactagttgctgttggttcttattttattctaatctttcttcccaaaacaccccacccccaaccaaatcttcccttcttaacataaatgatgagcaacgaggatgggtgagaatgaggaattggattgcaaactgtagagtatgtgccgccttctggtttgatgtgggtgcctaaggtatatggccatattccatatcctgtaaggaaatccagaaatctagcccagccttgtgtatggtgggattcatggagaaatgaaagccatgaggattcaggggcaggaagagcagaagtaaatgtacatttttttattcctagagattcttttgttccttgtgtgtgaaagcagtggaggggacaggcaggcacttaaagaacctcttatcaagcaacatttatattgtaaaacatggcttagaggattttgtgttatttttagtccagaggtttgtttttaatgatttgccagaaattttttaaggaaaggaaaggttccaagttactctatagactatactgtacaaagatttctaattttaaatttagaataagatgacaaagcaaaccgtttccttcttggatgctttctcggaaggcagtcaggtggtgctagagtagctagacagacagtttttcctagtttttgctacagttcttacaatcgtttcttttcaccctctactcttcaactgtgtcttacttttcctcttgtatattttctttctgtcttgttactggattgtttcctctcataggttctcttttcagttatgcgcacaaaagatacagtacaaaaagtccagtgcattttattcttgaaagtatatagaacttcagaatgaaaacaccactttctcactgcacttccattttatcgtgccattgccatttctcatctgagccatcctacccttgagcttattctctgaggacagaaatgggaagaaggccccagaagcagtgggtgggggtgggaggaggctgctgtgctggtgagtggtggggtgttggctctcagaaaacaggagcatggacagtgtcagcttgttgccatgacagtgaggttattaacatccacttagactgtcttcagtggtctcttacccaggcatgatagttttggcttagatggctacctgaagagattcagtataatgctaccagtttttattgaacatttattctgttcaaaacattcccaaaggcaacagaagatacaaataaatctctgcccatgaaaaggtgtggggggcattagaaggcgttctcttcggtgtaatgaagtaatgagagaagaaaaagtagtttgaagctatggagtaagggactttgagtatcccaggctcaaaaagttgggacttgaacagtacgggggtgctgctgaaaacgtttgagggaggtaatgacatgatcgaagctatacttgagaaaggtgaatctgataaagtatgagtgaaaaagagactgaaggtctagaaattagattgaggctaatgacaaaatccacataaataggaggacttgaacgaaggggcacttagaagaggacaggagatagtaaaaggcattcaatgatgagagcacacactacaggggagcatgagggaggttggaaaagataatgaaaggattaccgagcttcactgacgatgtgtttgaaatgagcaggaatcttgtagtgatcctaatccgtggttttctggagcatttcacagcctaggaacatacaaggggggcatctccctggaatgtaaattgactaagaggaattcaataatggtcaaatgaatgcagaattttagagtcttgcttagtattctcaccacatttcgtttagtctactcatactctttttctcttactgctgacactagatggaaaaactcttaattaaaagtatttcacaaaatgtgctcgttttcagtcattccgtttccactccagcctgttgtgttgtttttttgaaataataatttaaagtaattttccttttgcaggatggcatagtcaatccaacaataagaaaagatttgaaaactggaccgaaattctactgctgtccaattgaaggctgccccagaggccctgagagaccgttttctcagttttctctcgtaaaacaggtactctctactctgaggatgagatacagatgctaaaaacctattgtgcattctgattacttagcagacataactacagaattgagtagacagctgcttgtgaggggagatgcctgcgtgtctcccagttggtataaacctgagtatgctgttacacaagtggagggaaaagcggcacggtctggagggaatatgtctagaagtgagttaaaatacagagagagagagtaaaccagttcagcaaagaatgagaaaatgtttgctcgcagatctcctgtgtgagtctgcatacctccaagggcccagcgcaaaggcacaaaggaactgttctcccaggggaataagaacctgcagaatccaggaaaagaagagttttggaagccgcaatcttaagaggagggagggccccagtgactgggacaagaggtgattcagaactggaagagattggcatctgaaatgttcccctgagggtctgctggagggcgtcctgagaagagcattgtaaagacatttttttcctgcctgcagcacttacagatcagagtgtaaatgctggagaccatagatgtttccaaaacaatctcctcacttttcacaaagcaaaagcaacaagaagaggcatatatataattaactgcgatgttcctgcttttacattcttttgacttggactgctgtattttatgttatttatattaatagtgtaaaatcattattaatttgggtgtatgatggtttctgaaatgttttgaccagttgctgtttttcaccttagtcccttctgcgttcctcctagcactttatgaaaatgcatgctgagaagaagcacaaatgtagtaagtgcagcaattcgtacggtacagaatgggacctgaaaagacatgcagaggactgtggcaagaccttccggtgcacatgcggctgtccctacgccagtagaacagcactgcagtctcacatctaccgaactgggcacgagatacctgcagaacacaggtgaagggaaagaaatgatggcacagaagtcagtagctatgggaagcatttcagatgaaacatcctggagagccagtggtgtggggaggaaaaaggaatcttagaaaatgtgtgacgtggaagaaggaagcttttgaaaatggaagcaggtcttgcaaatgacacatgtctgggcctgaaatcttgacccaattgttccccctatttttttctgccagccctctttgagagtcccttgttatttccatttgaaaatctcagcttccagaattttctatcagagggaaccaaactgccaacaaataagttttatcatgaaactgtacttcatttaaaggtcaaattttcatttagtgtgatagcttcctgccttagaaatgataaaacttgcattatgtaagtcttttagcttcttttggcttaaagatctgagttgagttctagtacttagagcttaacaaaaggtatgtttcctccttctctgtttgcatgtttctcaaagttcacctgctataataggaccaactcccagagttgcgaaagaatggatttatcttgtctgggttgaacatgacctctgctatagatgggggaaatggcatttgtaagtgaggatagagtgtcatggtcgaagaaagttgtattttaaggttttctttttgctctgtcattgttttcagggacccacctagtaagaaaaggaaaatggaaaactgtgcacaaaaccagaagttatccaacaagaccattgaatcattgaacaaccaaccaatccctagaccagacactcaagaactagaagcttcagaaataaagctagaaccatcttttgaagactcttgtggctctaacactgacaagcagactcttacaacaccaccgagatatcctcagaagttgcttttaccaaagcccaaagtggctttggttaaactacccgtgatgcagttttctgtcatgcctgtctttgtgcctacagccgactcctcagcccagcctgtggtgttaggtgttgatcagggctctgccacaggggctgtgcacttaatgcccttgtcagtaggaaccctgatcctcggcctagattcagaggcttgctctcttaaggagagcctacctcttttcaaaattgctaatcctattgctggtgagccaataagtactggtgttcaagtgaactttggtaaaagtccatctaatcctttacaagaactagggaacacgtgtcaaaagaatagcatttcttcaatcaacgtgcagacagatctgtcttatgcctcacaaaactttataccttctgcacagtgggccactgctgattcctctgtgtcgtcttgttctcaaactgatttgtcgtttgattctcaagtgtctcttcccattagtgttcacactcagacatttttgcccagctctaaggtaacttcatctatagctgctcagactgatgcatttatggacacctgtttccagtcaggtggggtctccagagaaactcaaaccagtgggatagaaagtccaacggatgaccatgtacagatggaccaagctggaatgtgcggagacatttttgagagtgttcattcatcatataatgttgctacaggtaacattataagcaacagtttagtagcagagacagtaactcatagtttgttacctcagaatgagcctaagactttaaatcaagatattgagaaatctgcaccaattataaatttcagtgcacagaatagtatgcttccttcacagaacatgacagataatcagacccaaaccatagatttattaagtgatttggaaaacatcttgtcaagtaatctgcctgcccagacattggatcatcgtagtcttttgtctgacacaaatcctggacctgacacccagctcccatctggcccagcccagaaccccggaatcgattttgatatcgaagagttcttttcggcctcaaatatccagactcaaactgaagagagtgaacttagcaccatgaccaccgagccagtcttggagtcactggacatagagactcaaacggacttcttactcgcagatacctctgctcagtcctatgggtgtaggggaaattctaacttcttaggccttgagatgtttgacacacagacacagacagacttaaactttttcttagacagtagccctcatctgcctctgggaagtattctgaaacactccagcttttccgtgagtactgattcatctgacacagagacccaaactgaaggagtctccactgctaaaaatatacctgctctagaaagcaaagttcagttgaacagtacagaaacacagaccatgagttctgggtttgaaaccctggggagcttgttcttcaccagcaacgaaactcagacagcaatggatgactttcttctggctgatctggcctggaacacgatggagtctcagttcagctctgtagaaacccagacttctgcggaaccacacacagtctccaacttctaaaactaacggtggagtccatgtgtgaaatggcatctaccatttcctctggattaaaactacggactggggacaacagtattaattcgattgaatgtggctgatgatgcagttgcttagcttctttgtgtttctttgccttttgtacttgtaaacagaaatttgcgtataaatgtgagtgtattataaagtttgagatgttgatctaaattgtttttgtgttgcctacatttgccttttcacagctagtcttttcatgttaaaaaaaaaatgtatttcatatctataaaacctatatagccatttagctgaagcccagcttaccaggttcaagggtacaaacttctcaaatcttcaaaacattttagtcaaagtgtaatatacttaaactgcacctaaaatatctttggcactgcttgttagaaattcctgattcctgttactaatcactaaagaaaccggatgctgccaccgtaggatttaagcagtagtgcttccatgctcttaagactcctgctgcctggaccttcgtcagctttgacacctcttttctgatttaaagacaccaaggaaaactacaactgtctttagctttgaagcagttttcatgtaatcattgccacctcttcgctacatgaactactattgataccagcatacaagtgtatagcactttacacacaagaggtttattgatgtaaaattatcggctagggaagcagcagcgggccaggtgtggtggcttacccctgtaatcccagcactttgggaggccaaagcaggacgatcacttgagcccaggagttcaacaccagcttgggcaacataagaagaccgtgtctctggaatttttttttttttttaattagccaggcacagtggcatgcgcctgtgatcccagctacttggaaggctgaggtgagaggatcactcgaggagattggggctgccatgagccatggtcttggcactgtactccaacctgggtaacagggcaagaccctatctcaaaaaaaaaaaaaagtcgccagcaacaagcacgtagtgtagtgttcctgctaaatgagcataggttatccaaaccttgggaacagggagttatggaaacgtgcctatgacttcatcttggggtgtgtcctatgaagatcctttctggtctccacagtaggccagagttgggggctctggagctgtttccccaagtgcatccacaagctggatctgagttttgtcactctaaaattaaacaagaaaaaaagtgggaaaagggcatcccccattaggtttcaatactttgcacttctactaagcttgatagggcaggagtgcaatctacaattattttaaagtgaatttccttccattcaccattctttatcttttctttgaataagaaaaagtatctagcaaggatattacttgtgccttgaggctagcaattataggatagattcatctaaaatatggtattctgcattttggttttttttcttaagtgaataataccagtcttcaaagaaaacaaggtgaagacctattgcttcaataatcaagaatgctttgtgtgttttgaggtaggagcatgatcaagtatgctttggggattttctgtatttaggagatcctggattcttaattgttggctaagttccagtcaagtaggaatcagtgcagcctgtaagttctccacattgacacacacacacacacacacacacacacacacgacatgctcctttctgtggcacatgcctgtattactgaaagctaaatcctcaaaacctagtaaggggaccaatgattcattaaagtaaattgatggttttgctactaattcctatcccatacatttgacacaaaagaagtgttggtaatggataaataacatatcccgggcagatgagctcaacctagtaggtaagagtttggtttggtcacagttgcctatgagtgtgggtttcaaaagaaacataaagccttaacttagaatttcattatgttttagaatcatcactgccttaatattcaagcatctatttaagtcctaataaaggagaaatgcatgtttatggcttttttgtaaatataaatgcagtgatctatggcttaaaaaatttgtttctgtgacaatgtttgtaaatctagccaatagagtcatttacagaagaaaaatgagcatgtaataatacaagaactgtttccccctcaaaacctgaacctgaattatttgtaaaaactgaaatttaatgattaaagagaagccagaattgtacccttttttgtgaattcttgaacgtactcataaatatgacttattgtattgccttaagttttcactcattgtcttttgaaagccatatgataaaatgattttatttaataata

SEQ ID NO: 7259 - DNA, 970 bp, Homo sapiens
ttactgattctggagatggaggaagggtccgcaagccaaggaatgtaggcaacctctagaagctgggaaaggcaagtgaacagattctcccctggagccttgggaaggaatacagccctgctgacaccttgatcttagcccagcagtctcatttcttttgacctccagagctggaagataataaatgtgtgttaaggcagtaagtttgtggtaatttattaatagcaagagaaaacgaatatagctgctagtatgtaaaaggtggaaattttcacataaaactctagccataccaaagatgagtagcagctgcccccttttaataaaggatgtgtttccaatttcactgcagtcctcacccctcccttttgtctaccccagcctcctatgtccatttacatgaactacccagtctaagtattaagttttgtaatcgtatactgaactgcagtgtctcccaaacagtaatcctaatttcagcagctaaaatagaagcaagcaaatccagccttcttaaaatgattaaccctatcaataataacaatcttttcatttgtatagtgtggtctaggtcaagttacttaatttatataagcctaaatgtccttctctgcacaaggtggggcaagttacagtacatacccgctacagtcgttttgaagacaaaatgagacacagcatgaaaagtgcatccaccagacccacctggtacccagtaaggcctaggtaataaacaacggcggaaatcagtgtacttctgcctcacctgccactagacatttgggttgtttctaatctttgggaagtaaacgcattgctcaacgtattgctttttcttttatgtgactactgcctgaagtcactttcctaggaagaatggatcgattagagaggcggggcaataccttttacctgctggcaggtgaaatttcgcctcctggcggcgtcacctaaagtcctctccctccaa

SEQ ID NO: 7260 - DNA, 11343 bp, Homo sapiens; identical to SEQ ID NO: 7258

SEQ ID NO: 7261 - DNA, 970 bp, Homo sapiens; identical to SEQ ID NO: 7259

SEQ ID NO: 7262 - DNA, 13024 bp, Homo sapiens
aacaggctcctgcaggagatgggtcacagacccgagggaagatgtctgaaggtggaaggaaatccagcctgctccagaaaagcaaaggtgcgaaacagccatggtcctcgggcagtgatgagcgcggcagtaaattttgtctccatgggtgctaagttaaagttccttctttcctttctgggaagggtcagaagcagtgagcagagagagttggagcataaggacagactggggggatgtggggaggtgagtggggatgcggagcaaaggggagatcatttcttccctgtgtggccccagagaaaagccacattgccatcatggtactgctttgtgacatcagtttcttgtctatgtgactgttttcccactggtgctctgagagcaagactcttagagaggctgtgaggactcatcctgaggtcgggagttcgagaccaacctggccaacatagtgaaaccccatttctactaaaaatacaaaaattagctggccatgatggcacacgcctataatcccagctacttggggtgagggtgcagggctgaggcaggcgaatcgcttgaacctgggaggcggaggttgcagtgagccgagattgctccattgcatgccagcctgggcaaccgagtgagacaccgtctcaacaacatcaacaagaagactcagctctgctgtttgtaacattaaaaacaaccccagaccagacatagaggaacaggtatagctgtgtgccaataaaactatttacaagcaaaggaagcgggctggatttggcctatgagctacaatttgccactcctggtgtagatgtttgtgagaattcgcgctatgcccttcccaggcgtggttgagaagcaggcacactagagccagcctgctagtctttccccatctaattgggttgaaggccatgcatgaagctgggaatgctggtgtggccaggggatcagactgggcctgccacaccttaaaaccagttcttactcaagggcgattctgacccccagggaacgcttaggcagtgtctggagatgtgtttggttgtcatatctgggggaaggggttctactggcgtctggtgggtggaggccagggaggccacttaacatcctgaatgcacaggacacccccaccaccgcaaggaaggatccagccccatgtgctcgcaatgccatggctaagaaaccttaatttaaaccacaccataatgatttcaaaggactgcttgtttgagttccattgtatggctttgtagaaaattaatttttttagtgcaaatgctatacatgctgatgataaaatattccagggcaaaagcaataacaataaaaagttaccacctctagctgggtgtggtggctcacgcctgtaatcccggcactttggaaggatgaagccggtagatcccttgagcccaggagttccagacctacctggcaacatggtgaaaccctgtctctactaaaaataaaaaaataaaaaattatctgggcatggtgacacttgcctgtattctcagttacccaggaggctgaagtgggaggattgcttgagcctgggaggcagaggttgcagtaagcctagattgtgccactgcactccagcctgggtgacagagcaagaccctgtctcaaaaaaaaaaaaaaagaaaatttccacctcctcaccccaggctcccagtctgtgccctgagggcatgtgctctcaatagatttttgctgatctttccagattttttttaagaatttcaacacaaatcgttgttatattgtaccctacacattgcagtgaccttcctcttttcatttccaggtcattcatttcctcagctgcatagttgttcatgaaatagtctcatgcttagttcctaacacaacataccgtacgtgccatctgttggcatctgcagcactcctgggctcttgtgtagtggtagcatgctgtatgctagtgcccatcttagacagtgtaaggcttaattttacagtttagaatatacgttaaaagatgaagggaactcccagggaggatgaacagtccagaagctgcagaaaaaagatggaaagattacttggctgagtgcggtggctcatgcctgtaatcccaacactttgggaggccgaggtggatagatcacctgaagccaggagtttgagaccagcctggccaacatggtgaaacctcatctctactaaaatacagaaattagctgagcatggtggcgagtgcctgtaatcccagctacttgggaggctgaggcaggagaatcacttgaacccgggaggtggaggttgcagtgagccgagattgcaccattgtcacctgggtgacaagagtgaaactccgtctcaaaaacaaaaaaggtggaaagagagtagagggtagaatgggaatatggcatcgtatcccacctgtagcatcttgtgaactagcagaaaggcctatttgcgtctctttggttatacagaatgtctctgtcttctagtggtactttaaaaatagagtcaaggtgatggctgggaatttccacaggttttttttttttttttttttttagcctttccaccttggacgaaattgggcttttagaagcaagtggtattgttcaaaaacacggcctgcgtttcctggcttgaatggagagtgtctcttgactgtgctgactttcggggattcttttcttaacagcagatagcagtggggtcggaaagggtgacctgcagtccacgttgctggaagggcatggcacagctccacctgacctggatctctctgctattaatggtaaatcatttgtttcaccccttctgtcactcactgggggttgcagtaggtctcagtgggcttccaaagtacaattggcctacagtggggtcacatccaacaaacccattgtaagttgaaaatattgtacatcaaaaatatacttaataccttggtaaagggtattaaacttgccttttgccccttgcaaagttgaacaactttaactggactgttataagtccatatactcctcaatttatgatggggttacatcccaataaacccatcattagaaaaaaaatggcaaccagggaccagtctatatacgctacttgccattaaaaatgctgtgctttatcttagacaaaagcatcgtcaaaaagacgccacagttagcaaaaacaatatcaaagaaacctgagtcaacatcattttctgcccctcggaaaaagagcccggtaagtgtctgaaagaagagggcagccacagatgggttgcatagatctgatttagagtccactctgaaccagatgctgagtgcccacggatccaagaacataaaagacacccatgccctttaggacaaaaatcaagactacagatgttcttagatcatttgtagagtttacatttccccaagtacacattcagtagtggataccaatatggagccatgtaaaaaatgagacaggggacttctctgtgcccatgctgtgctgggaaaggcacaatgccaggccctgtcccttggtgggaggacggctaggctgtggtctcactggggtgaggacaagactggtggttgggggaccagcaggtggggagacggcattctggtcctggtgcagcaccaaattggtgggtattctcagcttgtccttgactacccagctgctgctgtctctccacctgccaggtgccaggggaaggaaggttgtggacctccctctttcatctcagcgccgcagaaaaccaaataaaagaaaatagaagcaatagacccactacagtagagaactaccgaatatcaaactgaatacagaaaatccacacaagccagagttctccccctgctgggaaaagagctggatttataccacttcatcaggaattgagagggtctttttcttttcttaaggatttatctgaagcaatggaaatgatggagtctcagacactactgctgacgctactatccgtaaaggtgaaaacagtttcttgttcacgtatgccatggatggaagggtggcctccattcacggggagggagtccccacctgcttgagcttttctttcacatttaacagatggagaacaatcttgctgagtttgaaagaagggcagaaaagaatttattaataatgtgtaaggagaaggagaagctacagaaaaaggcccacgagctgaagcgcaggcttctcctctctcagaggaagcgggagctggcagatgtcctggatgcccaggtcagttgtaagtgacactctgtgaccagtgagtgttccctgtgaatctgtcccatctccactgtttcggtagcattcgtgctagggtatcattgctcactggcttctaactgtgttgggcttttaatgccacacttgctctggtcctggtgttggtctatgatgacacttttagagaatgaggttacaaagtaaagtgtgaatgaataagggaggtgtgcaccttctatgcacttgtgcagagacttcctgagcgcctgatgatcgtgagcagcaacaggatgacgtgctctgggactcccctgcagggtcagggtactggtgagaggcacatcactcctaatgctgtgtggtcagcagtgtccatgtgggagaaggacaggaacaaacccctggaacccagaaagggctgattggcaggggcggaccccccacccagtgggtgagtttcctgtggttgctgggacagagtcccacaacctgggtgggcaaaacaactggaattcattctcttacggttcaggaagctgaaagtccgagattgaggtgttggtggttggccctgtctgagggctgcgagggagaatctctcctggccctgtctttggcctgtgaatggttgtcttctctgtgttcacatgtcctccctgctgtgtgtgtctgtgtccccctttccccacaagacaccagtcgtgttggattagcatcccccctacaacccccctatcacctcatgttaacttgatgaccctgataaagtccctcttttcaaataagggcacattccaaggtactgggagttggatcatcaggtatgaatttggggggatacagctcaacccctaacatccaaaattttcatgtgagcacccgtgcagctagaccctgggcttgagtacaaggtctctgactttagggagctcaaaatggaagaaaaagagacaaacccagttgaccctcaaacaacacgaatttgaagtgtgaggttccacttacatgcagatttttttcaataagtatattggaaaaagttttagagatttgtgacaatttgaagaaactcatagatgaaccttatagcctagaaatactgaaaaaattaagaaaaagttaggcatgtcatgagtgcatacatacttgtcccagcatgggcaacatagtgacacccaatctctacaaaaaaattttttttttttttgagatgggcgtcttgctctgtcacccaggctgtagtgcagtggtgctgtctcagctcactgcaacgtccgcctcccaggttcaggcaactctcatacctgagcttcctgagtagctgggactacaggcatgcaccaccacgcccagctaaattttgtatttttagtacagacagggttttgccatgttggccaggctggtctcgaactctggacctcaagtgatccgccctccttagcctctgaaagtgctgggattataggtgtgagccactgcatccggccaatttctataaaaattaaaaattagccaagtgtggtggcatatgcctatagtcccagctacttgggaagctgaggcaagaggtttgcttgaccctgggaggtggaggctgcagtgaactgtgatcactccacagcactccaccttgggcaacacagtaagatctgtctataaaaaatatgtatgtgcagtggctcacgcctgtgatcccagcactttgggaggctgaggtgggcggattacttgaggtcaggagtttgagaccagcctggccaacatggtgaaaccccgtctctactaaaaatacaaaaaattagctgggcatggtgatgcgtgcctgtaacccagctacttgggagactgaggcgcaagaattgctggaacccgggaggcagaggttgcagtgagccgagactgcgccgctgcactccagcctgggagacagagcaagattccatctaaaaaatatatatgtgtatgtgtgtgtgtgtgtgtctgtatgtgtgtctgtgtgtgtgtgtatgtgtgtgtgtatatagatgctaatctatttacatgtttattgaatgtttactatcagtaaggtttcagtcagcagtagctatcagtaaatttgggggaagtcaaaagttagatacagatttttgactgcacaggggttgatgccccaaactcccgtgttgctcaagggtcaatcgtatatcatttcaaacccccatgaagacccagacagcatgtttggggtgggagtgggccatgccggggatggccttgtggaaggcaggcgtttaggcgcagtactctaaagcaggtgggctcagctgagggcccaagcctagaaccgctggcagacacatgttctcagtaaggggcctgggccgccttgccatccacttggctctcttgggaagagctcaccacaccctcggaaacttcctgagctctgattccctggggggtggtgaagaacagcgctgtatcttaaccctgcacaagccgttaagcttctgttaagtttccagagaggggactccagggtctcccctgattatcccttctgcttacagatcgagatgctcagccccttcgaggcagtggccacacgcttcaaggagcaatacaggacattcgccacggccctggacactaccaggcacgagctgcccgtgaggtccatccacctggagggagatgggcagcagctcttaggtaggaaacggggcgtcccagtgcgtgtgcagcaggcggggcgaggagcgtgtgtgggtgcttcctgtgggcctgatgtcatcaccgcaagtgccctcttccccaactaaggcagaggatggggagggctggccaggctgtggttcctccaagggtctcgccctgagtaagtaaccacactgggatttgaaccttgggcagtgggattcacagtgatctgtcctgccgaaaggcattttgcggggacgacctgtagtctcctgagtcctgctcccaacaaatatgccgtagtggttggggggtgacaagaccaccagccccaccccggctttccccctcagcagagcagtgaggtccctttcaggcatagggttcccacctaatccctaacttgaagactttggcaagtgtgaaaaactgccgcgttgcaccttaaattctcttcagaacaggtatcttcccacagagcaagtttttggctaccctggagtttggttctttttttttttttttttttttttgagacagcatcttgctgtgtcgcccaggctggagtgcagtggcacaatctcagctcactgcaacctctgcttcctgggtttaagtgatcctcccacctcagcctcctgagtagctaggagtacacgtgggcaccaccacacctggcttatatatatatatatatatatatatatatatatatatatatatatatattttttttttttttttttttttttttttttctgtagagacggggtttcgctatgttgccaaggctggacttgaactcttgagttcaagcagtcctcccaccttggcctcccaaagtgctgggattatagacatgagtcaccatgccctgccattgttcttttttttctgcggaggtggaatcttctagcgtagtcacccagcctggagtacagtagtgcaattatagctcactgcagccttcaacttctcaggctctactcagatcctcccacctcagcttcctgagtagtagcctccctagtgcttcaggcatccaccactgcacctggctaatttatttttgaaacggagtttcactcttgttgcccaggctggagtgcaatggtgcaatcctggctctctgcaacctccacctcctgggttcaagcgattctcctgcctcagcctcccgagtagctaggattacaggcatgcaccactatgcccggctaatgttgtatttttagtagagacagggtttctccatgttggtcaggctggtcttaaactcccgacctcaggtgatctgcccgccttgccctcccaaagtgctgggattacaggcatgagccactgctcctggcgcacctggctaattattatatttttttttgtagagacgaggtgtggctatgttgcccaggctgatctagaactgctgggctcaagtgatctcctaccttggcctcccaaagcactgggttcctgaataggtgtgagccccctgcccggccgggtttctgattttatgactgcggtcacctccacatctgtaactcttagaaaacactcagtctctgctcagttccttaggtagttcctgggaacggcctagggatcgtgttgagttttccggggctgccataccaagcggccacagaatgggtggtttgcaacaacagaaagatattccctcccagttctgggagtcttgatttcagccagaagtctgaaatcaaggcgttgatgggattggctccctccaggggctgtcaggtgagctcatcctgtgtctcccccacctgctggtggctgctggtggcccttggcgttccttggctcatggccgtgtccctccattctctgcccgtcctcacgtggcctcctccctggctgtctcgttattgaaatttcctgcatcaggctcagcacggtggctcatgtttgttatgccagcactttgggaggctgaggcgggtggatcacgaggtcagtagttcaataccatcctggccaagacggtgaaaccctgtctctactaaaaatacaaaaaaaatagccaggtgtggtggcaggtgccggtaatcccagctactcaggatcctgaggcaggagaatcgcttgaacccggaaagtggacgttgcagtgagccaatattgtgccactgcactccagcctgggtgacagagcaagactctgtctcaaaaaaaaaaaaaaaagaaaaaaagaaatttcccgcatccgatgaggacacaagtcactggattaggccccacccatcttaactcccccccatccacaaaaccctgtttctggttaaggtcatgttcactaggagtggaggattggagtgaaacgtacgtattggggagggcataattcggtccacagccggagggagaagaggctggctgatacggcacttaaaaggctcccaaaatgtgactctcatgtacgactggccttgatgtgatgtatgtcagggtagagaggcgtgttgtcctagtgcaggtgacacaggtcccgcagttgcaggcatccttctgctcagtggtgcaggcaacaaggactgtttttcagttgctcatggtctggcttggaggcctcaggcattctccctggcacagcacagcccttttcacatttgcattggtttctgttgaggacaccagagtgacatttcagttctggtccaatgccctcctggatagatggatgtgcctgtcccacaatctcagagcacgggatggataagggacgaatgtcttccttggcttctgcttcttccctgtgcgctctccacggttccagcgcgatagccgagcatcatgacagaagtctgtcggccgctccacttgtgtgtgccttgcgtggggcaccttgccatccatcgcccaccatccctcttcccctccagacgccctgcagcatgaactggtgaccactcagcgcctcctgggagaacttgatgttggtgattcggaagaaaatgtgcaggtgctggacttactgagcgaactcaaggacgtgacggcgaaaaaggaccttgagctccgaaggtacctcggaaaatgctttaagaaagaggtggcaccctgtttgctcagggctgttggtggctgcactgttggggtggtgccgagttcctctaggagttcagaggaggttcagtcccctgagcgagctgctcttttcccagacgctgcatgatacaagaatggccagcaggtgtcattgtcatctgtattgtggataacaaaatctccatccaaaagcacccgccttgccttccctttcttttttttttgagacaggttctcactctgtcgcccaggctggagtgcagtggcagatctcagctcactgcaacctcaaattgctgggctcaagtgatcccacctcagcctcttcagtagctgggactgcaggtgtgcgccaccatgcccagctaatttcccttttctagcctacttctcagtcatttttgagctaatggggactctaggtgaagtgaggatcaaatatgctataagacgtgtcctagattcacagagtataagactcaagcagagcagggggaagagagaacaaaagagctcagaaaaatccatggaagggccaggcgcagtggctcacgcctgtcatcccagcactttgggaggccgaggtgggagaatcactttaggccaagagttcaagaccagcctgggcaacatggtgagaccttgtttctatttatttatttatttattttgagacagagttgctcaggcttaagtgcaatgtcatgattttggctcactgcaacctccacctcctgggttcaagcaattctcctgcctcagcctccgaactaactgggattacaggtgcacaccaccacgcccggctaattttgtatttttagtagagacagtgtttcaccttgttggtcaggctggtcttgaactcctgacctcaagtgatctgcccacctcagccccccaaagtgctgggattacaagcgtgagccaccatgccgggcctctctatttaaaaaacacaaaaattagccaggcacactggtgcatgcctgtggtctcagctactcaggaagcagaggtgggagaatcatctgagcctggggaggtcaaggctgtaatgagctgtggtcgtgccactgcattacaacctgagcagtagagtgagaccctgtctcaggaaaaaaaaaaaaaaaaaaaaaatctatggaagttctcaagcagctggaagagaaagggtgtcacctatcattcacatcctcagagtaacccagcagcacaggcgccctcacatcagccctgttggtgttttcaatgccttccagggtaaggtcccaggaggatgttttttgaacttctgattgatagaaatggcccagatcttaaaggactgtgcagtggcttgcacagagcacatatccttgtgcgtccagacccccaaaacccatcaagatctccccccgcttttttttttaacctcccccaggagatttctaaccacgcgcttttctccacctcttccagtagagtatcttttctcttttttacaatgctaaatctttttcctgagttgcttaaaatattggaaaaggacttatgcaaaacagccagccacccactgtggcatttctttctcctgtgggtggccatggatcaattcaggagacatcaaagggttataaagccacagtcccactcccaggataactcattcatccatgaacggcagaatgttcatgaacccagttacctcttaaaggccccacctctcgctgctgccacattggggattattattattattgagacaggatttcatttcattgcttaggctggagtgcagtggcgcgatctcggttcactgcaacctctgcctccgaggctcaagcgatcatcccaccccagtctcccaagtagctgggactacaggcgtgcaccactgcacccagctaatttttttttttttgagacggagtctcactttgtcgcccaggttggagtgccagtggcgcgatcctcggctcactatagaccctgtctcctgggttcaagcgattctcctgcctcagcctccccagtagctgggattacaggtgcgttccaccacgcccggctaatttttgtatttttaatagagatgggctttcaccatgttggccaagctggtcttgaactcctgacctcaggcgatctgcccgcctcagcctcccaaagtgctggaattacaggtgtgagccacagcgcccagtatttttaaaaaaatttttgtatagacgtggttttgccatgttgcccaggctggtctcgaactcctggcctcaagccatctgtctgcctcggcctcccaaagttctgggattacagcacttcaatcccactttacctggccaggggattaatttttaatgggagttttggaggggacagatactcccaccacagcagcagcacagcactgagctccatgaacatttcttggatgaatctttcctttcatgtctggtgctgttcttggggggtttccctgattgagtcttttcagacggatcttatttgctggccctttcccactgagcacgtagggcatgtgaaaatccgcctccccgtgtggcagccctccgttcaccacacacatgcgcttcacctcagagggtgaaagccgttattctttctcccatcctcaacaggagctttgcccaggtgctggaactctccgcagaggcaagcaaagaggcagccttggcaaaccaggaagtctgggaagagacccagggcatggcgccccccagccggtggtatttcaatcaagacagtgcctgcagagaatctgggggagcacccaagaacacgcccctgtctgaggacgacaacccgggtgcctcgtcagcccccgctcaggccacgttcatcagcccaagcgaagatttttcttcaagcagccaggcagaagtcccgccctctctctctcgttcagggagggacttgtcatgactcatggttacattcaggatacttgagcactttatatactaccgtagcactgtagctattttttatgtgataatcttgtttgataaaaaagtaaacctgttttgcaattgaa

SEQ ID NO: 7263 - DNA, 183 bp, Homo sapiens
ttgcttttggttattagaaggccagtgctccatgtgtttctttaaaaaaatattttttgacaacatatgtgtaaaaactttgtttctcctgatgaccaaagttatatgttctctctggaaaactagcaaatacttaaatgtgtctagaaaaaaatcagtcacctgtaatctaccatgtcaata

SEQ ID NO: 7264 - DNA, 4540 bp, Homo sapiens
caatatgaatgatgattcaagtaacttgaaagaaggcagtaaagacaatcccgaacctctaaagtgcaaacaagtgtggccaaaaggaacaaagcgcggtctatctaagtggaggcaaaacaaagagaggaagaccggatttaaactgaatttgtacaccccgccagaaacacccatggagcctgacgagcaggtaacagtggaagaacagaaggagacttcagaaggaaaaaccagccccagtcccatcaggattgaggaggaggtcaaggaaactggggaagccctgttgcctcaagaggaaaacagaagggaagaaacatgtgcccctgtaagtccaaacacatcaccaggtgaaaaaccagaagatgatctcatcaaacctgaggaagaggaagaggaggaggaggaggaagaggaagaagaggaagaagaggaaggggaagaagaagaaggaggaggaaatgtagaaaaagatccagatggtgctaaaagccaagaaaaagaggaaccagaaatctccacggaaaaagaagactctgcacgtttggatgatcacgaagaggaggaggaagaggatgaagagccatcccacaacgaggaccatgatgccgatgacgaggatgacagccacatggagtctgccgaagtggagaaggaagagctgcccagagaaagcttcaaagaagtactggaaaaccaggagacttttttagaccttaatgtgcagcctggtcactcgaacccagaggtcttaatggactgtggcgtcgacctgacagcttcttgtaacagtgagcccaaggagcttgctggggaccctgaagctgtacccgaatctgacgaggagccacccccaggagaacaggcacagaagcaggaccaaaagaacagcaaggaagtcgatacagagttcaaagagggaaacccagcaaccatggaaatcgactctgagactgtccaggccgttcagtctttgacccaggagagcagcgaacaggacgacacctttcaggattgtgccgagactcaagaggcctgtagaagcctacagaactacacccgtgcagaccaaagtccacagattgccaccacgctcgacgattgccaacagtcggaccacagtagcccagtttcatccgtccactcccatcctggccagtccgtacgttctgtcaacagcccaagtgtccctgctctggaaaacagctacgcccaaatcagcccagatcaaagtgccatctcagtgccatctctgcagaacatggaaaccagtcccatgatggatgtcccatcagtttcagatcattcacagcaagtcgtagacagtggatttagtgacctgggcagtatcgagagcacaactgagaactacgaaaacccaagcagctacgattctactatgggaggcagcatctgtggaaacggctcttcacagaacagctgctcctatagcaacctcacctccagcagtctgacacagagcagctgtgctgtcacccagcagatgtccaacatcagcgggagctgcagcatgctgcagcaaaccagcatcagctcccctccgacctgcagcgtcaagtctcctcaaggctgtgtggtggagaggcctccgagcagcagccagcagctggctcagtgcagcatggctgctaacttcaccccacccatgcagctggctgaaatccccgagacgagcaacgccaacattggcttatacgagcgaatgggtcagagtgattttggggctgggcattacccgcagccgtcagccaccttcagccttgccaaactgcagcagttaactaatacacttattgatcattcattgccttacagccattccgctgctgtgacttcctatgcaaacagtgcctctttgtccacaccattaagtaacacagggcttgttcaactttctcagtctccacactccgtccctgggggaccccaagcacaagctaccatgaccccaccccccaacctgactcctcctccaatgaatctgccgccgcctcttttgcaacggaacatggctgcatcaaatattggcatctctcacagccaaagactgcaaacccagattgccagcaagggccacatctccatgagaaccaagtcagcgtctctgtcaccagccgctgccacccatcagtcacaaatctatgggcgctcccagactgtagccatgcagggtcctgcacggactttaacgatgcaaagaggcatgaacatgagtgtgaacctgatgccagcgccagcctacaatgtcaactctgtgaacatgaacatgaacactctcaacgccatgaatgggtacagcatgtcccagccaatgatgaacagtggctaccacagcaatcatggctatatgaatcaaacgccccaataccctatgcagatgcagatgggcatgatgggcacccagccatatgcccagcagccaatgcagaccccaccccacggtaacatgatgtacacggcccccggacatcacggctacatgaacacaggcatgtccaaacagtctctcaatggctcctacatgagaaggtagacaacgtgggcagtccacaaaacctacggggcatcactattggattgatctgcacaaatacctttgaagagtacgatttcaaaaccagcaattggtgtgaatgcaaaaacatttgttggcaccatttatttaaaaaaaaaaaaagctgtatgcagcagaaagccttatacaagttgtttttctttttttcctttttcttttttttggtaccttcatttctgttacttttatataaaattctctgcaaaggaaggcctctctttggactacaatttggaggcagccacttgttgtgcctgcttctgttaaacaatgtggatatcaagcccccccaaattatctgttttaatattgaacctagagctttttttttcccttccctgtccactccatgtaaatgcctttagcatttcagttattgtatattttgtttaaggtgacacttcagcatgccgctaatgtctttgttagtgacagtgcattttgtagtactgtacaagtgttgtgctaacagtaagccatttcttaagttttttgccttgattagggtgccctaatttgagggttttaaaaaaaactatatttttgttaattataaaactgtaaagagctataaaagctattcccatttggttagtcaaaagggttttattgctaaatgtttggtgtaaagttgagacccttttccattttggtgacagatttctttggggaaaaaaggcagctttctgttttataaatgcagacttctgtttattgaatgaagcatatctcagtgtttatctgtcaggttttgaaacatttcatatatgtccaaatacttggcaggatttaaaaaaaaatagtgaatttggtgtaaagttgctattttatggaaatgcctctaactttacattttcattccatctgtagatttttctatctttataaaatattggagttattttttaaggaaaaatagaaaagtagcttgtgaatagctcaaactaagcttacaaatcgcatgtaaaaaagcaaaaaagttatttgtgtctgtttatattgcttccttttttgtagcctttgtacctgtacagggtgacagtaagggccaagcaggagaggcgtaatccttgtataaaataggatccagcgacactcttgtatttatctgttctctttttagtcagtcacttcaaaaaaacaaaaaacaaacaaaaaaaagctgtacattttaacataaaataaattatgatgagccatttttagcctcttgtgtcctgtcatattatgattgatagagaatgaccaatggaactgtatcatgtgtcacgcctcagaacacatacacattttgggaaaataaattatttagtgtaaattggagttatgggattttctgatttgttttgactttgggggaggggttggcaataaataagagtaatatctaataaaaccatcacatataccaaatacctatttaataaattaatttataatggattttaatgcttttcatgaaagtttattttatgcgagtgcataccttctgtatgccaatcattgtctttaaaataaagtgaaattgtttttttcttttggactttgatcttcatttgcaaagagatcccgcacaaatatccagctgcctcactcgcacagtctgtagaaacatccctccaagcctcgcaccagggtagcaaacttcctttttataaagattcataccaaaaaaagcacccaatttgggattgtatgtttgaaaaatcattttctttttaaaaagtgtgaacgttttgctctgttgtgaatgattaattgtatgttttctttagagtctaaagtttagaccccctgccaaaagtgaatattcacaagtatagcgttcagagaaagttctgagtgttgcttgaatttggttatttgagcaacaagtctagaaatgaatgcttgacctagcacccgtgtgaaactagcccgttaagctctccaggtgtctga

SEQ ID NO: 7265 - DNA, 139 bp, Homo sapiens
tgcctgtaagtcccagctacttgggaggctgaggcaggagaatcgcttgaacctgggagacagaggttgcagtgagccgagatcatgccactgcactccagcctgggcaacagagcaagactccgtctcaaaaataaaa

SEQ ID NO: 7266 - DNA, 2632 bp, Homo sapiens
ttttcatgcttccatagaatcatccctgacctcaggaaaaaatacaaaaatggaacaaacaaaacagaatagtaaaacctgaagtaagaaaaaaagaaatgaatttgacattgtacagatcaggagaaagaaagttcattaacagtttcaagatccctgcgttttcacccagcaggaaacaaattaccatgagttaaggtggggaaattactggcaattcattgccttcttttaaagactttaaaaaaaaatgagtaaataattttagactattaccccctttccatgagagatacacagctagttaaactgccatgcatattaattttttgttttcattttattccacctaccaactacacagtgtctgctttccaaaattagtttgaaagccaatgacctgtgtttgaactgggtgaaatagcatagcagttcacacctggaataaaagaatgattgtgtgtgagtctgttaatggctgtgtagagctatatctctatatggagctatataaaaatatattttatacatgccagattcatttagacttgaattgaccctgtggtaaagcagcaggaataaaatatttttttgataaagcactcactcaaatagagaaatgagctcttgcagttaccatttaatctgtgacttctttttgagatgcagaaaaactccattataaagtgctcagttcatccagggacacagacacactgtgggttataacacaccctcatctgcatggtgaggtacatgagtcagctgctcttctctcaggagggtggctttaaagctccacagtcatgcatgctgccaattccagattgtccaaacctgtaggttagcaaggacacaggtgagccataggtatgacatgttcataaaaagaaaaatatattttaatacaaaacatgtcaggggagtggagagtgtcaaattgaggacaggagagacctagattcaatgccatagttcttggctaatctctgagaagcttgttagtcaccctctttctccttcccttactctcctgtatcttcccttacatactgcatagtcccttgtaatttacaagacataaaatacttcctttgttcatctgtatactgaatgtaagaatgaacaaaaggtcatcataaggacagcctgtgagtttatgcactgcatactgcaaatgacccactccagcaatgggaagacacccctaacattgcttctctccttataacgaaaatatattcatcatcagctttaaaatggatcttctcaactctgtgcagtctccgtggtaacgtcccataagcccagggttttaagacctttctcctgtgctctaagcctacatatctaactgcctaatggcctttccacttgaatgacacatcattcagtttcagtgtcctaaactgaagtttcaactccaagtctgtttttttctcttgtagtcttcatgtcagtcaatcagtcttttatcctaaccagaaatatgtgagttctcatggattcctccctctcactcacttttcagttctataatcacccagttcctacattgtttgcatcttaaatatctcttctagtcctcccttctcctttatacccactgccactgccacaatgttagctccttcagatctcatattttctcacttttattgctatagacataccccccgcagttatcctacctctaggcaaatcccttccaaaatgcagctgccagtgtgatctttgtaaaatgcttttatgataaagttcaaactcattagcaaagcacacaaagacctttgtgatgtggtattgctgaattaaactactggcagccctagaaaggtaaagtgtatttgatgcttctgtgctgttcccttagcccagaaagcccttccagtttctgtttagtaaagtcctattcatctttcactactcaatgagtcataagtaatcccattaggaaagcctgtgtgatctacctcctccctaatttgccaccttgagtttgcttcaccccttcataatactcagtcaatcataaatgtcttataatccatcatagcacctcacacaatgaactccaatgtctggtttgttgggatgtccgccttactacattgtaagcttcttaagggtagaaaccagttctgataggcttagggcagtgaccaccaacagaaaaagtacttggtaaatgtctaacacaatctgttttactttttccagagcacgaggcatgcatgaaagagattaatttactccacatgggaagttactacccaggcttaccaaaaggtcaggtttatataaagtggcgttcctttttttcccccttagtaagacattaaaaaaagaaaccacaattgaaaagcagagctatctgtgatacggaatatgaacacagaatcagattctcatagcagctaagctgttccccaggcagtggttctcaaggtgtgcttccaagaacagcagcagcagcggcatcacacatgcaaattactggactctgccccagatccacagaattggagactggggatggggcttagcattctgttttaacaagtcctccagatgattctgttgtgtatctagctgagaatcactgccctggagaatggaaaaaaaaaaaaaa

SEQ ID NO: 7267 - DNA, 2616 bp, Homo sapiens
ttttcatgcttccatagaatcatccctgacctcaggaaaaaatacaaaaatggaacaaacaaaacagaatagtaaaaccctgaagtagaaaaaaagaaatgaatttgacattgtacagatcaggagaaagaaagttcattaacagtttcaagatccctgcgttttcacccagcaggaaacaaattaccatgagttaaggtggggaaattactggcaattcattgccttcttttaaagactttaaaaaaaaatgagtaaataattttagactattaccccctttccatgagagatacacagctagttaaactgccatgcatattaattttttgttttcattttattccacctaccaactacacagtgtctgctttccaaaattagtttgaaagccaatgacctgtgtttgaactgggtgaaatagcatagcagttcacacctggaataaaagaatgattgtgtgtgagtctgttaatggctgtgtagagctatatctctatatggagctatataaaaatatattttatacatgccagattcatttagacttgaattgaccctgtggtaaagcagcaggaataaaatatttttttgataaagcactcactcaaatagagaaatgagctcttgcagttaccatttaatctgtgacttctttttgagatgcagaaaaactccattataaagtgctcagttcatccaggacacagacacactgtgggttataacacaccctcatctgcatggtgaggtacatgagtcagctgctcttctctcaggagggtggctttaaagctccacagtcatgcatgctgccaattccagattgtccaaacctgtaggttagcaaggacacaggtgagccataggtatgacatgttcataaaaagaaaaatatattttaatacaaaacatgtcaggggagtggagagtgtcaaattgaggacaggagagacctagattcaatgccatagttcttggctaatctctgagaagcttgttagtcaccctctttctccttcccttactctcctgtatcttcccttacatactgcatagtcccttgtaatttacaagacataaaatacttcctttgttcatctgtatactgaatgtaagaatgaacaaaaggtcatcataaggacagcctgtgagtttatgcactgcatactgcaaatgacccactccagcaatgggaagacacccctaacattgcttctctccttataacgaaaatattattcatcatcagctttaaaatggatcttctcactctgtgcagtctccgtggtaacgtcccataagcccagggttttaagacctttctcctgtgctctaagcctacatatctaactgcctaatggcctttccacttgaatgacacatcattcagtttcagtgtcctaaactgaagtttcaactccaagtctgtttttttctcttgtagtcttcatgtcagtcaatcagtcttttatcctaaccagaaatatgtgagttctcatggattcctccctctcactcacttttcagttctataatcacccagttcctacattgtttgcatcttaaatatctcttctagtcctcccttctcctttatacccactgccactgccacaatgttagctccttcagatctcatattttctcacttttattgctatagacataccccccgcagttatcctacctctaggcaaatcccttccaaaatgcagctgccagtgtgatctttgtaaaatgcttttatgataaagttcaaactcattagcaaagcacacaaagacctttgtgatgtggtattgctgaattaaactactggcagccctagaaaggtaaagtgtatttgatgcttctgtgctgttcccttagcccagaaagcccttccagtttctgtttagtaaagtcctattcatctttcactactcaatgagtcataagtaatcccattaggaaagcctgtgtgatctacctcctccctaatttgccagcttgagtttgcttcaccccttcataatactcagtcaatcataatgtcttataatccatcatagcacctcacacaatgaactccaatgtctggtttgttgggatgtccgccttactacattgtaagcttcttaagggtagaaaccagttctgataggcttagggcagtgaccaccaacagaaaaagtacttggtaaatgtctaacacaatctgttgtactttttccagagcacgaggcatgcatgaaagagattaatttactccacatgggaagttactacccaggcttaccaaaaggtcaggtttatataaagtggcgttcctttttttcccccttagtaagacattaaaaaaagaaaccacaattgaaaagccaagagctatctgtgatacggaatatgaacacagaatcagattctcatagcagctaagctgttccccaggcagtggttctcaaggtgtgcttccaagaacagcagcagcagcggcatcacacatgcaaattactggactctgccccagatccacagaattggagactggggatggggcttagcattctgttttaacaagtcctccagatgattctgttgtgtatctagcttgagaatcactgccctggagaa

SEQ ID NO: 7268 - DNA, 896 bp, Homo sapiens
ttttcatgcttccatagaatcatccctgacctcaggaaaaaatacaaaaatggaacaaacaaaacagaatagtaaaacctgaagtaagaaaaaaagaaatgaatttgacattgtacagatcaggagaaagaaagttcattaacagtttcaagatccctgcgttttcacccagcaggaaacaaattaccatgagttaaggtggggaaattactggcaattcattgccttcttttaaagactttaaaaaaaaatgagtaaataattttagactattaccccctttccatgagagatacacagctagttaaactgccatgcatattaattttttgttttcattttattccacctaccaactacacagtgtctgctttccaaaattagtttgaaagccaatgacctgtgtttgaactgggtgaaatagcatagcagttcacacctggaataaaagaatgattgtgtgtgagtctgttaatggctgtgtagagctatatctctatatggagctatataaaaatatattttatacatgccagattcatttagacttgaattgaccctgtggtaaagcagcaggaataaaatatttttttgataaagcactcactcaaatagagaaatgagctcttgcagttaccatttaatctgtgacttctttttgagatgcagaaaaactccattataaagtgctcagttcatccagggacacagacacactgtgggttataacacaccctcatctgcatggtgaggtacatgagtcagctgctcttctctcaggagggtggctttaaagctccacagtcatgcatgctgccaattccagattgtccaaacctgtaggttagcaaggacacaggtgagccataggtatgacatgttcataaaaagaaaaa

SEQ ID NO: 7269 - DNA, 2634 bp, Homo sapiens
ttttcatgcttccatagaatcatccctgacctcaggaaaaaatacaaaaatggaacaaacaaaacagaatagtaaaacctgaagtaagaaaaaaagaaatgaatttgacatgtacagatcaggagaaagaaagttcattaacagtttcaagatccctgcgttttcacccagcaggaaacaaattaccatgagttaaggtggggaaattactggcaattcattgccttcttttaaagactttaaaaaaaaatgagtaaataattttagactattaccccctttccatgagagatacacagctagttaaactgccatgcatattaattttttgttttcattttattccacctaccaactacacagtgtctgctttccaaaattagtttgaaagccaatgacctgtgtttgaactgggtgaaatagcatagcagttcacacctggaataaaagaatgattgtgtgtgagtctgttaatggctgtgtagagctatatctctatatggagctatataaaaatatattttatacatgccagattcatttagacttgaattgaccctgtggtaaagcagcaggaataaaatatttttttgataaagcactcactcaaatagagaaatgagctctgcagttaccatttaatctgtgacttctttttgagatgcagaaaaactccattataaagtgctcagttcatccagggacacagacacactgtgggttataacacaccctcatctgcatggtgaggtacatgagtcagctgctcttctctcaggagggtggctttaaagctccacagtcatgcatgctgccaattccagattgtccaaacctgtaggttagcaaggacacaggtgagccataggtatgacatgttcataaaaagaaaaatatattttaatacaaaacatgtcaggggagtggagagtgtcaaattgaggacaggagagacctagattcaatgccatagttcttggctaatctctgagaagcttgttagtcaccctctttctccttcccttactctcctgtatcttcccttacatactgcatagtcccttgtaatttacaagacataaaatacttcctttgttcatctgtatactgaatgtaagaatgaacaaaaggtcatcataaggacagcctgtgagtttatgcactgcatactgcaaatgacccactccagcaatgggaagacacccctaacattgcttctctccttataacgaaaatattattcatcatcagctttaaaatggatcttctcactctgtgcagtctccgtggtaacgtcccataagcccagggttttaagacctttctcctgtgctctaagcctacatatctaactgcctaatggcctttccacttgaatgacacatcattcagtttcagtgtcctaaactgaagtttcaactccaagtctgtttttttctcttgtagtcttcatgtcagtcaatcagtcttttatcctaaccagaaatatgtgagttctcatggattcctccctctcactcacttttcagttctataatcacccagttcctacattgtttgcatcttaaatatctcttctagtcctcccttctcctttatacccactgccactgccacaatgttagctccttcagatctcatattttctcacttttattgctatagacataccccccgcagttatcctacctctaggcaaatcccttccaaaatgcagctgccagtgtgatctttgtaaaatgcttttatgataaagttcaaactcattagcaaagcacacaaagacctttgtgatgtggtattgctgaattaaactactggcagccctagaaaggtaaagtgtatttgatgcttctgtgctgttcccttagcccagaaagcccttccagtttctgtttagtaaagtcctattcatctttcactactcaatgagtcataagtaatcccattaggaaagcctgtgtgatctacctcctccctaatttgccaccttgagtttgcttcaccccttcataatactcagtcaatcataatgtcttataatccatcatagcacctcacacaatgaactccaatgtctggtttgttgggatgtccgccttactacattgtaagcttcttaagggtagaaaccagttctgataggcttagggcagtgaccaccaacagaaaaagtacttggtaaatgtctaacacaatctgttttactttttccagagcacgaggcatgcatgaaagagattaatttactccacatgggaagttactacccaggcttaccaaaaggtcaggtttatataaagtggcgttcctttttttcccccttagtaagacattaaaaaaagaaaccacaattgaaaagccaagagctatctgtgatacggaatatgaacacagaatcagattctcatagcagctaagctgttccccaggcagtggttctcaaggtgtgcttccaagaacagcagcagcagcggcatcacacatgcaaattactggactctgccccagatccacagaattggagactggggatggggcttagcattctgttttaacaagtcctccagatgattctgttgtgtatctagcttgagaatcactgccctggagaatggaaaaaaaaaaaaaaaa

SEQ ID NO: 7270 - DNA, 312 bp, Homo sapiens
tcaaaaccagggctgctaactcagctgacaaacagggaaaaaaactattattccttttccctcaaccagtgcctcccactaccctgcccagaccccagggattcctgggcagataccactgtgggctaccctagccagccttttgcagccccattcctgcttgcttccccacacctccccagccagagcagacctggaccccaacagaaatattcacccctagcggcaacactagcactctcttggacaaatgtttagtgatctatccatcacctgccaccagaccccacttcccttccatcagtggctatt

SEQ ID NO: 7271 - DNA, 312 bp, Homo sapiens
tcaaaaccagggctgctaactcagctgacaaacagggataaaaactattattccttttccctcaagcagtgcctcccactaccctgcccagaccccagggattcctgggcagataccactgtgggctaccctagccagccttttgcagccccattcctgcttgcttccccacacctccccagccagagcagacctggaccccaacagaaatattcacccctagcggcaacactagcactctcttggacaaatgtttagtgatctatccatcacctgccaccagaccccacttcccttccatcagtggctatt

SEQ ID NO: 7272 - DNA, 827 bp, Homo sapiens
atgaacaaaaggtcatcataaggacagcctgtgagtttatgcactgcatactgcaaatgacccactccagcaatgggaagacacccctaacattgcttctctccttataacgaaaatattattcatcatcagctttaaaatggatcttctcactctgtgcagtctccgtggtaacgtcccataagcccagggttttaagacctttctcctgtgctctaagcctacatatctaactgcctaatggcctttccacttgaatgacacatcattcagtttcagtgtcctaaactgaagtttcaactccaagtctgtttttttctcttgtagtcttcatgtcagtcaatcagtcttttatcctaaccagaaatatgtgagttctcatggattcctccctctcactcacttttcagttctataatcacccagttcctacattgtttgcatcttaaatatctcttctagtcctcccttctcctttatacccactgccactgccacaatgttagctccttcagatctcatattttctcacttttattgctatagacataccccccgcagttatcctacctctaggcaaatcccttccaaaatgcagctgccagtgtgatctttgtaaaatgcttttatgataaagttcaaactcattagcaaagcacacaaagacctttgtgatgtggtattgctgaattaaactactggcagccctagaaaggtaaagtgtatttgatgcttctgtgctgttcccttagcccagaaagcccttccagtttctgtttagtaaagtcctattcatctttcactactcaatgagtcataagtaatcc

SEQ ID NO: 7273 - DNA, 312 bp, Homo sapiens; identical to SEQ ID NO: 7270

SEQ ID NO: 7274 - DNA, 301 bp, Homo sapiens
gctgctaactcagctgacaaacagggaaataaactattattccttttccctcaaccagtgcctcccactaccctgcccagaccccagggattcctgggcagataccactgtgggctaccctagccagccttttgcagccccattcctgcttgcttccccacacctccccagccagagcagacctggaccccaacagaaatattcacccctagcggcaacactagcactctcttggacaaatgtttagtgatctatccatcacctgccaccagaccccacttcccttccatcagtggctatt

SEQ ID NO: 7275 - DNA, 589 bp, Homo sapiens
agaaaattattttacatactagcatcactttgtatccatctactctaatctctccagatgtaaatcctcccatcacaagcttcttcctatggattctcttgcctggggaggcatatttgagttgcatttcctccaatgtgcgtcaccttcccaaagaatccaaggatgccatcaacttctgttagagggagcattatgtttggtatagcacatccggtatttggcagagtcaggagtccttcaccctcccaggaactgtactttgaaacttcccataatcctccactgtgatcataatgtttcagctcaccttccaggcaggcctaggaatcacatgtctgggacacacacatgccattatcaccaaatagatttcttgatagtcatttaaaggacccttcactgtgcagtttacagtttcaaagtattttcacacatctcatttgatcctggtgacaatcccattaaataagcaaacaaggttgctacctctgtttcacagttaagaggcctaaagattagagaactgtagatacttgcccaaagtttgacagcagtacagggaataatgccagacatactgactgag

SEQ ID NO: 7276 - DNA, 3026 bp, Homo sapiens
ccatggccagtgactgtggcccgactcgaaaacaaccctcttctcaaaaggaccatcaccgccccgagcgtgcgcacacagaccggtcggaggcgagaactggtctctacagggcacagttcagctcctctgtggatgcgtccccagatcgcaggatttccaagaaatcgagcctgtcccttgtgcacttgggaataattccccaagacagcacttcgggattccgggttatcctgaggctgcccgggacttttccagctctccagccccaggtctcctgacattgtgttccaggctgcggctaagccagacagtgtttgctccggttctttccaccgtgggaagcgaacgccacccccacccgcctttgcctgcgagtctccctcgctggcagaagggaagccggccggtcccgggaggaagatggcgctgcgaattcggtgaggacagccggccccgcccccgacaaggagctcgctcgttcacctggtgtctgggaacttgaatgtgtgaagggcgcttattgttctgaacccttgattgctccctcctcgggctgcatttcaaaaatagtcatatttttaaaggagttggaggagagggagggggaggacatggcaccattccagaaaccagcattgttacaacaccatagccagtatatttagtttggcttttcctaacatagaaatcttcaaagctggggaagtggaaataaagttttaaaaatgagagagcagttttccaactatgtcaacaaagcctatcgtgttgatgtttttattgaccattttagcaacaggctaataaaatttcaaattgaaatttttattttcatggctttaatccatgatagtttaaatactgggggccattaagagtggatgtagctaagagcttagctaacattgccttttcactctatttttctcagatattgtaagcattctgtttttcaatattgtagttaattttttggctttcaacagcagccctagtaatggtggagttgttaattaatgtgtatattgtactgaatttctgtcagttaaggggttcactgctttggtggaaattggtggaaattgctagcaggttccacgatgtttatttttttctccatgttgtatatcattaccatttcacatacgcgtttctatttttcttcctctcctcctgatctccttaaaaatgaatctagagttggtggctttttccccctcctctttggccagttccacagttcagttcttcctgaaaacagggatgatgaacttgtaggatcaggacaaatgtgtgtttttcaaaaacttaaggctgggtgtgaaacaccttctgtggacaaggatttgtaaacttctctcctccctccagctgcggccccagcctaactgatagttacttgattcagtgtgctagacacttaaatagcatctatgtctctttcaagggaatttgtcaaataatgctgtttagctaattgttgcaagcaattgcatattaacagctgtgattttgttggacagcaagtattatggccaaagccagtttcttggcatttcaaaaataatgcaataaaaactagttgaggttagctgaggctggaaatgcctttttcatggtaaatgattcacttctatatttttctttctttttctttttttttctttggttttcatcctggattcatcccctgatcttaaatcaaaacgtcagatcaatgaactatgaactaaagtatttttcttaagcctattgagtgatttattttttaaaaaatgtttaaatgcatatgcttttctttcagcacaaacaacagcaaaaacttttgtaataactaacttacctttgcatgtatgaagaactgagtcatttatttccctaacttactcctctttcaagtaacaggtggcagatcataaaatgaattctttattgtatctacacactccacattctttactgtgtcctactactgtatcttggctccctgctgtattaaacaccatcttaagcacttgttcctgcaggactccttcttgacattttgtctcccccttcaaagtcactcaaagagtgggacttcatcaaaagaaatgaattagtctctatcacaccgaatactaagatttatttcctctgatggtacatagatttctctctcactaagagggtcactctcatagaggaatgtcttgtcagttttatacttgctgaggctagactgacaataaaaatgagctgggcagttaaattagcatttgttactatattggcctataaaggatcaggttgatgataatacctctaaaaatatgcaataataaaacaatagttatgaaagaaacttgaaaggtttgcaaggtttctcctatccctgttaaaattatcatttattatctctttgtcagtgttagtaaggtaacccatgacagaataatttgagtgatagttcatcatgcagaggatatgatcaagatattacctaatggttttatcctgaaaaaggtgtatacttttagggcactgttaacaatgcgagtgaaaccaagatggtgcaagttccctttgcagatggcgtgggcacacttgatttttattatgagtgaatgtaatctttctgtattttaccagagttacagcaattacctgaaaagtttcctaacattttaataatgttagggatttcgttttggttttagttgtcctcaagagacaacaggttcacagtaatttccatgatgttgggtgtggctaagctggggattggttctgttccccctgctcccgtgtagagaaaagctatatttatactgcattctttctcaactttcaggtaaaacaaactatgatttaaaaaaagaaaaaagaaaagacaggtacttttacttcaaagagtgctttgctacatttttatttaaaccaaaaatcaaataaaataaggaggggggctgggtatactttaaacaaaaccagtcctgaaatgctgttattctcaaagtacattccaaaaaaaaaaaaaaaaa

SEQ ID NO: 7277 - DNA, 378 bp, Homo sapiens
atttacgtatgttacatttttaagtatgagttaaattgatataaagtgttcctcaatatttaataatgtaagctgttgtcatgacagtattttttaaaaataataacgtatattatagttacgaaacacttgtgccagattagaacatcaagcacagaagcagctgtatgatttacctgtttttttgaaactttaatgtttaccttcccctatgtttaatttttctgtggtgaacacttttgttagaacatggcttttttatttttcttggaaaaatatgctattagtatttacaaaataattaattacctgaataagcagtatatactaaaagtcttcaaacattactttattgattacttatgttttgtggtgcgc

SEQ ID NO: 7278 - DNA, 685 bp, Homo sapiens
accaattgtacttttattatatcaggctgattcactgtttctaatgcaatgaacttgacacagattttaaattttttctcaatctgtcccattgtgtagacaaattaattcaaagttctttttcttccttctctttttcatctaagcctgtgcttatgagtagaaaaagagaagaggctaccttgaaatgcctcgggcccaaactcagaaggctctgcactcaactgagcctcccttcctactaagaatggaatagtgttgcttataggggtgttggtccaagtatcagctgtggatgattaattcccagggctgctatcacctaaggtaacttcagtaatcttatgtgtttggaaaggaggatgaggattatttttcaaatacataattttgttttattttgaaacaatctcacacctacagaaaagttgcaattataatacaaagagcttccccctcgcctgaactgtttgatagtaagttgccaaactgatatacccacgatccccaaatgcttcagtgtatttcctcccagcaaggacattctcctgcataaccacaatacaaccataaaagtcaggagattaacaccagttcattttgaccatctgaaattcaggtgtcattcatgttttgccagttgttctttgtatgttcttcatagcaaaaaaaaaaaaaaaaaaaa

SEQ ID NO: 7279 - DNA, 140 bp, Homo sapiens
gaatccagactctgaatatgggtctttgggtaagttaataaagctttctgagtctcagtatcctcatttacaaaatgtgaatacttataatgcctaatttattggattattatgggaattaaatgagctcaagtgtataa

SEQ ID NO: 7280 - DNA, 6609 bp, Homo sapiens; identical to SEQ ID NO: 6106

SEQ ID NO: 7281 - DNA, 10049 bp, Homo sapiens; identical to SEQ ID NO: 6107

SEQ ID NO: 7282 - DNA, 2780 bp, Homo sapiens; identical to SEQ ID NO: 6108

SEQ ID NO: 7283 - DNA, 6609 bp, Homo sapiens; identical to SEQ ID NO: 6106

SEQ ID NO: 7284 - DNA, 10049 bp, Homo sapiens; identical to SEQ ID NO: 6107

SEQ ID NO: 7285 - DNA, 2780 bp, Homo sapiens; identical to SEQ ID NO: 6108

SEQ ID NO: 7286 - DNA, 12041 bp, Homo sapiens
ggtacagtcatcacaagcctgttcggcgggactgtgatggccagagagatgacgatcttaggtgggttcccgggggtccttgttgctcttgcgggcgtagaggcgatctgaggatgccagagtgggcaggggtggttgactcacctcctggatctagctggagcagcggaaggggagtcagaaaggtgacttagagacggttttcggctgttcggagtggatgggggcggggacgcctctaggagggccccggcccctgcaggccaaggtaggatagacggcgaccagctgtgtccatcccagggacatcaggcttagggaggcgttcctttcaacagcacctaggtttttgaattgcctgttgaattggggcaagctatggaaggctgcgagaacgtgcacctccaggacccctttgtggaggaagggggaggagctacatccggatctgtcggctcagggatgctgaatttggaggctttttccatcacatcgggtttggaattacctatcccccacccacacacacacccaccccgcgtctccaaggtgatgaaatgcttctgaaatgttgcctgtagctggaagtggaaagtgggattcgcacttggttttatttctttgagttatgtgttgatgaggatgagctaacaattagtaacacagagccctgaaaattcatgttttgggtcatatgtaatatgagcggacacaggtgtataacacagcctcctgataccaaatacgagattcattaaaaactaaaggggcatctttcttcgcttatgtttacaatctgcgtggcatttgttcctactcttttttcttttttttttaaattagtatttgttgggcatctgctattcctggtctgggggatacaacagtgaacgaaacttgtcttcaagaagctttcatagatgttgccgtcagggttgcccacctttatgcttcttctcccctaaatattaccactgcaagaaggaagtccctagttcatacttaaatacataaaaagttaactgtgttctgttttgaagtgacagtttcatatctaaggaactttcaaaatcattttatcccatttattcatttcatccttttgaaagggaaaaggaggtgagatacgaggagagaattttagacttataaaataataaagtttttcttgtgagaattttaataatggagcttttaaaaaaagataatcgaagctttttataaagctgtaaaatctaaatatcaattgatcaagaatattagattatatctggcttttgctccagataaatgttgtttcttgtcagcatctgcacaaatattattgaaatatttttacattttattacatttattagagaatgacacaaacatacagttatagggttttttgttgtttgtgtttacttcattttaaattttattataaccagtttacattttgaaaaacttgctgtctgagaggagtgctatcagcagtcctataaaaaattttgaaatttgtcttttttagccttgtttcaacgagtgatattaaagggactttgctacagtaatttagtacattgtactagtttgataaaatacatcttttaattttcctttatttcaggatcggctgttttgactctcctgttggccggctatttggcacaacagtatttaccattgcctactcctaaagtgattggtattgatcttggcaccacctattgttctgttggggtgttttttcctggcacaggaaaagtaaaggtgattccagatgaaaatgggcatatcagcatacccagcatggtgtcttttactgacaatgatgtatatgtgggatatgaaagcgtagagctggcagattcaaatcctcaaaacacaatatatgatgccaaaagattcataggcaagatttttaccgcagaagagttggaggctgaaattggcagatacccatttaaggtaagtgattaatctaaaatctatattaattttagtgtactcttttagttaatgctttggcttcatgtcacaaaacattctatctcgtctagttttatctattaatacatgaaagttctgttatctcacataaccagaaattccacagcagctataggatcagttaatcactgactccataatgctaacaggtacttaaggccttgccattttcttgctgtcccatcctcagcatgtcttgcttagctctttcaaggtagcaggaaggttgatgaagccctgtgtaccatagatagatattctgtgtgtgtatgtgtacatatttatatacatataaagagaacataccaggtgtgctattttttgctatttaatatgtcatggataattaataggatcatgtcattatctttaatgattttgtggaatgactattccattattaattagactagtctctatcagtgtacttttttgtggtttttcactaatgttggagattccggtaatatccttacttatctttgtacacttctctgaaagtttcctaacttgaatgctagaagtctaattgataggtcaaatgtgtacgtttttaaggcttttgatttatttttctggtttgctcaccagaaaggttatatgctcttaaccataattttttagagtggctgtatcttcgctagttattttttttaatctttaacagtcagataagtgaaaaatagtatcctgtattaatttttatttattttgattttttttagtgagatcagaatttttagaattttattgatattttaattttcttttatggtccatttttctttgtccttttttgttttggtgtgtttttcttttccttagtgagctataaaagaccttcattatatgtttttgttatcttttccttaccttttttttttcactgatgtttttgagctggatgtcaaagttttaaatttttgattttagactcttatcatgtttactgtagcctatcccatcctatccactgctacttttttttccctcttaatacgtttatgtatttgttggtttggatttcgctgctttttttttcttttaaacatttaaagcttttttccatgtggagtttttcttggaagttatgaagtgaaattctaaatgaagtgaaattctaaatgaattagtttttgtttttttttttgagacagtctcattctgtctctcaggctggaatgcaatggcatgatcttggctcactgcaacctctgcctcccaggttcaagtgattctcctccctcagcctcccaagctggcattacaggcgtgtgccaccacgcctggctaatttttgtatttttagtagagacgggatttcaccatgccggccattatttagtttcaaaatagacagttgtatcagtgctgcttattgaataaacctagccataaaaatgttcaaatttttcatccgttttcaaagaaaaaaaaattgctccctgcatttcttaggtttattactttgttgttttttgacttcttttttgggattctttactgacttacaatctttaatgaaaaaatcatctaaagctatatatgccctctgaattacagctttgggtacgttacttattgacccaaaaactacttaatgtttctaagtgatctgatttttttgttgttgtttttgtttcatgtgggcactgatggttctggtatatttgtatcttagtttaatattgtccatgtagcttctttatgttttccccagactagtgaagtactttttggaaggtcagtttttcatgatggaaacctaactatgaggcctgaagtgagaaaacattcttataatttcttagattaattctcttttttatttatattaatagaatcttggtaaaactaggatagtattttttagagttaaaatagttttttaaatgtacacccacattatcggggacaatgagctaatgcacaatacatgttttcatgggaaacaagaatgtaaatgagatttgattcttggataagtacataatgatgtactaaaattattcttgttaatatgtactagaaaattctttcagctatccattactcttagaaacaagaaatttgggaaaaaaagggaaaagattctgagttacatacttgaatgagcaacttttatttcttacatttcatcatttattctttctttattcagcaaaaatatattgagaatcttttgtgttctagtcatgtgcgtggtgatgaattttattctgctgttattaaaaactagtgtgggccaagcacggtggctttcacctgtaatcccagcactttgggaggctgaggtgagcggatcacaaggtcaggagttcaagaccaacctggccaacatagtgaaaccctgtctctactaaaaatacaaaaattaaccaggcatggtggcacgcatctgtactcccagccacttgggaagctgaggcaggagaatcgcttgaacccaggaggcggaggttgtggtgagccgagatcatgccaccgcactccagcgtgggcaacagagcaagactccatctcaaaaaaaaaaaaagtaaaactaatatggattcattgtacagattttaatgtataacatttaacaagttctaatcttggtaaatgtactagatagatttcaaatgcattttttgattttgtaaagataagggtaagttctcatgaaatctagtatttatgtatatatgtatgtctgtatgcttttactcttttatttatttacttatttgcaaatcctattcacaggttttaaacaaaaatggaatggttgagttttctgtgacaagtaatgagaccatcacagtgtccccagaatatgttggctctcgactattgttgaagttaaaggaaatggcagaggcatatcttggaatgccagttgccaatgctgtcatttctgtaccagcagaatttgatctaaaacagagaaattcaacaattgaagctgctaaccttgcaggtaacagtacccttgactgagatgcatttttctcaaaattgtgttgggttgaaaaccttctgtagtaaggtttaccacttcccaaaccacacaaccatagtcaaaataaacaaactatatggtaggtgtattagggttctctagagggacaggactgatagtatatatgtgtatatgaaagggattttattaaggtgtattgactcacactatcacagggtgaagtcccacagtaggctggctgcaagctgaggagcaaggaagccagtctgagtcccaaaacctcaaaagtagggaagccaactgtgcagcttttagtctatggccgaaggcccgagagcccttggcaaaccactggtgtaggtacaagagtccaaaagctaaagaacttagagtccgatgttcaagggcaggaagcgtccagcacgggagaaagatggaggccagaagactcaggcagtctaatcctccgacattcttctgcctgcttttattccaggcacactctggcagctgattagatggtgcccacccagattgagggtggatctgcctctgccagtccactgactcaaatgttactctcctttggcaataccctcacagacacacccaggaacaatactttgcatccatcaatccaatcaagatgataatattaaccatcaatgtaggtaaagtagatagatttttatacaggtttataattttgaaagctctatagcacaatataaaatatgtatttaacaagaaccaatcagatgctacaggacaaaggctcaaagagaaaatggacacatgttagcagtgaggaattctttcttctaaattccgttaatgttaaggtgaatataattttttaagtaaaatctgagatagatcatttaatgatttaacatttaatgccattgaaccaatattgagggccttactaaaaaaagaaagaaatctttgttctcatggaacttatgttctaccagagggaaacacagaatgagcataaaaggtaaatttaataatgttttcagcctctacattactgatattttgggccagataattctttattgtggaggactgtcctgtaaactacaaaatatttaacagcgtccctagcctctattcaccagatgctagcagcgccctcctccaccaagtggtgacaatgaaaaatgtctccatatgttgccagatttcttctggaggtaaaatcctgtcttgttgagagccactgatacaatgtatatcagaaagtaaccactatgaagaaaagagcaggctaatgggtcaaggttgcttttggtggtcaggggatggatgacttgtagaatttaaatagggtgatcaggcaaacctcattgagaaagtaacatttaagcacatttgaagaaagcaaaatacttaaccatgcagacgcatggagaaagtgtgttgtaggaagaagagatggccactgcaacagccataagctgggaatttgctggtacatagaggataggaagttggtcagtgtggccagagtagaataagtggtaaaatcagagagctgaagtgaagggtgttatgatctctggaataattctttagagtttgaatgttgtcatagctcctgatacataatgccatactactttgcataccgctcataagtatggcatttagtttaaagcaggaatttcattcaaagaaacctgatcttttacctgctcaacataagcctctttaatttccatagcacttagtgatagtatataatgattaaattttttatttttttttattttttgagacggagtctcactctgctgcccaggctggagtacagtggcgcgatctcggctcactgcaagctccgcctcccgggttcacgccattctcccgcctcagcctccctagtagctgggactacgggcgcccgccaccacgcccggctcattttttatatttttagtagagacggggtttcaccgtgttagccaggagggtctcttgatctcctgacctcgtgatccgcccacctcggcataatgattaaatttttatcgctcatatattccaaagtagaatatgaatgttagaaaaggctgggagactttttgaaaattaagtgttaattaataaagagtagaatgacttattgcactgaaccttggattttatttctttatattgtaatctttcagaataattttaaagatagcatttagaagagcctatgtttactgttcccatttcatgcttctgttcggtttgtgactgctctcattattactcagtggtggagttcatgtcacagaagacacaaacatgctgtaagtgggaagagattacttgatcgcatcctctcatgaatttttcttcccttaaccaatcttacaggactgaagattttgagggtaataaatgaacccacagcagcagctatggcctatggtctccacaaggctgacgtcttccacgtcttggtgatagacttgggcggaggaactctagatgtgtctttactgaataaacaaggagggatgtttctaacccgagcaatgtctggtaagaaaaatgcagggagaggctgggcgcagtggctcacgcctgtaatcccagcactttgggaggccgaggcgggtggatcacgagatggggagatcgagaccatcctggctaacacggtgaaaccctgtctctactaaaaaaaaaaaaaaaaaaaaaattacagaaaaatgcagggagagttgaagaggtttgggcagtgctttctttaacatatccaatgtgtaatgcatcctttttttcccccagaattctttgacttcattttgatagttttctgtatatgtaattttataccatttgtatatatttacagcaaaaagttaaatctcaaaaaatgctgggcatcctataagtcgcataaatacattgccagttacccaattacggctcacatagccagtaggacttttcatggtgatggtgaagaaagggaacagagggaagaaaaatttctttaaaatgaagggtgatcagtatatttcatttaatatgttttataaagtagatgtctttagaaagtctaattgtatttttccctaggaaatgataggattatgcattctaaacccttttttaaacgtttttattttgtcgaatttagcttaagggattcaacctgtttgacacgttgagttgtaagttacaggtattctaacctctgcatttttttttctctttttctaatcaagttaaataccaggaaattatattacactactcttttcctttgaaattatttatctagttttcaggtagaaaagtagaaagaccttttcaggtcctaatcaggcaagaaaaaatgaaaggaaaaaaagagattaaatacctactttttcattataagaagcactttcttctgttgagaatgacattcagtgtttttaaatagctacttataagccaatctgtattcttaatctctatttactgaaaaattatttgatattgtgaagagatacttccttttatataatttaaaattttgaccctgatgtgcactagtttttaaatagtacttatttgggttaagatagctttaacccagtcattattttttaaatttttatttattgatttattttatagaggcagggtcttgctatgttacccagtctggtctccaactcctggcctcaagcaaccctcccacctcagccttccaaagttctaggattacaggtgtgagacaccatgcccagcaacacagttatttttaaccagtctctgtatgaataaaattgtaatgatacatgaaacagggatttgttattcccagaatataatttttacgtatacataataacatacgtgtatacatacacacatatatgcataactatattaaacttttatttttcactcaggaaacaataaacttggaggacaggacttcaatcagagattgcttcagtacttatataaacagatctatcaaacatatggcttcgtgccctctaggaaagaggaaatccacagattgagacaagctgtggaaatggtcaaattaaatctgactcttcatcaatctgctcagttgtcagtattactaacggtggaggagcaggacaggaaggaacctcacagtagtgacactgaactgccaaaagacaaactttcctcagcagatgaccatcgcgtgaacagtgggtttggacgtggcctttctgataagaaaagtggagaaagtcaggttttatttgaaacagaaatatcacggaaactctttgatacccttaatgaagacctctttcagaaaatactggtacccattcagcaagtattgaaagaaggccacctggaaaagactgagattgatgaggtggttttagttgggggctccactcgtattcctcggatccgtcaagtcattcaagagttctttggaaaagatcccaacacatctgtagaccctgacctagcagtagtaacgggagtggctatccaagcagggattgatggaggctcttggcctctccaagtcagtgctttagaaattcccaataagcatttacaaaaaaccaacttcaactgaattctgcagaaataatggttatttgtgaacttgtctgatgatctcttcccatttatcagattaccttttccacaaaagaaagtctctaaaatatcacagatttacctagagggcaacatttagatacaggaaaattttacatagtgttttgtcttaggattagacgtgaccagattgatcctgtttgattttggagagatcctattctaacaaatactctaaaatgataaaattgaggtacaactctcttaaaagagtatggataactatattttctggattctggaggttgataaccatatgcacttaacattatattctataaacattaagtagtgccagttatgagattcccagttcttactaaattgtattagcaggagctggtaattacttgtattatcacatgtaactaataatttgaactatacttgaaggaccgtgttgatgtcaggtatttacagtggttggaagatagcagtattattagcataagctgcatacgtaatattcagtaactgccatattatataacaaatttacattcacaaattcagtatcctgttaagtgtcatattcttgtaatctgcattctccaggagttttatgtgtttaatagatgaatttattttatttctaaaggtattcaaatgtttcagcaccatataatagaaatacccaattatattctagttcctttatgtcctgtacatcattctctgcttggatttccattattctgtttggttagagaataaaattggtaattgcatttgaagaatgtgttaatgtcataataaagccatgattgctatcttatttttgttatccgagacctttgcaaacattggcaaatagcatcaattacctactgtatttgtttctttgtttatattttcagtaagccctggggaatatagcatggaattgagctactaaatggttttggttccgttttacggagatttttcctcatatttagttttgaatgaggaaaatgtgctcaattataaaagctgtgttattgttttctattattatttttaaataatcacacttggactcttttcaaacattaggttagtttgtaatgaaagcaaaaaatttgtgaatactggaagtaacgtggaaatctaatgtggaagccattgtggcaaggtttctacaaatcggcatttggagcagagttgtttgtttttgttgtttgtttcctttaagaaaaaccacagggaccaagaaagaaaatataacagtttgatttctgtcatacccattgtatttgaagatatatggatacagattatatatatatatacatattttccttaatagaggaatgcttcatattattcaaaaattatatcctgatcacctttttttgttttttattgtaaagtatctctgctttatccattgctgaattcgataggatgttgaaatgctggtcaccaaaaaaggaaactgagcaaattcatttcaacaacatcaaaacttcagcttctcatagtaaaaagctgaatgttactaatatttttcatatctaaaaaaaaattcttagcaatgaaattgctgttaaaacacaaatttcaatcaaatacttttgtgtatagaaaatatgtatagtaggtagatagaaaagtataaaatgtttgttgaagtatcttattttagaatgaatggagaaatgccaaagatgaatccttcactgcattatgaaaatatttcacatgttctcttggactttatataaatctgtaatagattttagaattgaaaaattctttgtgaaggtcttctaaaagtgttccaatttatctcaaaatctccatatataggatcagcttaaaacataaagaaaaccttgaatttctcaaatgtttgagatgttcaagacagtctcttaatccgttaatgcttttggaaacaattgacaaaatagggcaggcagctcatctcatgtcctgaagttggaatttaaataattcctatttgcaaattagaatgacagtgttggaatttggaggcagtagttgagcatattctctagtatatagctacacctttaataaaatgaaggaatgtcttcaatcatattttagtgggctatttataaatagtcttgaagtcaatttagtttatttatttaaaagataatgcatcctgaaagggatcatttatgaataacaatctgaagtcttttcataaaaaaaattaataaactttagttgtacatttagccagtgttatttgaagtatgtaacttttaaaatattaagtgtcttgtatgattagaatatgtgaatgagtaacttattttgtatcaggaatgttttggtactgtgttttcactcaaaccactgacttaacagatactgctgtgtataacatgtactaaatattacagttattgtgcataacagattgttcctcttatatttgtgtgtatacaggcaattcatgttttaatgtaaataaataccattttgcagtttgttttttaaa

SEQ ID NO: 7287 - DNA, 12041 bp, Homo sapiens; identical to SEQ ID NO: 7286

SEQ ID NO: 7288 - DNA, 477 bp, Homo sapiens
taagccaccgctcatggccttatgtgggtttattaaggatgccacgaataggttagattccccaatatcatcagaacttaattcaatgggtctaaaatttctgtaaattattgagagttcttctgacaaactatgaaaaaaaaattgctttggtaaagcatttgctttgttttgacaagaattacaaacgatttgcctcacattaagttatttggattttaaagcaggaataaatgcagtttgtttgatacctcattgaattacctattaattggcctacctaaaatacctaaaaaatttcaaatgctctaacacttgtaactctgtaacttattttatatatattatatgtatacatatatatgtgtgtatgtgtatgtgtatgtatgtaaagctaatatgataaaaacacattttttttctgttaagagttcattcaccttaaattacttaacatggactgttggaaactggaaa

SEQ ID NO: 7289 - DNA, 477 bp, Homo sapiens; identical to SEQ ID NO: 7288

SEQ ID NO: 7290 - DNA, 2732 bp, Homo sapiens
gttctgggggtcctggagacttaccattgagccatgcaatctgggaagcacaggaataagtagacactttgaaaatggatttgaatgttctcatcccttttgcagcttttctttttggctctctcatgtccttggcttgctcctctattctacctctctttctccagcaataatatgcaaatgaagacatgtatccataagaaggagtgctcttcatcaactaatagagcacctaccacagtgtcatacctggtagaggtgagcaattcatattcaaaggttgcaaagtgtttgtaatatattcatgaggctggaagtaagaagaattaaaaatttgtcctaattacaatgagaaccattctaggtagtgatcttggagcacacatgaataactttctgaaggtgcaaccaaatccatttttatttctgcctggcttggtcacctctgtaaaggtttaacttagtgttgtcaagtaacagttactgaaagagctgagaaaaagaacaatgaacagcaacgatcttgactgtgcaactcagacattcctgcagaaaagacatatgttgctttacaagaaggccaaagaactatggggccttcccagcatttgactgttcattgcatagaatgaattaaatatccagttacttgaatgggtataatgcatgaatatttgtgtgtctgtgtgtgtgtctgagttgtgtgattttattaggggcatctgccaattctctcactgtggttccttctctgactttgcctgttcatcatctaaggaggctagatccttcgctgacttcaccattcctcaaacctgtaagtttctcacttcttccaaattggctttggctctttctgcaacctttccattcaagagcaatctttgctaaggagtaagtgaatgtgaagagtaccaactacaacaattctacagataattagtggattgtgttgtttgttgagagtgaaggtttcttggcatctggtgcctgattaaggcttgagtattaagttctcagcatatctctctattgtcttgacttgagtttgctgcattttctatgtgctgttcgtgacttggagaacttaaagtaatcgagctatgccaacttggggtggtaacagagtacttcccaccacagtgttgaaagggagagcaaagtcttatggataaaccctcctttcttttggggacacatggctctcacttgagaagctcacctgtgctgaatgtccacatggtcactaaacatgttatccttaaaccccccgtatgcctgagttgaaagggctctctcttattaggttttcatgggaacatgaggcagcaaatctattgctaagactttaccaggctcaaatcatctgaggctgatagatatttgacttggtaagacttaagtaaggctctggctcccaggggcataagcaacagtttcttgaatgtgccatctgagaagggagacccaggttgtgagttttcctttgaacacattggtcttttctcaaagttcctgccttgctagactgttagctctttgaggacagggactatgtcttatcaatcactattattttcctgttacctagcatgggacaagtacacaacacatatttgttcaatgaatgaatgaatgtcttctaaaagactcctctgattgggagaccatatctataattgggatgtgaatcatttcttcagtggaataagagcacaacggcacaaccttcaaggacatattatctactatgaacattttactgtgagactctttattttgccttctacttgcgctgaaatgaaaccaaaacaggccattgggttccacaagtcaatatatgttggatgaggattctgttgccttattgggaactgtgagacttatctggtatgagaagccagtaataaacctttgacctgttttaaccaatgaagattatgaatatgttaatatgatgtaaattgctatttaagtgtaaagcagttctaagttttagtatttgggggattggtttttattatttttttcctttttgaaaaatactgagggatcttttgataaagttagtaatgcatgttagattttagttttgcaagcatgttgtttttcaaatatatcaagtatagaaaaaggtaaaacagttaagaaggaaggcaattatattattcttctgtagttaagcaaacacttgttgagtgcctgctatgtgcacggcatgggcccatatgtgtgaggagcttgtctaattatgtaggaagcaatagatctcggtagttacgtattgggcagatacttactgtatgaatgaaagaacatcacagtaatcacaatatcagagctgaattatcctcagtgtagcttcttggaattcagtttctggaactagagatagagcatttattaaaaaaaactcctgttgagactgtgtcttatgaacctctgaaacgtacaagccttcacaagtttaactaaattgggattaatctttctgtagttatctgcataattcttgtttttctttccatctggctcctgggttgacaatttgtggaaacaactctattgctactatttaaaaaaaatcagaaatctttccctttaagctatgttaaattcaaactattcctgctattcctgttttgtcaaagaattatatttttcaaaatatgtttatttgtttgatgggtcccaggaaacactaataaaaaccacagagaccagcctggaaa

SEQ ID NO: 7291 - DNA, 2732 bp, Homo sapiens
gttctgggggtcctggagacttaccattgagccatgcaatctgggaagcacaggaataagtagacactttgaaaatggatttgaatgttctcatcccttttgcagcttttctttttggctctctcatgtccttggcttgctcctctattctacctctctttctccagcaataatatgcaaatgaagacatgtatccataagaaggagtgctcttcatcaactaatagagcacctaccacagtgtcatacctggtagaggtgagcaattcatattcaaaggttgcaaagtgtttgtaatatattcatgaggctggaagtaagaagaattaaaaatttgtcctaattacaatgagaaccattctaggtagtgatcttggagcacacatgaataactttctgaaggtgcaaccaaatccatttttatttctgcctggcttggtcacttctgtaaaggtttaacttagtgttgtcaagtaacagttactgaaagagctgagaaaaagaacaatgaacagcaacgatcttgactgtgcaactcagacattcctgcagaaaagacatatgttgctttacaagaaggccaaagaactatggggccttcccagcatttgactgttcattgcatagaatgaattaaatatccagttacttgaatgggtataacgcatgaatatttgtgtgtctgtgtgtgtgtctgagttgtgtgattttattaggggcatctgccaattctctcactgtggttccttctctgactttgcctgttcatcatctaaggaggctagatccttcgctgacttcaccattcctcaaacctgtaagtttctcacttcttccaaattggctttggctctttctgcaacctttccattcaagagcaatctttgctaaggagtaagtgaatgtgaagagtaccaactacaacaattctacagataattagtggattgtgttgtttgttgagagtgaaggtttcttggcatctggtgcctgattaaggcttgagtattaagttctcagcatatctctctattgtcttgacttgagtttgctgcattttctatgtgctgttcgtgacttggagaacttaaagtaatcgagctatgccaacttggggtggtaacagagtacttcccaccacagtgttgaaagggagagcaaagtcttatggataaaccctcctttcttttggggacacatggctctcacttgagaagctcacctgtgctgaatgtccacatggtcactaaacatgttatccttaaaccccccgtatgcctgagttgaaagggctctctcttattaggttttcatgggaacatgaggcagcaaatctattgctaagactttaccaggctcaaatcatctgaggctgatagatatttgacttggtaagacttaagtaaggctctggctcccaggggcataagcaacagtttcttgaatgtgccatctgagaagggagacccaggttgtgagttttcctttgaacacattggtcttttctcaaagttcctgccttgctagactgttagctctttgaggacagggactatgtcttatcaatcactattattttcctgttacctagcatgggacaagtacacaacacatatttgttcaatgaatgaatgaatgtcttctaaaagactcctctgattgggagaccatatctataattgggatgtgaatcatttcttcagtggaataagagcacaacggcacaaccttcaaggacatattatctactatgaacattttactgtgagactctttattttgccttctacttgcgctgaaatgaaaccaaaacaggccgttgggttccacaagtcaatatatgttggatgaggattctgttgccttattgggaactgtgagacttatctggtatgagaagccagtaataaacctttgacctgttttaaccaatgaagattatgaatatgttaatatgatgtaaattgctatttaagtgtaaagcagttctaagttttagtatttgggggattggtttttattatttttttcctttttgaaaaatactgagggatcttttgataaagttagtaatgcatgttagattttagttttgcaagcatgttgtttttcaaatatatcaagtatagaaaaaggtaaaacagttaagaaggaaggcaattatattattcttctgtagttaagcaaacacttgttgagtgcctgctatgtgcacggcatgggcccatatgtgtgaggagcttgtctaattatgtaggaagcaatagatctcggtagttacgtattgggcagatacttactgtatgaatgaaagaacatcacagtaatcacaatatcagagctgaattatcctcagtgtagcttcttggaattcagtttctggaactagagatagagcatttattaaaaaaaactcctgttgagactgtgtcttatgaacctctgaaacgtacaagccttcacaagtttaactaaattgggattaatctttctgtagttatctgcataattcttgtttttctttccatctggctcctgggttgacaatttgtggaaacaactctattgctactatttaaaaaaaatcagaaatctttccctttaagctatgttaaattcaaactattcctgctattcctgttttgtcaaagaattatatttttcaaaatatgtttatttgtttgatgggtcccaggaaacactaataaaaaccacagagaccagcctggaaa

SEQ ID NO: 7292 - DNA, 14083 bp, Homo sapiens
gtttccagtgggttttttggaggccagtggcatgaaattcatcctcagtactggaccaagtaccaggtgtgggagtggctccagcacctcctggacaccaaccagctggatgccaattgtatccctttccaagagttcgacatcaacggcgagcacctctgcagcatgagtttgcaggagttcacccgggcggcagggacggcggggcagctcctctacagcaacttgcagcatctgaagtggaacggtgactctctctttctgtgtctctccctaccctgctaggagccagctggaagaatagagattctgcagatgacaggattctttgtcagggacaagaaagagtggtctcacctccaaattaccatgtcccaagacagagaaatggaaggaagatgaaaggacaggattgaagcatagggtacctggtgtgcctaatcccttataaatgccagtgtaatttaattctttccttatggtgataattttcaagaagacaaaagctggctaggaattcgtagaatacttactatccttggaaaatgttttctttcctttgcaaacagtccagtcacttgcttgttaaaaagatcatcatggttacaaaaaaaaaaacaaaaaacaaaaaacaaaacaaaacaaaacccccccccccacacacacaaagaaccttctagacctaggttcttaagatagggtcctaagggtggtaagaagatatatgaaattagaactatgtttgtgttttgggaggggaaaaaactcacaatacttcagcagattcttaaaaggtctgtaacttaaaaaaagggttagaacatatggtctagacacgtgtatggggaatgtttctgtggtggtttctggaatttctgttgccctaatgccccagatgtctctctgaggcttcccctagcacagggatgggccaccattccagatgttgtctttgagtggtagattattcatacacgaacatatcctatactgacatgtaagacctagtagggtggacaactgaccttgcagaatggttttgacactggcataaggttcccctgatagtggctgtaaaaatctagctcttctgagaactatgggaatcctgaaaagtagcaatatttaagaacagggagttggcctgtctgcactggaaaaggcatttatgtcttggtagaacccatgtttgggcaagtaaccgggacttgggcggcatgagctccagggctgtgaaccagagtcataccctggcaacagccatcaacactgaagaggacctggggccttgcagcagagcttgtggctgcggtggccattttagatgatgtcattcagctccctggccatgccctgcttcccacccacctcacattggtggctgctcttttttctttgactagaatcaaaccaaacaaggctctataaataaccctcagggatcttcaaaaagatcagacttacacttgaagaattaaaaatatttacctccaccccccaattaaatccactcctttaaagctttgccctgattgaggtctgaggcagggaggcctgggaggtgctgtggccatcttagaccttctgtctctgacttcccatgacttgtttggtctcatcgcatgctgctgtagcctctgagttcctaatgtccaggcagattgctcactcttttgttgtttgcctttgtgtagaccttctatcaactaacatttattgagtatttacttatactaggcactgtaagtgaattaattcatttaataactttatgacaaagtaaatattgtgcccattttacaggtgggaagactgaatgtcagagaggttaaaggcatggcttctgttcttgagatgtttagaatctgtctggggaagaaaacagactagattcatatgcatttacaaatatatatatatatatataagcatacatatatatgcttttatatatgataatgggagaggagttgcaagcaaacaaggtcatgtgatgtgtactgcttgtacatgtgctgaggcataaataaggaaagagtcaccacattttatccagacatatctcacagattggatgtaatcatgatggcattgattagattttaaatcaaagaagaatcaagctagttaaaaaggtttttccctacattttcattttcatatcatatcttagtatgggaaagcaccttagaagtcatctagtgaccttatctagtttaatcttgttacagatggggaaactgagacccagaaaggtaaagtgcacacaccttcctcatagctagtagttgaaaaactgggcttctgaagttctatttccaccatactgaatgcctttactataccacatcaaataattgcttctaaggtagtgccttagattcccaattttctggggtcagagactgcaggcttgagtttgtagaggctgacagagaaaccacctcccataaacaaacataggtgaccaggcagtaggatggcagaagctctgcaaagatgccagttctgtccttatttaagcatccagttctggctccatctgggccctctctgactatcccaatctgtccttcacaggccagtgcagtagtgacctgttccagtccacacacaatgtcattgtcaagactgaacaaactggtgagtagtagtggacaaagggagccaacctagcctggcaaagctccggggaggacagttgggagagggcaagagagaatgtgggggcaagtttttgcaggaaacacagggaggccttttccctggctgtctctgatgggccacccccaccatgaatctcattcttgcccttgcgaccagtgactgccacctatttccaatttatagacttatggggagccacacttctctgcctcctactcctggttgtggcatcatccagacctcaggccagcagccaaggaaaagcagaatatatggtgggcctccccaccttaaaaagtgtcaggggagtggccaagtttggaaagagaagaggaaggggcaatgtctcctcttctctccctcctcccttgatgggtgtgtgtttcacaaaaagggtgaatatactaacttggtattgtagttaacaaatttttaggggccctggggagcttctgcagagatgtacaaaggtacctgcaacccagctcctgccttaggtgtgtttttatatgaaggacaaaatgctgggctctgagcagagtctacagtcccatagcatctacattcattttcgtttcctttcccctgtcctaaatctctctcctggagactgtcctccaaagtccatgagccatcataaaactgtgcagcaactattgctcctaagtcactccccatgttcatgcctgggagcctgggagccacgtgggccaaccaagctttccatagacctccctgaggatgtgtcccagtcaccaaggacagaatttgacctgcaggtgatttgtgagtcacttggggccaaaattggcccatgcagttatttaccctttcataagtgggctggcctaccattattaaagaaaaaagcaatagctgctaagcatgcaaattaggctttgctagccctgcctttctcttcagaggccaggggatgggccatctggatgttctgtgctttacaggcctggccttgccctagagatggatgcaggacttggtcaggaggatggcaccccctcccctgcttgacctgtcagatagccccaccgaaggagccagggtaatactggagaggtcccaaataacttgataattccttcttgaccatccagacattcttgtgttgccagttcagaaaagctgagtggaagggtggagaagaaggtccaccctaggaggaggggagaagaagctcatagaggggccaacacccccatacctctttggttcagtttgttttcagagacaacaacaggtgtacaaggtgacccaacaaggagagagggtgtaaccccaagagattgggcttggggtgtccaaacatgtagctattagctaaaataccggctaaatccctatgtcgtaaacacgaggacttagccagtaagtcaggttttgtatcatttgtgctataaaaacaaaatgaaactcagtcagtggcttacaccccggccctaaaactcagaacccagcaaggaggggagctgagggtaacctaggtctgcagtgaggagaaagcaggaagtttctggtgaggacgaggtgagagatcttacagcttttggctagccaagaaacaaaatgcttctgttggagaccagcccagatctgggggttgcgtaggagttgagctccatttggggtaggtggaggggagttccctttgaatctgaaatctgaagagtcagtcaaagtgagaggtgtttaccgcagcacacagaagaaagagaaagagagacagagtacaagagcacttcttttctgcgatggggcagtggggcttcactcttaaaaggtgtttgtttgatttagtaacacagtccaccccttctccttggttttgttttgagaattttatgtcatcctttaagctaattggaaaaatcctagagggagggggctgtcacccaacttggatgacaaatctctggatttcagcaaggaagaaactgtgataagattgacaagactcttcctgaaagaaatatcattaaccccccaaggcctcattaattatttattatacatttaaataattaaatcctaacaaggccttcccccccaccacactctagggtaaaaatattctggtgattatgcagtagaatgcagaacaaagccaagccaggttaggaaaattcccaggaaccacttggtctaggacaggttcccattcttgcaacttctctcacttccctaaaaatgcaataggtacagaacacatggatgaggccatttccccgaggatgctgaaaggaaaattagacaacattattataaagtaacgcagctgaagcagaatcatatcccttgtctctgaggaccactcctcaccccccatactttgttgatgaacaatgaattagaaaacgcagcctcttctccctggggaaaatgatcgctgactattctccttctctattttttgtagagccttccatcatgaacacctggaaagacgagaactatttatatgacaccaactatggtagcacagtaggtaactaactccctgacacttaaggccctttacattcttattcagtttgtctaagagccacagtgttctattgtgaggtggggggagggggtgctctaaatgtcctttatcttttcatggccacagatttgttggacagcaaaactttctgccgggctcagatctccatgacaaccaccagtcaccttcctgttggtaagctgtcatcacatctgaggctgggtatgcctaatgcttagggagaatcagtgggaattaccaacactctacatttctgcctttctggagtctttctaattaaagggctaggaaagggatggggttaccattagacgaggtttgcttttgaggcaatatttgtacatcgaagatgacccgtagggatcctctaggcaaaatgttggtctcctacgaaactagtcactctgttgtgacaataaaagttgtttaggcttttctttattttcaatgaaaacttactcttgcaatatagctgctaaaattattcatatttgggtatacttatgggaaataaggctatatttaattttcaacaaactacatttggctttagagaaagaatacctcatagtaaaattcaaaggtccgtgaacctatagtgatagtttctgggtgaaggggtagccattggaaacttccagaatccccacagttacactattttgtcagtttttaagtctaattccgatgactcatcagtgctctctaatcagtcagagcacctgcattttatgagttacgttcactttagctgcatttggttaagcttggatgcaactggggctatccatgctccttaaccaaggttacactgggtgagaagtttgggatgttgggagtctgggagaggggatttcagattaccacccccacctacaaataggtgcattggcgtgtacagtgtgggaaatggttgaaagaggatcttatggtttcccgtgatctgagtatgaacttgtggatctctttgggtctatgaaatggcacttagacatcagtcacaagtgatagtgcctctctcctggaattaaatttggagcaacttcagaaatgggatttaattgggtctttgtgaaagaaattagtctgcaacccttccttcctctttttttctgtttttgtttttgcttttgagaactgaaataatgaaaggttttggtttgaggttttgtttgggtcaagccccttaaatgagatggggctgggagccaatgtaaatgcttgtggaattgagattaagagctgaggccagcatagctctcgacttctccttcccccagtggtccttagcattatatgtcacttgaagtatttgttaaaattagggaatagatcaaacactggcaaggcttggctgtgtatttgctattctgggggaactgagccaaccggggtaaaatttctgtggcaatcattgccactcagtcaagaccatggggttcagggctgaggaaacctcccaagtcacactctgagttcctctgcgacttcctacagtgtcatctcccacatccttccatccttccatccttccatccttccatccttccacttgggtctttgacttacggcaaaaaattccaactaagaataaagctgaaccaaccacttcctgagcctcagaggctagtaggtcttgaggcacccgggaaacaaaaacatcatagttacagctctgctgccctgagagctgggccatcctcttttctacatcttgacttacaccttctagaatctcaaaatcaataggggccttagaggccagtttctgcttttgcatttgcagtagcaaggaactcgctctctcctgagtccaccgattgtatttttcaatagtccttcttaagatgggctcaggaatcttctctccttacccttctgatccttgtttgctgcagctccccatttctatcctgtgattgtaacccaggctggaaaatgagatcaatcacccaggccctaaagaatcaatgcagtctctggggttggtgtattcattggggtaatagcccttcagtaggatagttaattacagccttatatgggtcagtttctttcagaatagtttatagtctctactgcatggaagcagaaccccggaaaaaccttggtcatttgcctgagtctttatttttcgagctcccatgtaattgaatgcagtgaaatatctttctatgttttaatgctagttaccagctgagctaaggcgaggcccagcgtaaactgatgccctctgtgataaacgcaggtggggaaataggctttgttttgatttctctgtcatctgcccatttcataaaatgcccgctgccggtgtcctgttctgctcgacagtcctccagcctgtcatgccagctcgggcttgatgtgtttatccactgacttgttgagcctaaagctagggtggcacggtctattagaacactgaaatttgtatatcccgtaaagaaatggctcacagctgaatcatatgcaaatgcttctaatctttgcttcttgcgaagcagcttagctgaagtcacgctctctcacttgcatcacaaacctgtggcttgttgctgcccctgcctggactggataggaccttggcctggagtgcctgggagccaagcaagagaaagccaggctggacaacttctccagggcaagccattattttataagaatgaatcacttaaccacatggctaacttcaaaggtcttgacttttatcctagggcagaagaaggacacatattaaagagaggttaaagatcaaaagatatcagtggtaaagcaggccagtgattccacggcttacccctgcacactgcaacaggcagagaggtctggaagaaattaggttcttcttttgcctttgactgcttattcccctttatgatgatggaaagatttttatttggggattaaaaaaagaacgttcctagctgggtggagcctagcttgggtaaacggctgacaactcaaagaatatttcctcatggtttatctagtgtagaggttttagagtccatggactgctgcatgggccacagccccctgaaattgttgacaaaatttcatgtgtacatatatgtgcatttttttctgaggagagggtccaaggttttcgtcttattcacaaaggcacctgaactctgaagtaactgattctagatcaactaggaacccacaaacaataattgaggccaatatactgagagactcttgtatttttctgaattcaactcctggctctgaaataatggccctgcatccctcctggatgtcatttgaaaatgagctttgcttgtggcctgctgggtaaatgccactctttgtctgcagtacaacgtggccctgtcagagtgatgtatcacttggaaaccggggtggatgccagacctgtcgcaatattgtcacatcctgatgggatgttgcaacctcaccctgcaacctacagggagggagagtgaagtctccttgcatttcctgtgaatttgtcctctcggatttcagagaaacccaagtcaggtgcaggccctgctagtgacaatgccaggagagaaattcttaaccaggatgagaggtttcttgtttactgaggtcttattaaatccctctctccatcctgccatgacgtttcgagaaattgctgggaacactgagtcttgattagctgggtgataagatggttgaaagggcccatgaacgttgggaaatatagaattgtcagattgaaattatcttttctactaacaagagcattacagaagtgaacctgattcttggcaagaaaggcttgtgtgaaatctgttatgtgcaaagggagattatgtgccggccaccatttctggaaatgacatagaatcatggttatgagtaaagcttctggattcaaactgtttgtgttcatatcctggctccacattccagctgtgtgactctagtcaagtcatttgacccctctgtttctcagatcctccacagctgaaaactgtggatcatattagtacctgtgtcatagagttattgtgtgaattaaataaagtgattcatttaaagtgcttagtacagtgcctggtacatagtaagtgctcaataaacagtagcttttttttcttaaccaatttaattaggagctaatggctggcagttcatagcttttttgaataataggcttctcctgataattgaatggatgctgtgaaccctctcccttcatatatggtttcagtcagtccaggggcccttgaaggccacactgggtcagtggaccctagtttaggaagggcacatgaaagagatcagttttactggcccaatttcttaaaataattggcttgtatttagggactactttgtattaaaattggctgatttttgagtgtgagagtctttgtaagatctactttggtcctcccaatacacacacacacacacacacacatatacacacacacactcacactcacacacacacggctagatcatttagttttctttctgagaagaatttttatttcccaggtccgcctccatcatctcctctttggtaatagtcgcagaggttgccataatgagtcatttgttaaactaatctgtgtttccatagtccactgtggccctctgtattgagcttgggccactcaatggcgcctttgtcaggctgattaaaatgtaactttgcatgccaaaaaagggcactcctctggcttaaaagtcatcttcctttgttataaatgtttacatttttctattatgctaaaaaaaaaaaccacaaatttttcaatgatctaaatctttcaatggcttccatctttctcagagtcatgtccttaaaagtcccataagggattaatgatcagaacctcagctcctccctctctgcctcttacagcatgcatataccaaacacacatcaacctcagggcctttgcacttctatgttacacatggaaggctgttgcacaagctctctgcatgaccttttccctcatatcctttaggtcgtggaatcagagaggtctcctatgaccaccttgtatcaaattgcaaattattcccaagtccatacatctatctccatttcttaacctgcatcatttttctccatagcatttatcatctctgttttgtttggttcactagcacatactcaaaggtgccaggcatgcagtaggtgctcagtaaatattgtttaaatgagtggatgcatgaataaaaaagagaattataggaaataggtcaattaaatggctctcatttttctccttagcagagtcacctgatatgaaaaaggagcaagacccccctgccaagtgccacaccaaaaagcacagtaagttggctggctttcagatggcctttggtccttcccatcacatcgggcacatctggaggccactagttttttggcaaatatcgcctctgtctgctgccttcatgtcttcatcccaaacagggtggagtgagaaaatagaggcatcacttgctagcaaagtaagccccctctgcagctgtttctcaaagtggagccccactggacatttcctccctgttctgtcatatgtgctctaaaactgagacacccagtgcctaagaactgcttgcaggcatggggttagcaatttccatctctcccagaagaaaagggtgggaagaggagcgagataagaagaaacagctgagatgtatcatcctttcttttgctaaatgttggcctcctacctttgtggagttaccattccaagaaatgactgttttttcttaagattcaacactgctctttgggagttgggtctccttcagtaataaaatcttatgaacatatacgaaatatcagagacatggaattgtgggtggaacacagaaagaaatcaagatggtataatctaggcctgtaatcccaccactttgggagactgaggtgggtggatcacttgagctcaggagttcaagaccagcttgggaaacatgacgagaccccatctctacaaaaaatacaaaaattagctgggcatggtggcacgtgcctgtagtcccatctacttgggagactgaggcaggaggattgcttgagccagggaggtctaggctgtgatgaactgtaattgcaccactgtactccagcttgggccacagagtgatatcctgtctcagaaaaaaaaaaaaggtataatccagaaattatgaggaattagaatgtctttatctgctctttcacataatcccacaaaaccatattaatgcaacccctcgaaaggtgggtggggtgggggtggggcatcaaaaattcagtgggagtaaagttgaatttggttgataatcttattgcagtagtggcttcattttcaaattgggtcctccagtccctgcgtgaccacccctttccctaccaccctcatctattctgggagtaaacattctagacccttactgatttgcatttggctgaaacacagttgctgggtcaaagcaatttaattggttgagatactggataaaagtggttgagagttgctctctggggaagtaacaggttgaagtgaaccccaagcaatttgtggataataactagaagaaacttccccctggcttaggagacctaagacctattgcttagtcttggctatgtcactagttagctgtgtgatcctgatcaagtcacttaagttctctgtgcctcggtttcctgatttgtaaaataaaatattgtgctagtttattcttaaatacctttttaatgtccaacatctggtgattctgcgatccatcttccctgacaagtaggggagaaatgagtatctcctacttgcaggaagatgacctaactcaatgctctctgccctatctttgctgtgacttagatcattagtaacctgcctttctgcttttcatcagacccgagagggactcacttatgggaattcatccgcgacatcctcttgaacccagacaagaacccaggattaataaaatgggaagaccgatctgagggcgtcttcaggttcttgaaatcagaggcagtggctcagctatggggtaaaaagaagaacaacagcagcatgacctatgaaaagctcagccgagctatgaggtgaggagtttcatgtctctgaaaacaaaaaggctgtacgacccattatttacctagcaaccttcatcggatcagtcaccttatgcaatctcctttgttacagatattactacaaaagagaaatactggagcgtgtggatggacgaagactggtatataaatttgggaagaatgcccgaggatggagagaaaatgaaaactgaagctgccaatactttggacacaaaccaaaacacacaccaaataatcagaaacaaagaactcctggacgtaaatatttcaaagactacttttctctgatatttatgtaccatgaggggaacaagaaactacttctaacgggaagaagaaacactacagtcgattaaaaaaattattttgttacttcgaagtatgtcctatatggggaaaaaacgtacacagttttctgtgaaatatgatgctgtatgtggttgtgattttttttcacctctattgtgaattctttttcactgcaagagtaacaggatttgtagccttgtgcttcttgctaagagaaagaaaaacaaaatcagagggcattaaatgttttgtatgttacatgatttagaaaaaggtgatgcatcctcctcacataagcatccatatggcttcgtcaagggaggtgaacattgttgctgagttaaattccagggtctcagatggttaggacaaagtggatggatgccgggaagtttaacctgagccttaggatccaatgagtggagaatggggacttccaaaacccaaggttggctataatctctgcataaccacatgacttggaatgcttaaatcagcaagaagaataatggtggggtctttatactcattcaggaatggtttatctgatgccagggctgtcttcctttctcccctttggatggttggtgaaatactttaattgccctgtctgctcacttctagctatttaagagagaacccagcttggttcttttttgctccaagtgcttaaaaataagttggaaaaaggagacggtggtgtggaaatggctgaagagtttgctcttgtatccctatagtccaaggtttctcaatctgcacaattgacatttttggccggagtgttctttgtggtgagggctttcctgtgcattgtaagatgttcagcagtatccactcatggtctctaaccacttgacaccagaaaccccccagctgtgataacgcaaaatgtctctagacatcaccaaatgttccctgggggtggcaaatttgcccttgattgagaaccaccagtttagctagtcaatatgaggatggtggtttattctcagaagaaaaagatatgtaaggtcttttagctccttagagtgaagcaaaagcaagacttcaacctcaacctatctttatgttttaaatgttagggacaataagttgaaatagctagaggagcttcttttcagaaccccagatgagagccaatgtcagataaagtaagcatagtaatgtagcaggaactacaatagaagacattttcactggaattacaaagcagaattaaaattatattgtagaaggaaacaccaagaaaagaatttccagggaaaatcctctttgcaggtattaattcttataattttttgtcttttggattatctgtttactgtctcatctgaactgatcccaggtgaacggtttattgcctagatttgtactcagaggaattttttttgttttgttttgtcttttaagaaaggaaagaaaggatgaaaaaaataaacagaaaactcagctcaggcacaattgtcaccaaggagttaaaagcttcttct

SEQ ID NO: 7293 - DNA, 14105 bp, Homo sapiens
gtttccagtgggttttttggaggccagtggcatgaaattcatcctcagtactggaccaagtaccaggtgtgggagtggctccagcacctcctggacaccaaccagctggatgccaattgtatccctttccaagagttcgacatcaacggcgagcacctctgcagcatgagtttgcaggagttcacccgggcggcagggacggcggggcagctcctctacagcaacttgcagcatctgaagtggaacggtgactctctctttctgtgtctctccctaccctgctaggagccagctggaagaatagagattctgcagatgacaggattctttgtcagggacaagaaagagtggtctcacctccaaattaccatgtcccaagacagagaaatggaaggaagatgaaaggacaggattgaagcatagggtacctggtgtgcctaatcccttataaatgccagtgtaatttaattctttccttatggtgataattttcaagaagacaaaagctggctaggaattcgtagaatacttactatccttggaaaatgttttctttcctttgcaaacagtccagtcacttgcttgttaaaaagatcatcatggttacaaaaaaaaaaacaaaaaacaaaaaacaaaacaaaacaaaaccccccccacacacacacacaaagaaccttctagacctaggttcttaagatagggtcctaagggtggtaagaagatatatgaaattagaactatgtttgtgttttgggaggggaaaaaactcacaatacttcagcagattcttaaaaggtctgtaacttaaaaaaagggttagaacatatggtctagacacgtgtatggggaatgtttctgtggtggtttctggaatttctgttgccctaatgccccagatgtctctctgaggcttcccctagcacagggatgggccaccattccagatgttgtctttgagtggtagattattcatacacgaacatatcctatactgacatgtaagacctagtagggtggacaactgaccttgcagaatggttttgacactggcataaggttcccctgatagtggctgtaaaaatctagctcttctgagaactatgggcatcctgaaaagtagcaatatttaagaacagggagttggcctgtctgcactggaaaaggcatttatgtcttggtagaacccatgtttgggcaagtaaccgggacttgggcggcatgagctccagggctgtgaaccagagtcataccctggcaacagccatcaacactgaagaggacctggggccttgcagcagagcttgtggctgcggtggccattttagatgatgtcattcagctccctggccatgccctgcttcccacccacctcacattggtggctgctcttttttctttgactagaatcaaaccaaacaaggctctataaataaccctcagggatcttcaaaaagatcagacttacacttgaagaattaaaaatatttacctccaccccccaattaaatccactcctttaaagctttgccctgattgaggtctgaggcagggaggcctgggaggtgctgtggccatcttagaccttctgtctctgacttcccatgacttgtttggtctcatcgcatgctgctgtagcctctgagttcctaatgtccaggcagattgctcactcttttgttgtttgcctttgtgtagaccttctatcaactaacatttattgagtatttacttatactaggcactgtaagtgaattaattcatttaataactttatgacaaagtaaatattgtgcccattttacaggtgggaagactgaatgtcagagaggttaaaggcatggcttctgttcttgagatgtttagaatctgtctggggaagaaaacagactagattcatatgcatttacaaatatatatatatatatataagcatacatatatatgcttttatatatgataatgggagaggagttgcaagcaaacaaggtcatgtgatgtgtactgcttgtacatgtgctgaggcataaataaggaaagagtcaccacattttatccagacatatctcacagattggatgtaatcatgatggcattgattagattttaaatcaaagaagaatcaagctagttaaaaaggtttttccctacattttcattttcatatcatatcttagtatgggaaagcaccttagaagtcatctagtgaccttatctagtttaatcttgttacagatggggaaactgagacccagaaaggtaaagtgcacacaccttcctcatagctagtagttgaaaaactgggcttctgaagttctatttccaccatactgaatgcctttactataccacatcaaataattgcttctaaggtagtgccttagattcccaattttctggggtcagagactgcaggcttgagtttgtagaggctgacagagaaaccacctcccataaacaaacataggtgaccaggcagtaggatggcagaagctctgcaaagatgccagttctgtccttatttaagcatccagttctggctccatctgggccctctctgactatcccaatctgtccttcacaggccagtgcagtagtgacctgttccagtccacacacaatgtcattgtcaagactgaacaaactggtgagtagtagtggacaaagggagccaacctagcctggcaaagctccggggaggacagttgggagagggcaagagagaatgtgggggcaagtttttgcaggaaacacagggaggccttttccctggctgtctctgatgggccacccccaccatgaatctcattcttgcccttgcgaccagtgactgccacctatttccaatttatagacttatggggagccacacttctctgcctcctactcctggttgtggcatcatccagacctcaggccagcagccaaggaaaagcagaatatatggtgggcctccccaccttaaaaagtgtcaggggagtggccaagtttggaaagagaagaggaaggggcaatgtctcctcttctctccctcctcccttgatgggtgtgtgtttcacaaaaagggtgaatatactaacttggtattgtagttaacaaatttttaggggccctggggagcttctgcagagatgtacaaaggtacctgcaacccagctcctgccttaggtgtgtttttatatgaaggacaaaatgctgggctctgagcagagtctacagtcccatagcatctacattcattttcgtttcctttcccctgtcctaaatctctctcctggagactgtcctccaaagtccatgagccatcataaaactgtgcagcaactattgctcctaagtcactccccatgttcatgcctgggagcctgggagccacgtgggccaaccaagctttccatagacctccctgaggatgtgtcccagtcaccaaggacagaatttgacctgcaggtgatttgtgagtcacttggggccaaaattggcccatgcagttatttaccctttcataagtgggctggcctaccattattaaagaaaaaagcaatagctgctaagcatgcaaattaggctttgctagccctgcctttctcttcagaggccaggggatgggccatctggatgttctgtgctttacaggcctggccttgccctagagatggatgcaggacttggtcaggaggatggcaccccctcccctgcttgacctgtcagatagccccaccgaaggagccagggtaatactggagaggtcccaaataacttgataattccttcttgaccatccagacattcttgtgttgccagttcagaaaagctgagtggaagggtggagaagaaggtccaccctaggaggaggggagaagaagctcatagaggggccaacacccccatacctctttggttcagtttgttttcagagacaacaacaggtgtacaaggtgacccaacaaggagagagggtgtaaccccaagagattgggcttggggtgtccaaacatgtagctattagctaaaataccggctaaatccctatgtcgtaaacacgaggacttagccagtaagtcaggttttgtatcatttgtgctataaaaacaaaatgaaactcagtcagtggcttacaccccggccctaaaactcagaacccagcaaggaggggagctgagggtaacctaggtctgcggtgaggagaaagcaggaagtttctggtgaggacgaggtgagagatcttacagcttttggctagccaagaaacaaaatgcttctgttggagaccagcccagatctgggggttgcgtaggagttgagctccatttggggtaggtggaggggagttccctttgaatctgaaatctgaagagtcagtcaaagtgagaggtgtttaccgcagcacacagaagaaagagaaagagagacagagtacaagagcacttcttttctgcgatggggcagtggggcttcactcttaaaaggtgtttgtttgatttagtaacacagtccaccccttctccttggttttgttttgagaattttatgtcatcctttaagctaattggaaaaatcctagagggagggggctgtcacccaacttggatgacaaatctctggatttcagcaaggaagaaactgtgataagattgacaagactcttcctgaaagaaatatcattaaccccccaaggcctcattaattatttattatacatttaaataaattaatccctaacaaggccttcccccccaccacactctagggtaaaaatattctggtgattatgcagtagaatgcagaacaaagccaagccaggttaggaaaattcccaggaaccacttggtctaggacaggttcccattcttgcaacttctctcacttccctaaaaatgcaataggtacagaacacatggatgaggccatttccccgaggatgctgaaaggaaaattagacaacattattataaagtaacgcagctgaagcagaatcatatcccttgtctctgaggaccactcctcaccccccatactttgttgatgaacaatgaattagaaaacgcagcctcttctccctggggaaaagagatcgctgactattctccttctctattttttgtagagccttccatcatgaacacctggaaagacgagaactatttatatgacaccaactatggtagcacagtaggtaactaactccctgacacttaaggccctttacattcttattcagtttgtctaagagccacagtgttctattgtgaggtggggggagggggtgctctaaatgtcctttatcttttcatggccacagatttgttggacagcaaaactttctgccgggctcagatctccatgacaaccaccagtcaccttcctgttggtaagctgtcatcacatctgaggctgggtatgcctaatgcttagggagaatcagtgggaattaccaacactctacatttctgcctttctggagtctttctaattaaagggctaggaaagggatggggttaccattagacgaggtttgcttttgaggcaatatttgtacatcgaagatgacccgtaggatcctctaggcaaaatgttggtctcctacgaaactagtcactctgttgtgacaataaaagttgtttaggcttttctttattttcaatgaaaacttactcttgcaatatagctgctaaaattattcatatttgggtatacttatgggaaataaggctatatttaattttcaacaaactacatttggctttagagaaagaatacctcatagtaaaattcaaaggtccgtgaacctgtagtgatagtttctgggtgaaggggtagccattggaaacttccagaatccccacagttacactattttgtcagtttttaagtctaattccgatgactcatcagtgctctctaatcagtcagagcacctgcattttatgagttacgttcactttagctgcatttggttaagcttggatgcaactggggctatccatgctccttaaccaaggttacactgggtgagaagtttgggatgttgggagtctgggagaggggatttcagattaccacccccacctacaaataggtgcattggcgtgtacagtgtgggaaatggttgaaagaggatcttatggtttcccgtgatctgagtatgaacttgtggatctctttgggtctatgaaatggcacttagacatcagtcacaagtgatagtgcctctctcctggaattaaatttggagcaacttcagaaatgggatttaattgggtctttgtgaaagaaattagtctgcaacccttccttcctctttttttctgtttttgtttttgcttttgagaactgaaataatgaaaggttttggtttgaggttttgtttgggtcaagccccttaaatgagatggggctgggagccaatgtaaatgcttctggaattgagattaagagctgaggccagcatagctctcgacttctccttcccccagtggtccttagcattatgtgtcacttgaggtatttgttaaaattagggaatagatcaaacactggcaaggcttggctgtgtatttgctattctgggggaactgagccaaccggggtaaaatttctgtggcaatcattgccactcagtcaagaccatggggttcagggctgaggaaacctcccaagtcacactctgagttcctctgcgacttcctacagtgtcatctcccacatccttccatccttccatccttccatccttccatccttccatccttccatccttccacttgggtctttgacttacggcaaaaaattccaactaagaataaagctgaaccaaccacttcctgagcctcaggggctagtaggtcttgaggcacccgggaaacaaaaacatcatagttacagctctgctgccctgacagctgggccatcctcttttctacatcttgacttacaccttctagaatctcaaaatcaataggggccttagaggccagtttctgcttttgcatttgcagtagcaaggaactcgctctctcctgagtccaccgattgtatttttcaatagtccttcttaagatgggctcaggaatcttctctccttacccttctgatccttgtttgctgcagctccccatttctatcctgtgattgtaacccaggctggaaaatgagatcaatcacccaggccctaaagaatcaatgcagtctctggggttggtgtattcattggggtaatagcccttcagtaggatagttaattacagccttatatgggtcagtttctttcagaatagtttatagtctctactgcatggaagcagaaccccggaaaaaccttggtcatttgcctgagtctttatttttcgagctcccatgtaattgaatgcagtgaaatatctttctatgttttaatgctagttaccagctgagctaaggcgaggcccagcgtaaactgatgccctctgtgataaacgcaggtggggaaataggctttgttttgatttctctgtcatctgcccatttcataaaatgcccgctgccggtgtcctgttctgctcgacagtcctccagcctgtcatgccagctcgggcttgatgtgtttatccactgacttgttgagcctaaagctagggtggcacggtctattagaacactgaaatttgtatatcccgtaaagaaatggctcacagctgaatcatatgcaaatgcttctaatctttgcttcttgcgaagcagcttagctgaagtcacgctctctcacttgcatcacaaacctgtggcttgttgctgcccctgcctggactggataggaccttggcctggagtgcctgggagccaagcaagagaaagccaggctggacaacttctccagggcaagccattattttataagaatgaatcacttaaccacatggctaacttcaaaggtcttgacttttatcctagggcagaagaaggacacatattaaagagaggttaaagatcaaaagatatcagtggtaaagcaggccagtgattccacggcttacccctgcacactgcaacaggcagagaggtctggaagaaattaggttcttcttttgcctttgactgcttattcccctttatgatgatggaaagatttttatttggggattaaaaaaagaacgttcctagctgggtggagcctagcttgggtaaacggctgacaactcaaagaatatttcctcatggtttatctagtgtagaggttttagagtccatggactgctgcatgggccacagccccctgaaattgttgacaaaatttcatgtgtacatatatgtgcatttttttctgaggagagggtccaaggttttcgtcttattcacaaaggcacctgaactctgaagtaactgattctagatcaactaggaacccacaaacaataattgaggccaatatactgagagactcttgtatttttctgaattcaactcctggctctgaaataatggccctgcatccctcctggatgtcatttgaaaatgagctttgcttgtggcctgctgggtaaatgccactctttgtctgcagtacaacgtggccctgtcagagtgatgtatcacttggaaaccggggtggatgccagacctgtcgcaatattgtcacatcctgatgggatgttgcaacctcaccctgcaacctacagggagggagagtgaagtctccttgcatttcctgtgaatttgtcctctcggatttcagagaaacccaagtcaggtgcaggccctgctagtgacaatgccaggagagaaattcttaaccaggatgagaggtttcttgtttactgaggtcttattaaatccctctctccatcctgccatgacgtttcgagaaattgctgggaacactgagtcttgattagctgggtgataagatggttgaaagggcccatgaacgttgggaaatatagaattgtcagattgaaattatcttttctactaacaagagcattacagaagtgaacctgattcttggcaagaaaggcttgtgtgaaatctgttatgtgcaaagggagattatgtgccggccaccatttctggaaatgacatagaatcatggttatgagtaaagcttctggattcaaactgtttgtgttcatatcctggctccacattccagctgtgtgactctagtcaagtcatttgacccctctgtttctcagatcctccacagctgaaaactgtggatcatattagtacctgtgtcatagagttattgtgtgaattaaataaagtgattcatttaaagtgcttagtacagtgcctggtacatagtaagtgctcaataaacagtagcttttttttcttaaccaatttaattaggagctaatggctggcagttcatagcttttttgaataataggcttctcctgataattgaatggatgctgtgaaccctctcccttcatatatggtttcagtcagtccaggggcccttgaaggccacactgggtcagtggaccctagtttaggaagggcacatgaaagagatcagttttactggcccaatttcttaaaataattggcttgtatttagggactactttgtattaaaattggctgatttttgagtgtgagagtctttgtaagatctactttggtcctcccaatacacacacacacacacacacacacatatacacacacacactcacactcacacacacacggctagatcatttagttttctttctgagaagaatttttatttcccaggtccgcctccatcatctcctctttggtaatagtcgcagaggttgccataatgagtcatttgttaaactaatctgtgtttccatagtccactgtggccctctgtattgagcttgggccactcaatggcgcctttgtcaggctgattaaaatgtaactttgcatgccaaaaaagggcactcctctggcttaaaagtcatcttcctttgttataaatgtttacatttttctattatgctaaaaaaaaaaaaccacaaatttttcaatgatctaaatctttcaatggcttccatctttctcagagtcatgtccttaaaagtcccataagggattaatgatcagaacctcagctcctccctctctgcctcttacagcatgcatataccaaacacacatcaacctcagggcctttgcacttctatgttacacatggaaggctgttgcacaagctctctgcatgaccttttccctcatatcctttaggtcgtggaatcagagaggtctcctatgaccaccttgtatcaaattgcaaattattcccaagtccatacatctatctccatttcttaacctgcatcatttttctccatagcatttatcatctctgttttgtttggttcactagcacatactcaaaggtgccaggcatgcagtaggtgctcagtaaatattgtttaaatgagtggatgcatgaataaaaaagagaattataggaaataggtcaattaaacgcctctcatttttctccttagcagagtcacctgatatgaaaaaggagcaagacccccctgccaagtgccacaccaaaaagcacagtaagttggctggctttcagatggcctttggtccttcccatcacatcgggcacatctggaggccactagttttttggcaaatatcgcctctgtctgctgccttcatgtcttcatcccaaacagggtggagtgagaaaatagaggcatcacttgctagcaaagtaagccccctctgcagctgtttctcaaagtggagccccactggacatttcctccctgttctgtcatatgtgctctaaaactgagacacccagtgcctaagaactgcttgcaggcatggggttggcaatttccatctctcccagaagaaaagggtgggaagaggagcgagataagaagaaacagctgagatgtatcatcctttcttttgctaaatgttggcctcctacctttgtggagttaccattccaagaaatgactgttttttcttaagattcaacactgctctttgggagttgggtctccttcagtaataaaatcttatgaacatatacgaaatatcagagacatggaattgtgggtggaacacagaaagaaatcaagatggtataatctaggcctgtaatcccaccactttgggagactgaggtgggtggatcacttgagctcaggagttcaagaccagcttgggaaacatgacgagaccccatctctacaaaaaaatacaaaaattagctgggcatggtggcacgtgcctgtagtcccatctacttgggagactgaggcaggaggattgcttgagccagggaggtctaggctgtgatgaactgtaattgcaccactgtactccagcttgggccacagagtgatatcctgtctcagaaaaaaaaaaaaggtataatccagaaattatgaggaattagaatgtctttatctgctctttcacataatcccacaaaaccatattaatgcaacccctcgaaaggtgggtggggtgggggtggggcatcaaaaattcagtgggagtaaagttgaatttggttgataatcttattgcagtagtggcttcattttcaaattgggtcctccagtccctgcgtgaccacccctttccctaccaccctcatctattctgggagtaaacattctagacccttactgatttgcatttggctgaaacacagttgctgggtcaaagcaatttaattggttgagatactggataaaagtggttgagagttgctctctggggaagtaacaggttgaagtgaaccccaagcaatttgtggataataactagaagaaacttccccctggcttaggagacctaagacctattgcttagtcttggctatgtcactagttagctgtgtgatcctgatcaagtcacttaagttctctgtgcctcggtttcctgatttgtaaaataaaatattgtgctagtttattcttaaatacctttttaatgtccaacatctggtgattctgcgatccatcttccctgacaagtaggggagaaatgagtatctcctacttgcaggaagatgacctaactcaatgctctctgccctatctttgctgtgacttagatcattagtaacctgcctttctgcttttcatcagacccgagagggactcacttatgggaattcatccgcgacatcctcttgaacccagacaagaacccaggattaataaaatgggaagaccgatctgagggcgtcttcaggttcttgaaatcagaggcagtggctcagctatggggtaaaaagaagaacaacagcagcatgacctatgaaaagctcagccgagctatgaggtgaggagtttcatgtctctgaaaacaaaaaggctgtacgacccattatttacctagcaaccttcatcggatcagtcaccttatgcaatctcctttgttacagatattactacaaaagagaaattctggagcgtgtggatggacgaagactggtatataaatttgggaagaatgcccgaggatggagagaaaatgaaaactgaagctgccaatactttggacacaaaccaaaacacacaccaaataatcagaaacaaagaactcctggacgtaaatatttcaaagactacttttctctgatatttatgtaccatgaggggaacaagaaactacttctaacgggaagaagaaacactacggtcgattaaaaaaattattttgttacttcgaagtatgtcctatatggggaaaaaacgtacacagttttctgtgaaatatgatgctgtatgtggttgtgattttttttcacctctattgtgaattctttttcactgcaagagtaacaggatttgtagccttgtgcttcttgctaagagaaagaaaaacaaaatcagagggcattaaatgttttgtatgtgacatgatttagaaaaaggtgatgcatcctcctcacataagcatccatatggcttcgtcaagggaggtgaacattgttgctgagttaaattccagggtctcagatggttaggacaaagtggatggatgccgggaagtttaacctgagccttaggatccaatgagtggagaatggggacttccaaaacccaaggttggctataatctctgcataaccacatgacttggaatgcttaaatcagcaagaagaataatggtggggtctttatactcattcaggaatggtttatctgatgccagggctgtcttcctttctcccctttggatggttggtgaaatactttaattgccctgtctgctcacttctagctatttaagagagaacccagcttggttcttttttgctccaagtgcttaaaaataagttggaaaaaggagacggtggtgtggaaatggctgaagagtttgctcttgtatccctatagtccaaggtttctcaatctgcacaattgacatttttggccggagtgttctttgtggtgagggctttcctgtgcattgtaagatgttcagcagtatccactcatggtctctaaccacttgacaccagaaaccccccagctgtgataacgcaaaatgtctctagacatcaccaaatgttccctgggggtggcaaatttgcccttgattgagaaccaccagtttagctagtcaatatgaggatggtggtttattctcagaagaaaaagatatgtaaggtcttttagctccttagagtgaagcaaaagcaagacttcaacctcaacctatctttatgttttaaatgttagggacaataagttgaaatagctagaggagcttcttttcagaaccccagatgagagccaatgtcagataaagtaagcatagtaatgtagcaggaactacaatagaagacattttcactggaattacaaagcagaattaaaattatattgtagaaggaaacaccaagaaaagaatttccagggaaaatcctctttgcaggtattaattcttataattttttgtcttttggattatctgtttactgtctcatctgaactgatcccaggtgaacggtttattgcctagatttgtactcagaggaattttttttgttttgttttgtcttttaagaaaggaaagaaaggatgaaaaaaataaacagaaaactcagctcaggcacaattgtcaccaaggagttaaaagcttcttct

SEQ ID NO: 7294 - DNA, 7035 bp, Homo sapiens
tattatcagcagaatatattcattctttagaatagatcagtggtggtgtattcatacaatggactattccacagagatgaaaaatatatatgcaaaaacataaattgcataaaccatattgagcaaaagacagacgccaatactctatttacataaagtgttacatacacagagatagattaatacatgtaaatgatacagatatgatagctaggtcagtccacggggatctgtggacttctgaagagtcgtgatccgtgtgacttctgaagagatgagggggcatgggaggctttagcggagcttccgctattctggcaaggtttcatttttgcccggggagctatcagccagcggagagatctgtaagaagagataagacctcaagggaagtacgaggcagagccttccgcggcccgcgccctggcggccccaagtcagcggcggagacagcgcccaccccgctccagcgtggagcaggagcaacggcgtggcccgtggagccccgcctctcgcggcaaccacagagaagccggactgggccacgtctaggaagaggtaggaaaggatcggcgcatcatttctccaatgggaaaggatgtgtttgcggaccaataagtcgccagtataacacccgcccacgcgcctgccaagccaatcggctaggagcagcgagcggcgcggctgaggcgcggcggccccgtggagcagcgcagtatggcgggcggggcccgggaggtgctcacactgcagttgggacattttgccggtttcgtgggcgcgcactggtggaaccagcaggtgaggtcagccggcagctgcccccgaggagcccttcgggatctacagtcccgacgttcagccggcctgcctcgtcctctctgcttccccaggatgctgcgctgggccgagcgaccgattccaaggagcccccgggagagctgtgccccgacgtcctgtatcgtacgggccggacgctgcacggccaggagacctacacgccgcgactcatcctcatggatctgaagggtgaggtggtggcagagttagccgatgccccttatttcccttccgcgtgcctagtccttgcgctgccgttatcttcaagaccctcccaccttaccgagctccaggaccggagatgaggagctgagcacaacatgccaacactcgaggggcccacgacagttgctcaagagccatttcgggaataggctgctaggccctggagacagtgaggacttgaactgcagcactcctgtcagacccctggatgtggttccccccgcgtcccacagctaatgactaagctgggaaccgaaagatggaatctagattctcctaagccaaggtttttcccccaactagtgtatatcccagaaagcttggaagagccaagtgctggagagatggtgacagcaggttgtcaggtgatcagaggaaggttagctagaggggaagggtgcccaggctttgacctaacattgtctctgttatttctgtacaggtagtttgagctccctaaaagaggaaggtggactctacagggacaaacagttggatgctgcaatagcatggtgtgtaactgatgtatggataagggtggggatcgtgtatgtacgcagaacgctggataactctgatcagagtgcagtttctttgatcaatctccaaactctttcaggcaggggaagctcaccacacacaaagaggaactctatcccaagaacccttatctccaagactttctgagtgcagaggtgagggcctctgtcctgaactttttaacccggtgccacaacccgagggtctccataggggcaggtaaacggggattttaatcattttaagtgtcttagaatgatattttgggaaaaagcactccttttcctaaggactgcgactcggtgaacagaaaggaggctatgcggtgtggccagccaactcaaggaggacgaagcaacctttgcctctaaactgcctggaactaaatgtcgatttttctgacccctcccagggagtgctgagtagtgatggtgtctggagggtcaaatccattcccaatggcaaaggtgagacttctccagatactgatggatgggggcttgggtagagcagaaacatggagaaaggtacatttcctctgcttgtcttcaggttcctcaccactccccaccgctacaactccaaaaccacttatccctacagaggccagcatcagggtctggtcagacttcctcagagtccatctccatccccggagcatctgtatgattcagaagtacaaccacgatgggtatggggaccccagaggctttgaggcaagaaacatgggtccccaccaatgcaggatgaggctcttgaggccatcttccctgcccttccccaggacaagaggctgaggagttgagggaagagatgtaagtcttggatcatgtttacttgtggcagggaagcaggtcggctggaggcttttggccaaggggaaagtgtcctaaaggaacccaagtaccaggaagagctggaggacaggctgcatttctacgtggaggaatgtgactacttgcaggtagtggcgtggcaatgtgcactccagggtggaagctcttctcatcctgctaactatcttttgtcactcacccccgtccagggcttccagatcctgtgtgacctgcacgatggcttctctggggtaggcgcgaaggcggcagagctgctacaagatgaatattcagggcggggaataataacctggggcctgctacctggtccctaccatcgtggggtgagtggaacttagagaagtaaacagtcacacagtggggagggagaaatcagaatcccagtgggagagctgcttaatacaaactactctttcttcaccaggaggcccagagaaacatctatcgtctattaaacacagcttttggtctcgtgcacctgactgctcacagctctcttgtctgccccttgtccttgggtgggagcctgggcctgcgacccgagccacctgtcagcttcccttacctgcattatgatgtaagtctcggtgctcttgttctgactgcggcaggctacagggcctcctcatgctcccagtcagccgctgtctgttactggctctgttcttgaggcccgagcttgaactcagctgtgatgtggcctctcagatcacactgtcctatgcttgtccagcctggggtcaaacatacccctgattcgtcccctgggtctctctggtgttaatattctgcctccacacattcttttccaggcctgaggccaagtgcccatcttggtgtcttcttacaggccactctgcccttccactgcagtgccatcctggctacagccctggacacagtcactgttccttatcgcctgtgttcctctccagtttccatggttcatctggctgacatgctgagcttctgtgggaaaaaggtatgaagctttgtaaggggttgggtcagtgctgagaaaatgtcctataacgtgttctcttccatctctttaggtggtgacagcaggagcaatcatccctttccccttggctccaggccagtcccttcctgattccctgatgcagtttggaggagccaccccatggaccccactgtctgcatgtggggagccttctggaacacgttgctttgcccagtcagtggtgctgaggggtatagacagagcatgccacacaaggtgagagctgttggtccttaggagtccttgtcagatttttgtctcatatccatcttcccctaatttctctggggcattctaatgatactgttccctccccaccccttaaaaaggaaaaaaaaaagggctttgaatatcttgatccagctgatggcctgagaacataagaattctgtttcttattcatgcagccacagactaatggtggttttggctttgttctggcagccagctcaccccagggacacctccaccctctgcccttcatgcatgtaccactggggaagaaatcttggctcagtatttacaacagcagcagcctggagtcatgaggtcagtgtaacggttgctcctgcccttcttgccaaccgcaaccctcccttgacttcttacgcacttaatggctgttctctgcccccacagttcttcccatctgctgctgactccctgcagggtggctcctccttacccccacctcttctcaagctgcagtccaccgggtatggttctggatggttcccccaagggagcaggtatgtaggaggtgaagaaaactgagatttcaagtatgggagagtttttactatctccattcctggattaaaagtgctgaaaaagtccacagttaaacattcctttattcaccctatggctcccaagaaaagcattcttcctctggagtactggtgtactaaggggacaatacaccaaatttgttgagtttacaatcaagtctactaaggttggacttccttatcagtttggcagagtcccagggcagaataatcatccatctacaggtctctgtttcctctccctccacagcagtggagagcatcccagtgtttggggcactgtgttcctcttcgtccctgcaccagaccctggaagccttggccagagacctcaccaaactcgacttgcggcgctgggccagcttcatggatgctggagtggagcacgatgacgtagcagagctgctgcaggagctacaaagcctggcccagtgctaccagggtggtgacagcctcgtggactaaagttcccagtgtgggagaaaggagctagtttgcaataaaaacagctggatgcaggagcccagtgtcttcatgcagaggagctcaatgtcgcgggactagctacaccaacatatgcactttttacatttagaaacactgtgattagaccacagaacaataaatatgtgccatcagaccaaaaaaaagtagagaaaggagctgaactccactctcgatgctacttacagaggacatctgtaaagtcttcataaaagaccttgaatgatgcctaggatggcagagcccctgggtcctactccatcctccagcctttgtccttgtcctggcctcctgctctccagatctgtaaactgggctcaaggactgtacaagcagagtacaactacccgcctccccggtgccagggcgcctgttgggtttggtcctgtgtagatgattcccagagtctcattcatccagctcctcttcagacagaaggtccccatggtcagacagctggtctgcattgctggtactggttgcatcatcctcatcctcagagctggcttcacaggcagtgtggaagagctgcatgagttctcgaaaatggtgggaaacctaagaaaggaggagggctgtattcactgatccttagtaacatgttaacatttatgaagcactatatattgatttgcaaaatcttttgtttattccacacagcaaggttgagagagctatgtcactatagataaggaaactcaagaggctaaatgttttgcccaaagtcacacgactcctaaaaacaaaactagaatggccgggcacagtggctcacacctgtaatcccagcactttgggaggccgaggcaggtagatcacttgaggtcaggagttcgagaccagcctggccaacatggtgaagccctatctctactaaaaatagaaaaattggctgggtggtgggcacctgtaatcccagccactcgagaggctgaggcaggagaattgcttgaacctgggacgtggaggttgcagtgagccacgatcatgccactgcactccagcctgggcgacagagcaagactctggctcaaaaaaaaaaaaaaagctagaatggaaacgggcttccacctaaaaatgcagtgtcctttctcttctcctagaaccactaccaccctgatgagtcaagcctttccttagatcaaacctttacaaaaaccacttatcttggatatgaaaactccttctttggcctttctgtctcttagttggccaccttgacctctttttgccaggtcttcaccccaacccgcacctacctcagcaggggtcttatttcccagctgctgggagatgatgctgaaggtctgtggctgtgccccttgctcctggcacatggtgaggatcacacggtcagcttccctgtaacccaggtatcatgattaaccctagggagccacatggatgtggtctatgctcttttccaaacacacatcatccacccttacctaccttgtccacaggacaaccttttccccagtggagctgaccttgctgttattggcacacaccgtagcttctgtggcctttggctgctgttccccctctggacccttgccctgtgttccactgtctttagccaaaccccctctaggggctttgggagaagtctctgaggtgtcaattcctgatggagattcatggacagggcacgtcctgtctcttgtcttcaccctagctctgcttgagggcagccatctctcttgagtgtctggtttcccggacacatgtcttctccctgcatctctggtctttgaggaaacaggactcaggaaggaagcagggggttccacggtaccaggcaatttctcagtttctgatgcatcccagaccagcatcaaagcctctgactcactcactgccttttggccctccctctctttctgaagtctgggggatgccttggggcaggagcgaacctcaggcccaacctggtttctcttaacagtgtacagtacagctccagttgtggggggaaattgaggagtctctggtgaatgaggtggtgggccatccaggaggagccgttctgtaagagtcacttctcgaggggatggcaaagtgccccccactgccaatcctgcttaggaggaaaataaggatcccagggtactgtgaggatcaagatgcacctaagcacgagaaattacctgtggccaggtactgtgcaaaaattctaataaaaaagagtgctgggcatggtggctcacacctataacgtccgcactttgggaagccaaagtggtgggactgc

SEQ ID NO: 7295 - DNA, 6819 bp, Homo sapiens
tgatagctaagccagtccacaggttattagtcgtggtccacgtgacttctgaagagatgaaggggcatgggaggctttaggggagcttccgcttttctggcaaggttttctttttgcccggggagctatcagccagcggagagatctgtgagaagggataagacctcaagacaagtaggaagcagagccttccacggcccgcgccctggcggccccaagtcagcggcggagacggcgcccaccccgctccaacgtggagcaggagcaacggcgtggcccgtggagccccgcccctcacaggcaaccacagagaagccggactgggccacgtctaggaagaggtaggaagggatcggcgcatcgtttctccaatgggaaaggatgtgtttgcgggccaataagtagccgagaataacacccgcccacgcgcctgccaagccaatcggctaggagcagcgagcggcgcggctgaggcgcggcggccccgtggagcagcgcagtatggcgggcggggcccgggaggtgctcacactgcagttgggacattttgccggtttcgtgggcgcgcactggtggaaccagcaggtgaggtcagccggcagctgcccccgaggagcccttcgggatctacagtcccgacgttcagccggcctgcctcgtcctctctgcttccccaggatgctgcgctgggccgagcgaccgattccaaggagcccccgggagagctgtgccccgacgtcctgtatcgtacgggccggacgctgcacggccaggagacctacacgccgcgactcatcctcatggatctgaagggtgaggtggtggcagagttagccgatgccccttatttcccttccgcgtgcctagtccttgcgctgccgttatcttcaagaccctcccaccttaccgagctccaggaccggagatgaggagctgagcacaacatgccaacactcgaggggcccacgacagttgctcaagagccatttcgggaataggctgctaggccctggagacagtgaggacttgaactgcagcactcctgtcagacccctggatgtggttccccccgcgtcccacagctaatgactaagctgggaaccgaaagatggaatctagattctcctaagccaaggtttttcccccaactagtgtatatcccagaaagcttggaagagccaagtgctggagagatggtgacagcaggttgtcaggtgatcagaggaaggttagctagaggggaagggtgcccaggctttgacctaacattgtctctgttatttctgtacaggtagtttgagctccctaaaagaggaaggtggactctacagggacaaacagttggatgctgcaatagcatggtgtgtaactgatgtatggataagggtggggatcgtgtatgtacgcagaacgctggataactctgatcagagtgcagtttctttgatcaatctccaaactctttcaggcaggggaagctcaccacacacaaagaggaactctatcccaagaacccttatctccaagactttctgagtgcagaggtgagggcctctgtcctgaactttttaacccggtgccacaacccgagggtctccataggggcaggtaaacggggattttaatcattttaagtgtcttagaatgatattttgggaaaaagcactccttttcctaaggactgcgactcggtgaacagaaaggaggctatgcggtgtggccagccaactcaaggaggacgaagcaacctttgcctctaaactgcctggaactaaatgtcgatttttctgacccctcccagggagtgctgagtagtgatggtgtctggagggtcaaatccattcccaatggcaaaggtgagacttctccagatactgatggatgggggcttgggtagagcagaaacatggagaaaggtacatttcctctgcttgtcttcaggttcctcaccactccccaccgctacaactccaaaaccacttatccctacagaggccagcatcagggtctggtcagacttcctcagagtccatctccatccccggagcatctgtatgattcagaagtacaaccacgatgggtatggggaccccagaggctttgaggcaagaaacatgggtccccaccaatgcaggatgaggctcttgaggccatcttccctgcccttccccaggacaagaggctgaggagttgagggaagagatgtaagtcttggatcatgtttacttgtggcagggaagcaggtcggctggaggcttttggccaaggggaaagtgtcctaaaggaacccaagtaccaggaagagctggaggacaggctgcatttctacgtggaggaatgtgactacttgcaggtagtggcgtggcaatgtgcactccagggtggaagctcttctcatcctgctaactatcttttgtcactcacccccgtccagggcttccagatcctgtgtgacctgcacgatggcttctctggggtaggcgcgaaggcggcagagctgctacaagatgaatattcagggcggggaataataacctggggcctgctacctggtccctaccatcgtggggtgagtggaacttagagaagtaaacagtcacacagtggggagggagaaatcagaatcccagtgggagagctgcttaatacaaactactctttcttcaccaggaggcccagagaaacatctatcgtctattaaacacagcttttggtctcgtgcacctgactgctcacagctctcttgtctgccccttgtccttgggtgggagcctgggcctgcgacccgagccacctgtcagcttcccttacctgcattatgatgtaagtctcggtgctcttgttctgactgcggcaggctacagggcctcctcatgctcccagtcagccgctgtctgttactggctctgttcttgaggcccgagcttgaactcagctgtgatgtggcctctcagatcacactgtcctatgcttgtccagcctggggtcaaacatacccctgattcgtcccctgggtctctctggtgttaatattctgcctccacacattcttttccaggcctgaggccaagtgcccatcttggtgtcttcttacaggccactctgcccttccactgcagtgccatcctggctacagccctggacacagtcactgttccttatcgcctgtgttcctctccagtttccatggttcatctggctgacatgctgagcttctgtgggaaaaaggtatgaagctttgtaaggggttgggtcagtgctgagaaaatgtcctataacgtgttctcttccatctctttaggtggtgacagcaggagcaatcatccctttccccttggctccaggccagtcccttcctgattccctgatgcagtttggaggagccaccccatggaccccactgtctgcatgtggggagccttctggaacacgttgctttgcccagtcagtggtgctgaggggtatagacagagcatgccacacaaggtgagagctgttggtccttaggagtccttgtcagatttttgtctcatatccatcttcccctaatttctctggggcattctaatgatactgttccctccccaccccttaaaaaggaaaaaaaaaagggctttgaatatcttgatccagctgatggcctgagaacataagaattctgtttcttattcatgcagccacagactaatggtggttttggctttgttctggcagccagctcaccccagggacacctccaccctctgcccttcatgcatgtaccactggggaagaaatcttggctcagtatttacaacagcagcagcctggagtcatgaggtcagtgtaacggttgctcctgcccttcttgccaaccgcaaccctcccttgacttcttacgcacttaatggctgttctctgcccccacagttcttcccatctgctgctgactccctgcagggtggctcctccttacccccacctcttctcaagctgcagtccaccgggtatggttctggatggttcccccaagggagcaggtatgtaggaggtgaagaaaactgagatttcaagtatgggagagtttttactatctccattcctggattaaaagtgctgaaaaagtccacagttaaacattcctttattcaccctatggctcccaagaaaagcattcttcctctggagtactggtgtactaaggggacaatacaccaaatttgttgagtttacaatcaagtctactaaggttggacttccttatcagtttggcagagtcccagggcagaataatcatccatctacaggtctctgtttcctctccctccacagcagtggagagcatcccagtgtttggggcactgtgttcctcttcgtccctgcaccagaccctggaagccttggccagagacctcaccaaactcgacttgcggcgctgggccagcttcatggatgctggagtggagcacgatgacgtagcagagctgctgcaggagctacaaagcctggcccagtgctaccagggtggtgacagcctcgtggactaaagttcccagtgtgggagaaaggagctagtttgcaataaaaacagctggatgcaggagcccagtgtcttcatgcagaggagctcaatgtcgcgggactagctacaccaacatatgcactttttacatttagaaacactgtgattagaccacagaacaataaatatgtgccatcagaccaaaaaaaagtagagaaaggagctgaactccactctcgatgctacttacagaggacatctgtaaagtcttcataaaagaccttgaatgatgcctaggatggcagagcccctgggtcctactccatcctccagcctttgtccttgtcctggcctcctgctctccagatctgtaaactgggctcaaggactgtacaagcagagtacaactacccgcctccccggtgccagggcgcctgttgggtttggtcctgtgtagatgattcccagagtctcattcatccagctcctcttcagacagaaggtccccatggtcagacagctggtctgcattgctggtactggttgcatcatcctcatcctcagagctggcttcacaggcagtgtggaagagctgcatgagttctcgaaaatggtgggaaacctaagaaaggaggagggctgtattcactgatccttagtaacatgttaacatttatgaagcactatatattgatttgcaaaatcttttgtttattccacacagcaaggttgagagagctatgtcactatagataaggaaactcaagaggctaaatgttttgcccaaagtcacacgactcctaaaaacaaaactagaatggccgggcacagtggctcacacctgtaatcccagcactttgggaggccgaggcaggtagatcacttgaggtcaggagttcgagaccagcctggccaacatggtgaagccctatctctactaaaaatagaaaaattggctgggtggtgggcacctgtaatcccagccactcgagaggctgaggcaggagaattgcttgaacctgggacgtggaggttgcagtgagccacgatcatgccactgcactccagcctgggcgacagagcaagactctggctcaaaaaaaaaaaaaaagctagaatggaaacgggcttccacctaaaaatgcagtgtcctttctcttctcctagaaccactaccaccctgatgagtcaagcctttccttagatcaaacctttacaaaaaccacttatcttggatatgaaaactccttctttggcctttctgtctcttagttggccaccttgacctctttttgccaggtcttcaccccaacccgcacctacctcagcaggggtcttatttcccagctgctgggagatgatgctgaaggtctgtggctgtgccccttgctcctggcacatggtgaggatcacacggtcagcttccctgtaacccaggtatcatgattaaccctagggagccacatggatgtggtctatgctcttttccaaacacacatcatccacccttacctaccttgtccacaggacaaccttttccccagtggagctgaccttgctgttattggcacacaccgtagcttctgtggcctttggctgctgttccccctctggacccttgccctgtgttccactgtctttagccaaaccccctctaggggctttgggagaagtctctgaggtgtcaattcctgatggagattcatggacagggcacgtcctgtctcttgtcttcaccctagctctgcttgagggcagccatctctcttgagtgtctggtttcccggacacatgtcttctccctgcatctctggtctttgaggaaacaggactcaggaaggaagcagggggttccacggtaccaggcaatttctcagtttctgatgcatcccagaccagcatcaaagcctctgactcactcactgccttttggccctccctctctttctgaagtctgggggatgccttggggcaggagcgaacctcaggcccaacctggtttctcttaacagtgtacagtacagctccagttgtggggggaaattgaggagtctctggtgaatgaggtggtgggccatccaggaggagccgttctgtaagagtcacttctcgaggggatggcaaagtgccccccactgccaatcctgcttaggaggaaaataaggatcccagggtactgtgaggatcaagatgcacctaagcacgagaaattacctgtggccaggtactgtgcaaaaattctaataaaaaagagtgctgggcatggtggctcacacctataacgtccgcactttgggaagccaaagtggtgggactgc

SEQ ID NO: 7296 - DNA, 366 bp, Homo sapiens
acagtagcgtgatctcaggtcatggcaacctccgcctccggggttcaagggattctcctgcctcagcctcccaagtaggtgggattataggtgcccaccaccgggcccagctatttttttttttttttgtatttttaatagagatggggtttcaccatgttggccaggctggtcttgaattcctgacctcaggtgatccacccacctcggcctcccaaagtgttgggattacaggcgtgagccactgcgcccggccacacactcttaattctgcaagaggagtgaggccataggatagaaaaagcctgaacaggagaagggcttcttatgggtccatcagtgaaagaggtggtatgtccatccctg

SEQ ID NO: 7297 - DNA, 322 bp, Homo sapiens
atatatatatatatttttgtttttttttttttttgagacagagtctcgctctgtcgcccaggatggagtgcattggcgtgatctcggctcactgcaagctccgcctcccgggttcacgccattcgcctgcctcagcctcccgagtagctgggactacaggcgcccgccaccacgcccagctaatttttttttgtatttttagtagagatggggtttcaccgtgttagccaggatggtctcgatctcttgacctcgtgatctgcccgcctcagcctcccaaagtgctgggattacaggcgtgaaccaccgcgcccagcctatt

SEQ ID NO: 7298 - DNA, 1074 bp, Homo sapiens
cacctgggcttcttgttacctttgtctctggtgtggaggaggagagatggcatccagtggacagaggagttcatttttcagggatgacttggttggtctgccttcctgggccagcgtgcaggcaaccccactggggccagagcatcctctccgtgagttctcatagcttggatctaaccctggtcatgttggatttccattcctcctggccttaagttttttttttcttgtttgtttggtttttttttttggagatgaagtgcagtgcagtggcacaatctcagctcactgcaacctccgcctccagggttcaagcgattctcctgcctcagcctcccgagtagctggtattacagacgcctgccaccgcacccagctaatttttgtttttgttttgttttgtttttttaaattttattagaagtgaggtttcaccatgttggcctggctggtcttgaactcctgacctcaagtgatccacccacctcagcctcccaatgaaggtgttttttgaccattcttataccttctcttctgtctcagggcatccctcccccattcagagaccaccatcaagggtcaagggtataactagtcctgattcccaagcaaggggccaaaggtgtcagccaggtagatcatgcttttcctttttgcacctgttgggtcttcaaattctttctttggtaatccccattgttttctgtgagctggtccttttcctaccatgcccaggttgaactctccatctgcctgcccagcttgctggaaaggggcatgtgtttatggtccctgtcccatcaggagctccagcctgttggcaatttctctcctgatcctgcgttggcgtcctcagggctttgctccccggggtcccctgagtggccttctgtctctccgtggtttggatgcagtgcccacgagcttgcctgagtgcacaggtatccctctcgctctcatggagcagcttgcagggggctctgtgaactggtccctgtgcctacttttggggatcctgtgataagcagtgtcttcctgagtgcccccttctcactgtggacatcagaggcccca

SEQ ID NO: 7299 - DNA, 556 bp, Homo sapiens
gggtcatagaaagtagctaggaagttagccttcaaaaacctgggaaaaggaactagattttatactctccacctctgagaaacacagggccattgagcctttctctttttgccctgaatcagaggaaatagcattctggtgcttggggaaggaggaggggaaagaaaccaccttaccctgtaccatggggataaggatatcttgctgggctgctgagtggtgtaatgtatatcaagagattggccttttctagacatttaatctgtgatcagagtcttaaggttgtactttgattttccaaggaatgtaagtacgtcattgaggttagggtcgtttaagaagcccacctgctctcctatttctggatgtttagaaaataagatagacttttagatattcttgcagatgctaaggagatgaaactttttgagtttctttttctttctctatttctagaatttattcccttgtttttttccttcaaaattattttatcaccccctccccccatttttttagtgcttgttttagatcttggagtcaggaagtttctgaa

SEQ ID NO: 7300 - DNA, 2230 bp, Homo sapiens
agagaaagcaccctctcaacagtgcaacatcttttaaagccacctataatgaaagaataggtacaatggggacagtgtggcaaaaataaaatcacttcccaaagattttcagtcagaaagctgaaaaatcatttttcctaccttttgtgtatttgcctgccagagaattctgttctgccttccacctcacagatgtgctccagatccacagaaaagttggtccataggagaaaaatggcaattgaattttatgtatttgctttctttgttttgatagaaataattccctcctccttgtctgcatatctcatgactcctgccttcccaaatacataggttcacattctcaatatgaaatcttataaactacatattttacagcagccacctcagcagagaagtgctcctgacatctctttcaccatcgatgcgaataagcagcaaaggcagctgattgctgagctagaaaacaagaacaggtgagactttgtagacgtgctggcttgtttgatcaatgtgcgcattccttaataaactatggtcgtgctttaaagtttcagggctttacaccctgtatggctactcaagggaagacatctacactcagtgatgctcacttccaaaaagctggtctttagatctttagaacttcagaagctccatgagaaaacggcgtgtgcatgtatgtgtatagttctgagatatcaatgcaattaatgttgcccctctagacggtctcacttccctttttctgagatacttaattttgttcaagagcttctagtacaggaggaccctcctgggtactaggtagaaggtgtctctaccacccagaaacaggtaggaggctcaccagagaggccccctggaaggaccctgagctaaagaggcatctggagagacaccaccatcacccagttactctccaaacatccaaagatctccacctgcagcccatcagcaggttcttcctctattcaacacagattgactcacagtctacctccacagcatacaccccaaaaattgtccagctcatctccaccaccacccagttcagcctgtccttttcaaaaacatcaatcttatgttattccaggtttaaaccctctaatgtgttcccatcacacttcagttaaatcctactcctcttaccatcacctgcaaggtcttacctgacctgattccctcctgccattccagcctcagctcaccttgctcagcacactcccacctcccatgtgttcctcctgtctacagcctttgaattagtcattccctcagcctagaaagctcttcctccaggtctctgtgtggatggctccttctcatcactggggtctcagctcaaatatcatctcctaaaagaccacctgtctgatcctacctaattgcccctagcccagaaactagtctcaattacatacccctgtgtgtgtgttgggggcaggaggttgtcacttatcactatctgaaataatcatgtgtgtttgtttcttcgtttattgtctgtcttcctggactgaaacggaagttctttgagaacagaggccatggctaaatggtccctggagcccagaaccaggcctggcaattgtagaagctcagtagatatacattgagtgagaaaacgatgaatagctgagttaaatctcaaacttggttctgaggaaacccaacatggaacaacttgtactaggtcggtgcaaatgtaattgtggtttttgccattatttttaattacttttaatggcaaaaaaacgcaattacgtttgcaccaacctaacacattctagtaatatatttcttgaaacagcaccaaaacatttccatgcttaaccccattcttaaacactgatgtgacatttgaggtcaaactggaggagtaaaggaggaggttgtgataattatttcatgcctgtaaaatttgacctgagaatttggggataaatgatcaaagtattctttaaagttctcaagaaagaataaaaaggagggtgcaaactctggttggcactttttcatatttttttctagtaaggaaagcttttggcttagttgtcttgagacctggctgccatcattaggaaaccacaaattaggatagaaatagcttcataaatgtgacaccatgactccatcgcctttgaaactactgctctactctgacccccagggagatgtgctcacatcagagctggaataaaaaaatttaaaaataaaattaaaa

SEQ ID NO: 7301 - DNA, 2230 bp, Homo sapiens
agagaaagcaccctctcaacagtgcaacatcttttaaagccacctataatgaaagaataggtacaatggggacagtgtggcaaaaataaaatcacttcccaaagattttcagtcagaaagctgaaaaatcatttttcctaccttttgtgtatttgcctgccagagaattctgttctgccttccacctcacagatgtgctccagatccacagaaaagttggtccataggagaaaaatggcaattgaattttatgtatttgctttctttgttttgatagaaataattccctcctccttgtctgcatatctcatgactcctgccttcccaaatacataggttcacattctcaatatgaaatcttataaactacatattttacagcagccacctcagcagagaagtgctcctgacatctctttcaccatcgatgcgaataagcagcaaaggcagctgattgctgagctagaaaacaagaacaggtgagactttgtagacgtgctggcttgtttgatcaatgtgcgcattccttaataaactatggtcgtgctttaaagtttcagggctttacaccctgtatggctactcaagggaagacatctacactcagtgatgctcacttccaaaaagctggtctttagatctttagaacttcagaagctccatgagaaaacggcgtgtgcatgtatgtgtatagttctgagatgtcaatgcaattaatgttgcccctctagacggtctcacttccctttttctgagatacttaattttgttcaagagcttctagtacaggaggaccctcctgggtactaggtagaaggtgtctctaccacccagaaacaggtaggaggctcaccagagaggccccctggaaggaccctgagctaaagaggcatctggagagacaccaccatcacccagttactctccaaacatccaaagatctccacctgcagcccatcagcaggttcttcctctattcaacacagattgactcacagtctacctccacagcatacaccccaaaaattgtccagctcatctccaccaccacccagttcagcctgtccttttcaaaaacatcaatcttatgttattccaggtttaaaccctctaatgtgttcccatcacacttcagttaaatcctactcctcttaccatcacctgcaaggtcttacctgacctgattccctcctgccattccagcctcagctcaccttgctcagcacactcccacctcccatgtgttcctcctgtctacagcctttgaactagtcattccctcagcctagaaagctcttcctccaggtctctgtgtggatggctccttctcatcactggggtctcagctcaaatatcatctcctaaaagaccacctgtctgatcctacctaattgcccctagcccagaaactagtctcaattacatacccctgtgtgtgtgttgggggcaggaggttgtcacttatcactatctgaaataatcatgtgtgtttgtttcttcgtttattgtctgtcttcctggactgaaacggaagttctttgagaacagaggccatggctaaatggtccctggagcccagaaccaggcctggcaattgtagaagctcagtagatatacattgagtgagaaaacgatgaatagctgagttaaatctcaaacttggttctgaggaaacccaacatggaacaacttgtactaggtcggtgcaaatgtaattgtggtttttgccattatttttaattacttttaatggcaaaaaaacgcaattacgtttgcaccaacctaacacattctagtaatatatttcttgaaacagcaccaaaacatttccatgcttaaccccattcttaaacactgatgtgacatttgaggtcaaactggaggagtaaaggaggaggttgtgataattatttcatgcctgtaaaatttgacctgagaatttggggataaatgatcaaagtattctttaaagttctcaagaaagaataaaaaggagggtgcaaactctggttggcactttttcatatttttttctagtaaggaaagcttttggcttagttgtcttgagacctggctgccatcattaggaaaccacaaattaggatagaaatagcttcataaatgtgacaccatgactccatcgcctttgaaactactgctctactctgacccccagggagatgtgctcacatcagagctggaataaaaaaatttaaaaataaaattaaaa

SEQ ID NO: 7302 - DNA, 190 bp, Homo sapiens
taaacatacacaaacagatatatatatatggcatatgattaatgatatctatgtttatatgagaatggagaaagctgtgactgcatgtataccagtcgttaaagctgattgcatttctgaaaatgaggagctggagtggtgagaaagtagaaggaaatcaaagaatatacatgaatatgtgaattcatca

SEQ ID NO: 7303 - DNA, 190 bp, Homo sapiens
taaacatacacaaacagatatatatatatggcatatgattaatgatatctatgtttatatgagaatggagaaagctgtgactgcatgtataccagtcgttaaagctgattgcatttctgaaaatgatgagctggagtggtgagaaagtagaaggaaatcaaagaatatacatgaatatgtgaattcatca

SEQ ID NO: 7304 - DNA, 5366 bp, Homo sapiens
cttaatagtcaaattctatatatggtgtcttcctttggaacaccttaccatgggctatttggtcagctccattgactccttgccttgggaattttagtgcagtgagagttgtgctcacttctccttcacttcagggcctgatgtgtcaggaaatggagttttctgaattaacatgaaagttgagttgcagattgcttggttaaaaaacaacaggtggggcacagagtctcatacctatgattgcagcacttcgggaggtgggaggattgcttgaggtcaggagtttgagaccgacctggccaacatagtgagacccccatctctattattttgaaaaacaacagcaaattttttcttaacatccaagacaaggccaccagtcaaaactatcaagttttagtagtattttcctgcttgattatataatagcctggcttagagatacaacctttaaataaggaatcttaagatgatgtgcagctgttctttgccttatttgtttgtttgttggttagtttgtagtttctaagaatctgctctgttcagctgtacagttccttcttctggagttaacctgtggcaaggattatgtttcacctgtcacaaaaatgagatctgtgccttcctctattataaagttagggcatgtgattcattcttcgaaatacttcaaaatgtactttggtatgtttttgtcttgaaaagaggttttctagctagaaattcggggcccagaaggtcaaggctccagagatccccttctcatcatccttcagttgtctgaggagacagaggatcacatgtgtcacagtgagtgctgattccccagaatctgcagtcttaagctcccctgctgacgcacacagccagttctctgcttcatattcatgtgacccactgtgaagtgacaggcagctgccaattctgtcatataagaagcagctctgcccatgcaactttgaaagttcctgcacttctccatagactgctccttcatggaaataaacacatcatcacactgtgggtgcctaagctaagtttgtttgcagtttgatgatgcccagctccttttcaactcagccttaattggcactttaagggccaggatgaggtttctctcaggccaagtcgagatttccagatttccttttgtccaaggctgaccagtttagaagttattcacatccttgttttagttctttccttcttgtcctggtacctcttcctttccaggattatttgcagagtctgtgatggcttacttggtgaccagacatggggtgagctactggtatagtctgattactttggcatctattctgaactggtcattggctgtacatgagtttttgtgctggtaaaggaatatactgggaagattggaaggcacagactgggaactaattctgagaagagaactgctgagttactgaaagaccttttggaccacccctaaatggagcatcttgatagatggcaaatccagtgtttcttaaacttgtccatgctgcccagagcccactgccttttatcagatgtgagacttcactgccacagtgtcatcccacagtttccttccctggacatttgataaagggaaaatcatttcttgtcctttaaggcagggactattattttttcacttttccacataccccacaacacctaacattgatttactcgtagtaggagtttcatactgttgaactctctaaaggccatttgttccagggcctagctgggcttgtgaaggacaacagagtcatttcctaaggaccccaaaagacagcatgaaggaaaaaataataataaactgctgttcacagtgccttgagtgtaccaccgtactttctgctatgccttgtccattccaatctggacagtctctgtgcccctcctttccactcaagtgttatccagcactcaagttctggctcaaggcccaacatctccgtggggacctcagccatcccagggcattgtgaccccttcctctaagtccccggcacactcgctgattggtaccctctcattcgacaaagcatatgccattgtggcttacttgtcatttctttaggtcttgccttcccaagtagatcatgagccactataagaactagctcccatagtcccagcccctgggcctggtacatggcaatgcttagtgattggtgattgaggataatggtggtaaaggatgtaccagacagtcatctcctgaagagatgccgaacaacctgtccttgttttatgtattttctctttctttcctgtccagttttattcctctcatagtaactgctaaaaaaatatcagttcctgtcactcttccaccccttttctccctctcccctgcattgtggtctgggccttggtccactagcaactccccttaggtgttgcttaatctgcctcatggccaaagccaatcccattcctgtcccccgctacccaagggactcccagtctgtatgcacaaggcgggatgtgaagtctggatgtgcaagaaacccagctgtaagaaacagcttccctcggcttggcatggtggctcatgcctatattcccagcactttgagaggtcaaagtgggagaatcacttgagcccaggagttcaggactagcctgggcaacatagcaagatcccacctctacaaaaaaagaaaaaattcagagtctcaaatgtcccttcatctccttactctcgacctgtctccctagttctctgccgccttttcctctcccctggatctgacactcaattgtctgcatgcacttttcaactgaaagagactccaatgccatccttctgatgaaatttttgctttggatactactgcagaaaaaatgctatcttgtattctggtccatggtggggaagaccctgtcgtagaacctggcaactcaagtggagggaggggccagaacattgttcttatgctatttacagtgagacaacaggattgatgcagaactttctttttttttttttttttttgagacagagtttcattcttgttgcccagggctggagtgcagtggcatgatctcagctcactgcaacctccaccccccaggttcaagcagttcttcctcagcctccggagtagctgggattacaggcgtgcgccaccacgccccactaatttttgtatttttggtagagacggggtttcaccagtgttggccaggctggtctcgaactcctgacctcaggtgatccacccacctcggcctcccaaagtgctgggattacaggcatgaaccaccgtgcccggccgtgatgcgcaactttctaataacatacttttgaaagtgcccagacatacatccctcctctggtaccacagtggccatcagttgccagagaacatgaaattatccagccctcagctctgcagcaggattctgaggagtaaagcaggcctgtaaagtactctaaagtacttcagagaggtaatgccacaaagcgaagaacacctcttggaggcagagcccctcagccctatccaggccagcagtgtccacttgaaatctgaaagcagcctccctcaccaaaccagcaagatggaaaacctccctgggttggcaagtggccctgggaagtacatgccccatctctgtcaggatagcagtggagaggtttcgtgccagtgccagctccacccacccagatggtactcaagactccaagcctgtcaatggggtggaaactttctggcattttctgtcagaagggtgagttagcactgaaccatctcatgtgtcttttcactgagtaacagcccatatccattccatgaaatgagtgactgctttgttgaatcagatagtaacaaacatttatttgtagtctggttgtgtcatatcatggttgaattgcaaacaggttggatagaagagtcagcaaaaatcaacaaaagcattctgtaaaaaacttttctagaattacaataaatggcattgtatattttatttataaattatgtgctgcacatcatttttatcaatgaaatttataataaatttctgtacatatatacatttttatcccagagagccagttgttaagcatttaccagcaataaatgctttttgtttcctgcttacacaggttctgggagtggccagcccactctttgagatgtccccacttgcttttttagttgtccaagtagtgttctgcccagccttcccgactctctttcttatccttccctcgaaactattctgttccttatgcttaaatactttccagtcatgggagctttgctgtaggcccttggcctttcatgggtagcttctgatacgtgcatgggtgttaatagaggaagttgaccccgcctgggaagaataatgacctatggagacctggccctttctcttatggcttcttaaagtgacagctgttatgggaagttcaggcatcttgacgtggaaaatacattgttcattttcttttaattttttttcccctaaccactataccaacagggatggaaagatacttttagttggaaggaatttggagcccttaaacgacacctggagcagctgcctgtgggtggggctttgcacagtctcatcctggcaagggaggacgagccaaggaccagttttgcagaattgtcatcatgaggccctggttgtgtgctgggctggggcattgcccctttccaggaggccaggccaagcagggctgcctggcttaggcttttgcatcttcagcatcctttcacgtctcttatctcaggtgaccttcacagcaagcctggtgaaggttattgagaagcagatgtcaccacctagtcttagagctgatgaaagcaggatgtggggaagtccagaccctctcctgaaaccccttggccacctgagctagtaccagagcaaggtcccacttggccgtgagtgctgtctctagggcctatttcaggaactgtctcatatataagaacagaacactttttgccagctataccaaatgtttttgggattaaaaaaatagtttctcttttccaaattaggtggtaagaaaaggaagggcattttcattctcacattctttgaatgttgaaacgttttaaaaacttccagctgggcttggtggctcatacctgtaaccccagcactatgggaggctgagatgggaggatcccttgaggccaggagttcaggaccagcctgggcaacatagtaaaactgcccaaaatttgaaaattagccttgtgtggtggtgtgcactgtagtcccagctgctcgggaggctggggcaggaggattgcttgagcccaggagtttgaggctgcagtgagctatggttgtaccactgtactccaacctgggcaacagcgtgataccctgtc

SEQ ID NO: 7305 - DNA, 442 bp, Homo sapiens
ctcaaactcctgaccttgtgatctgcccacctcagcctcctgaagtgctgggattacaggcatgagcctggttgagacatggttatttcatcgcaatatcttggggaacccatgaatgctctgaaatgcctttggtttagaaatggatgaaggagaggccatggaaatatttagaccttttggagagatcgaaaggacaggtgatttatctccaagttcacctcgagacatgacttgggctgtcaaatgttcttacggtagcctggcaacatgtctttctcagcctggtctgtacagtgtggaggaagtaagggactttattaagagtgtcacaatagctataacctgccagtcaggtgatctgtttttccttggccatctctccgtctgctcaccactcttttttccctagtacacgaatatctttaacattcaaaaatat

SEQ ID NO: 7306 - DNA, 153 bp, Homo sapiens; identical to SEQ ID NO: 5246

SEQ ID NO: 7307 - DNA, 142 bp, Homo sapiens; identical to SEQ ID NO: 5251

SEQ ID NO: 7308 - DNA, 14626 bp, Homo sapiens
actgtgatcatcaaaatagaactgtgcagtacttaaaatgtaagaatctgcaaaaacaaaactacagaacaaattccgaaggtgacctgagaagaccaaatggataagctaatacatccaggtgtctccgattatattatgataaagtgtagggaggttgaacgttacataaataccactggatatttttctttgttagatgtggccccatggtattggatgctttaatcaagattaagaatgaagttgactctactttgaccttccgaagatcatgcagagaaggtgagcatttcattcctgttgggctccagatacttgtggtcttccaaagaggcttgggctggccaaagctgatagagacatctggaaaacagctgcagctctctgctgggtgaacttgctgtgcaacctaattccttttcttgggtaaatgcatccaaaattctaaccatggtgcaagttctggtttctgagtttactttccttcaggagcattctatcctgtggttactgcatctggcggtccctgtgagctgctccacgcttcaaggcctagctaggacctgctggctggcaccttccatgctgctgagctcttttattaagggagcagtggagagtttctgtctggcacttatgcttgtccagcaggggagatgtgtgagtctccctcagctcccagcatgacatgtccttggtagctgtgttctggattggctggtacagtgtctccctcagcatgtggttacttgtgctgctggtgccacatgagcccatttgaggcagtgtgcagactaacattttctacatgaatagcaatgtattcattttctgtattagaaaaatataattactgccgggtgcggtggctcacacctgtaatcccagcactttgggaggccgaggcgggtggatcagctggcgtcaggagttcgagatcaacctggccaacatggtgaaaccttgtctctactaaaaatacaaaaattagccgggcgtgatagcggacgcctgtaatcctggctactcgggaggctgaggcaggaacccgggaggtggagtttgcagtgagccaagatcacgccactgcactccagcctgggcaatagagcgagacagtctcaaaaaaaaaaaaaagaaaaatataattactaatgatggtataatagggatataagtggttttttaatgtgaatttaagcaaaacaagttaaagaaaacccaagagatactttaaagaaagttgattcaggtggttctcaggtatagcaaaaattgcacagggtgcagtgaagaccgactggcctgatgtccgtggagccagactgtgtgcccggctctgttctgtgcactggacatgaggtagatgactgtgcttattatctaccttcaatttaaaggtgaggcccagagagggtaatggacttccacaaggacacatagagagtgacttgagagccgggagtcagccaaagctgtcagactccagactccagatctgctctctcaggcactgacttggcttggaacacctgggataaaacaaaagcagagagtagcttgattctgtgaggacactgagcttttttctaagaaaaccttaaaaaaaaaggaaaagccagtattgataccggcccatggctttttatctgttcagctgtacatttcaagcatttcaagtcttttaagacatctgttttgattcagctaatcttatttagcgttgcaaatgctgatggatattatgatagttcggctgagtcctgctgttcagggaacattctgcggcagttaaacagcagccttccccattaagtcctggcaacacaggaaaggtagatgcttttcagtaacctttccctgtaggactctttcagaaccaagaacataaggtgtgacccatctggactaaaaaaaataaagcagaattgtatcaattgctactcctttttattcccatcttgtttttcttattttttttttaattcccatcttgtaagagaattcccagggagcctttttgagagaaagttcattggatttatttttttaatttttatgccatttcttgtaaaagcaaactgctctagttggatgccaggtatacataaatgtattgataatatccagtctcttggggaactctaggagtatttgcttaagacacatctttgggttcccttacactctttctaagatttacaggagaaggagagtcttactgtcttttctagtcttatgaaagtgataaccgactgggcgcagtggctcacgcctgtgatcccagtactttgggaggtctaggtggtaggctagcttgaggctaggagtttaagaccagcctgggaaacatagactccctttccattaaaaaaaaaaaaaaaaaaggtgaggccaggcattcagaggccgaggcgggcagatcacaaggtcagagttcgagaccagcctgaccaacgtggtaaaaccccgtctctactaaaaatacaaaaattagccaggtgtggtggcgggcgtctataatcccagctactcaggaggctgaggcaggagaatcacttgaacccgggaggcagaggttgcagtaagccgagatcgtgccactgcactccagcctgggcgacagagcaagactccatctaaaaaaaaaaaaagatgataaccagtgcaactttctcaagcaatcaggtttctctgacctaatgatcttcaaaaaacagcttcagaggactggcactagaggtttagagtacataatcatttttaaattccaaaacacccaggaaatttccatatacaggaagtaggtccaggctaagaaaattctcatgtcggggtcctgggtcagcacgttttttgtttagtttgctttgctttgcctcagtttcatattagttcattcttctcctctttggaaagtccatgctgagtcagcttttgtggatttcatagccccagggtactatgctgcgtattttatgaagacaatagaagaagccttacctctgtcaagtgtagtggctcaggcctgtaatcccaacacagtgggaggcaaaggcagaaggattacttgaggccgtgagttagagaccagcctgggcaatatagtgagacacctgctctacaaaaaacaattatttttttcttttttttgagatggaatcttgctctgtcacccaggctggagtgcagtggcgcgatctctgctcactgcaaccttctcctcctcagttcaaatgattctcccgcctcaccctcctgagtagctgggattacaggcacccaccacgacttatatttttagtagagacagggggttaccatgttggccaaactggtctcgaactcctgacctcaagtgatctgcccacctcagcctcccaaagtgctgggattccaggtgtgagccacttcacccaacctacaaagaatttttttgaattcgccgcacatggcggcatgtgcctgtagtcccaactactcaggaggctgtggtgggaggatcgcttgagcccagaagtttgaggctaaagtgagctacagtgagctatgactccaccactgtacttcagcctgggtgacacagcaagactcagccaagaaaaaaaaagaagaagagctatctcttaataatctgtatccaggtcacttcaaccttaagatgaccaagacaatgttgatttactttacttttgggtattgtgtctgttagatttgtgttcaaataacagtggctttaaaaaatctaggtttccaggcgtgagccaccacacccacccctactcaggaggctgaggcaggagaatcacttgaactggggaggcggaggttgcagtgagccaagatcgcggcattgcactccagcctgggcaacaagagcaaaactccttctcaaagaaaaaaaaaaaaaataggcttgacgggtgtgtggtggcccagacctgtaatcccagtgcttcgggaggccaaggcaggcagattacttgagcccagcagttcaagcccagcctgggcaacataacaaaaccctgtctctgcaagtctcgtctctacaaaaaataccagaaaattagctgggtgtggtgggctacttctgtagtcccagctacttaggaggctgaggtgggaggatcacttgagctcaggcattgaggactgcagtgagctgtgattgcaccactgcactccagcctgggtgacagagtgagaccctttctttaaaaaaaaaaaaaaaaaaaaaaaaaaaaacaggctgatttttcttcaaaacacgtgacacatggagctagaactgctgtggaaactccatggtgccagcagcgcccaggcctctggcctcctccagtgccatacttggcatgtggcttctaacctcaaggttgccacatggtcatagagtagtttttggaactcaagccattagaaccacattcgaggcaggaagaaggaaggaagggagaaaagccaacaggcacctctgtcagaggaatgttgcatgtcagtgctgcccctgatggcacagcaaggaggatccagaagaaagtatttggggcaggactgattccggatatgggtgaggatgtgttaaatgtgtgtctctttcaggcatctgtggctcttgtgcaatgaacatcaatggaggcaacactctagcttgcacccgaaggattgacaccaacctcaataaggtctcaaaaatctaccctcttccacacatgtatgtgataaaggatcttgttcccgtgagtttctgcatctctctggttttgtttttatttgcatggggggcagtgctatgtgtgttacgctattagtttttcagggcaggatttgtttgagtatttaaggctcctcttctagtcagatagtaaatagatgggactgtttcctatattatggcaggaggaggaccacagtgtcactgagagattaggaaaatctccagatctgagacagtgtggccagagtttaattaaagaatttgaatggcagaagataaacgcctagaaaatcctccagcagctcatttggtgaggtttgtttgagaataatggggcacagaattttagaattggaacattcccagaaatgaataatttggccataactacaaagaaatcatgtggaaaatgccagttgggaaagcaacagctgtttatgagtcccactttaatttctacctccctatatttgaacacctttgctgacgtggtgttttcaagggcagaaaggactgtgggattggcaggtttcccaagtaggtgagggagaggtttcctaaccatgcttaacattgtgaccatttttccttttgtaatctttgcatatattcatgacaaaggaaaagagtctggcttctgcctggcatagagtggacgagtagtcagtgtccaagaaatggggtaaataaagctgaggtgatgatggaatctgatccttttcttcttcttcttcttcttcttcctcttaaccacaggatttgagcaacttctatgcacagtacaaatccattgagccttatttgaagaagaaggatgaatctcaggaaggcaagcagcagtatctgcagtccatagaagagcgtgagaaactggtcattagtccctatttattgtttcaatctgaagaatttattgcaaagatgattgccaggagtgtggcttggcagggaacataagctgatgcaagccatttagtgtattctggagaggaactggcacaagggtggggcactcatcctcttagggccgggtgagtagtgtgaacccgtgaatggcccagagtggaccaaggagctagagccctgtgccccgcctgcaggggcgggtggttgctgtgtggctactccatctttttcaaaagaaaccagtatgtaaattgcctgggctttaaaaagtgaccactaagtcagaactgttccctcactgggggcaaaatgaaacacatatgctggccagttgtaactaccaccgtcctgctttacaaatgggagtgaaatgttaatggcaaaacagagtcatcgatattctttcctgacaccatacttctggtgatctgtggggtgggattattcctggcctgctcactctctgggagttgccattcctgtgtacaagctgtaaaatcttaaagcggaggcatcattatcaagttttcagtctttcttcttctacactacttctactcctctgcgaagaagtcttctctgatttgcatactccctgcatacttgtggacgtgaggtaggaaggggaccaaatggagacagagccccacctgcaggtctgcacagggccaagggcaatggctgtgtcttcttcctttctggatccctaggccctggcgcatgttattttatccataaatattagttatgtaaatactgtaaaaatatatataaattttttaaaaggccagatgcagtggtgcattctgatagtcccagctactcaggaggctgaggtaggaggatcacctgagcccaggagtttgagagtctgagagtttgaggccagcccgggcaacatagcccaggttttgtctctaaaacatatacatatatgtgaatatatgaaaagtatcagttgtatgaatgaataaattaattctaccttttgagacttggtaaatatttagcatcctctcctgttgcccataaaacgttaagaaaggggagtccggccaggtgcagtggctcatctgtaatcccagcacttagggaggccgaggtgggcggatcacttgaggtcagttgttcgagaccagcctggccaacgtgataaaaccccatctttactgaaaatacaaaaattagctgagtgtggtggctcacacctataatcccagctactcaggaggccaaggcaggagaatctcttgaacccgggaggtggaggtttcagtgagccaaggttgtgccactgtacttcagcctgggcaacagagcaagactccgtctcaaagaaaaaaagaaaagagaaaaaggggagtcctagtaagtgtgcccagtctgtcaccatcaagatagtgagggtcagcacagtggcctgcaagtcagagtaagcctgggatgagacttcagagctgctcttctcagactgcagctctgctcctcagtttctacctcccagagtcttgtgcatcccagagtccaggctgaaccgggccctctggcccagcgagtcctttgcattcctaggcaaggctggtgcgtagctagtgaacatctccctgatgtggtattattagggattgaagagttcccctgagcatgtttggttttctagatacaagttgagtattccttatcctaaatgcttgggtttcagtgtttggggtttcatatgttttcagattttggaatatttgccttacacttactagttgagcaccccaaatccgaaatctgaaatccatgctccagtgaacatttcctttgagcagcatattggtgctcaaaaagtttcagattttggaacattttggatttcagattttcagatttgggatgcccaacctgtaatagaaatttactcatttactcatttacataccaaacatttaacattttttggcttccttaaattagtatgctgaacttaataaataattggaaaatgtggagaaatttatgtatgtatttatttttaattgggcagcccccaaaccaaaataggttcagagaggctccatcattttttaaataagctataattttcagcctggggaacatagggcgaccctgtctctacaaaaactttaaaacttagccaggcatggtggtatgcacctatagtcccagctactcaggaggctgagatgggaggattgcttgagcacaagagttccaggctgcagtgaactgtgattgtgccactgcactccagccaggggcacacagcaagaccctgtctcaaaaaaaaaaaaaaaaagaatttataattccaccaccaaaacataatctctgttaatatttatagtttcctttgttttttgtttattacattatatttttatgtagctgggatcaaaatgtaaatatgcttttatatcctgcttttttcacttatgttattgtgagcattttcttcatattcttaaaattgttcataagcattaacttacactttgctttctactgcttcagatgtatgcaccatgcgccataaaaccatttcactgttgctggacaatgaaattgtttccaattttttactgttagaaataaggctagatgaacatctttatccttcaagttctgcccaaaacattctaatttcttattacagatttttctaggagtgggttaaagaatatgactattcttaaggctcttaatcctgtgaccttatgccttctagaccagtggggccagttgacactcccaccagctgtctggacataacatagatttggttgaagactcatggttcaatcacaaccatcagttctgtctcatctgttctcaactgtcacttcaggtgtcagtgggcccctttcattttgctgtttttaatccatttctgttgtttccaaactcagaaagtccggtttgtgtttgggacttgttgggcagattgacccagtgtggcaggtgtgaaagtgcaggaagccagagccagctgccggggccacatcctggttctgctgcctatagtggcacgtccctgggcacatggcctaactcactctcctcgccttggttccttacctgtaagtggaacttgctggagtcacctcacaggattactgtgatgatcagttaaggaaagcgtgtaaggcgcagggcctccgtcaggattggcagtggcagtcactggggatgatgttgatgttcccagtgaaaacctgagggcccttctgctgagcccagggcagaagcagctacagactcttgctgcttcagcccctaggcttttgaatctctcccgtcttgacctcattccaggaagctggaatttatgggagttgtttttgtgttcttgttttctatttcttttttagacaagtgagaggttcttgtttattaaagggaaagtgcactatacgtggatttaagaaccctgggcagatgtttacatttcacttgcaagatctttattaatctgctaaatatctgcaaatcaccccttggattttgctaagaaaattcacatgcaagtaggcactttgttcatgcactgaccccaaaggtaacatttaatcagctgaagacatagcagagtctctcccgtcacaagctcctgcctctcttttctccccatacaggacgggctctacgagtgcattctctgtgcctgctgtagcaccagctgccccagctactggtggaacggagacaaatatctggggcctgcagttcttatgcaggtgaggtgctccttaattgctttaagagaaattgaaactcaagcatccagaagtccaagaggacaatagattgctgtaagccagccattctgaggggcctggtttccttcattgccatccagtccaaacagggtaattggttgcattgtattcacttgctttcggtaaatctggggccttgtctgcaaattgcctttgtttcagtgcagtgagggtcaccccaaaggggtgcaaaccatgccttgcagatgtttaaaatgtatttccgtttgcctggtggtcagaggctccccctctccctctcataggatttgtaacataagacttgtagcgagcaagcaggggagaaagcagtgtctttgaagggcagctgcccagctatgagattggaagctgtttcccagctaatgaaagcctggatttaggggttgcttagaaagaaaatagtattgatgttcactgcaaagaaagtcactgtctttgttcccagaaagcttgtgcttttttagatacgtgcttttcacagactctaggcaactcaaaaaccaacttctctttctcattttcccacaaaaagagaagttacaggtttgtgtgaccacatgagcaatattgattcccagccatgtgaagattggataatgaagtacactcatacttgtcacttttgccagctgctccgagttggggatgtagaggtcctctaagtaacactgctagagcaggcctatggtcatgtgattaactcgtttcagcctgctgatctcaggctgctgagagcgctgtgtaagttcaaagaatcattaagtgggacaaatactatctgtagacaggtctgttaaatcattcctttactcagagacagcaagtccagcatgggtaggtgccatgaagacagataagagttatatgatacagtccctgccttcaccaaattataagctgggtaggaagctattgagcaatgtgaaataattaggagatgatacccagtgtgtataattaagcacccgggtaccaggtgcagtatggatcaaaggtttgcagggaccattaatcaagtgaagctacaagtgttgggaacctttccttgaaagatggacaagaattaaagagtatggagatgaggcatctaagctgagtgaattccctttcctctgcactcccagagctttgagttgagccagggtgccgctctggcctgttgattggcagctcagctaatcatccctggttttccaggcctatcgctggatgattgactccagagatgacttcacagaggagcgcctggccaagctgcaggacccattctctctataccgctgccacaccatcatgaactgcacaaggacctgtcctaaggtacgtggggctggtgaccctcagctctgcctcagagctgacacgccagaagtagcatgtgctcacaaagaggtgattggcagagagcaaccctagtcatttgagaaggaaagggaccagcatatgcctgtcctttcagtgtgagcctaggggctagtttggctcttagttgcaaggagtagactgactcgggccacctcaggagcaggctttatttgtaggctacacagggacattgtgggagttaaggatgcacaggaacccatgagcaggtacctgcgttcaaccttcccaggaaacagaaagcgaaagccgttggaacgtgggcagctgtgaggacttcatttcttctccatctttctcgcgatgtcagctgctaatctgctctgctctctagcagcctgttctttccttcggctctgtggaggttttctctgactcaaagctctggctttcgttcctcttcctgctcgcatttgctgctgcttttggctcactctggcctggattttgcctcccagcacacttccagcttcagccacccgcctgcctcccagcacttctcagcacagtttcctgagagggtgtcgcattggcccagctcaccttctcatgcctgcacatcagaggccacagctggctacagaccggctgccctttggccaggttctgtctcagtctgttttgtggtactatcacagaatttcagactgggtaattttataaagaagtttatttgacgcacagctctagaggctggcgccagcatctaacaagaaccttcgtgctgtattaccccatggcaaaaggcagaagggcaagagaaagggagcccaagctcagccttttttttttttggagacagagtttcgctcttgttgcccaggctggagtgcaatggcacgatcgatctcagctcaccacaacctccgcctcccaggttcaagtgattctcctgcattcgcctcccgagtagctgggattacaggcaggcaccactcatgcctggctaattttgtatttttagtagagatagggtttctctatgttggtcaggctggtctcgaactcccgacctcaggtgatccacccaccttggcctcccaaagtgctgggattacaggcgtgagccaccgcgaccggcccctctcatctgttttttttaaaagacagggtctcactgtgttgcccaggctggggtgcagtggcgcaatcatagctcactgcagcctggaactgctggccttaagtgatcctcctacctcctgagtagctgggactacaggcacacaccaccacacctgactaatccaaactcatccttttatcaggaacttactcctatgataatggcaatccatttgtgagggcagagccttcataatctaatcacttcttaaaggtcccacctctcaatactgttgcattggggattaggttttcaacacatgagcttttggggacacattcaaaccatagcaggtgtcagccctggtccagtcagccttgcccagtgggcagggaagggctagggctgtgtggttcagaacacggctgccctccgagcaaagactgtgggtgatttcactcaaaagttgcagtgagtcagtgggcggcaaggtggaaaactgtagggtggccagttagccgtaaaaaaagatcacactgtgtgtttgaaaacatgaaatccaagctgtagaattcacttattttttgcctggaaaccctctgtgtttccagtggcctcgctgggggagcccacaggcttcagctccctattgcctgggcttccatctgggtcctgtccccaggactgtggtttaccatgattgtgcctgtgaatagctactgacctctgaggcaagttatgctataaaagtgcttggaacagtgcctggcacatagtaagcacccaataaatgtcaccttatgttattttttaaaaaaacatgagtactgggcttgtttgagacagagatagcatcttcagtggtggggcctggctgtgtgtttcttcagaagctctgcgagtgactctaaggtgcattcctggtcacaaacctgtgcatggaggggatgggtgcagcagacaactgagacagccaagaacaggttctctgtgccttgccctcccttctgtaaaacagggctggaagttgggactgagacatagacataggccgatcatgaaactggaagggacttgaaaaccatcaagtttaatccccttatacagatggggaaattgagccccaggtggggaggggagtgactcgccccagatcactgtcaggtcagtgggaaggtaggactagagttaggccgtctgcctccccatccagtgctctttcttcctgcatggattgggtatgtaccaaccttctaagtctaaacacccttactgaccctgtggggaccggaaatacacaggtagatccagattcagaaggatatacagtgaaaattctccctcccactccacccagccacctccctagaagtcagattcttgtgtgaacttcagaggtgttttatgctgcacacaaatgcatatgtgtcctcttctgtctttcttatatcacatttatctgtattttttcacccactatattttggagattatcccatgttggtatatgaagagtgtctttttgaccagcctggacaacatagtgagatcccatctctacaaacaaaattttttttaattagccaggtgtggtggcacgcacctgtagtttcagttacttgagaggctgaggccggaggatcacttgagccaggtgttccaggccacagtgaactatgatcacacttcagcctggatgacagagcaagaccctgtcaaaaaaatatatattttttctttctcttcttctctcaagatctcttttctttctttccttttcttctttctttccacaacacttttttaggggggtagacttatccttctaaaatgaggggaaccttcactaacgtcagatgagtacttgtctcattttaccaagtacttgcttggtaaaagcaagtacttggtaaagtacttcctactttctacttcaatgaagctggcattcagtgggtttaattattgtgcctcctgcaaagcagatgttaacagctgtaggggcaaactgcagctaataccaatggtattggccagttgaaatcatcatggttttacaaagggttaatagagagggtagtttcttccacatacttttgagagctggtatatgctgatttctgctgctgcctatttaataatgatgatgtaaaagatttagagatgtctggctgattttgacattggcctgtagtcctagaagagacactaccctgagtgtctttgagcagtcagagagtgcacctctgccctgggcctgtttacctgttagagtgagccacacaagaaggaattcaacgtggcagagctcttgccagagggagctgaccatcttcaaatgttaaaaaaggtagacagaagagagcccttagcccaacccctatggttttgagggacttgatttgcattcaccttgcttggacactgaaccagctgaggaaggagtttcacccaagattgtgggttttccctttcagtttcagttatcatttgttattgattcttttctcttttttcaagggtctgaatccagggaaagctattgcagagatcaagaaaatgatggcaacctataaggagaagaaagcttcagtttaactgtttccatgctaaacatgatttataaccagctcagagctgaacataatttatatctaatttgagttcctttaaagatcttggttttccatgaatacagcatgtataataaaaattttaagaaataaatgttattctactttattaacaaaaaaaaaagaa

SEQ ID NO: 7309 - DNA, 105 bp, Homo sapiens
tccgcctcccgggttcacgccattctcctgcctcagcctcccaagtagctgggcctacaggcgcccgccactatgcctggctaatttttttgtatttttagtaga

SEQ ID NO: 7310 - DNA, 3604 bp, Homo sapiens
ggccacgctgtttgaggatggcgcggccaccgtgggccactatacggccgtacagaacagcaagaacgccaaggacaagaacctgaagcgccactccatcatctccgtgctgccttggaagagaatcgtggccgtgtcggccaagaagaagaactccaagaaggtgcagcccaacagcagctaccagaacaacatcacgcacctcaacaatgagaacctgaagaagtcgctgtcgtgcgccaacctgtccacattcgcccagcccccaccggcccagccgcctgcacccccggccagccagctctcgggttcccagaccgggggctcctcctcagtcaagaaagcccctcaccctgccgtcacctccgcagggacgcccaaacgggtcatcgtccaggcgtccaccagtgagctgcttcgctgcctgggtgagtttctctgccgccggtgctaccgcctgaagcacctgtcccccacggaccccgtgctctggctgcgcagcgtggaccgctcgctgcttctgcagggctggcaggaccagggcttcatcacgccggccaacgtggtcttcctctacatgctctgcagggatgttatctcctccgaggtgggctcggatcacgagctccaggccgtcctgctgacatgcctgtacctctcctactcctacatgggcaacgagatctcctacccgctcaagcccttcctggtggagagctgcaaggaggccttttgggaccgttgcctctctgtcatcaacctcatgagctcaaagatgctgcagataaatgccgacccacactacttcacacaggtcttctccgacctgaagaacgagagcggccaggaggacaagaagcggctcctcctaggcctggatcggtgagcactgtagcctgcgtcatggctcaaggattcaatgcatttttaagaatttattattaaatcagttttgtgtacagtatgtgtctagcaaagccaccaagggcctcacctttcccacagtctctccctggggtttttttcatccctgccaagaactctgggcacttttgaactcacgagccttgcgcaaaacccagaagatgtattcagagccacccaggccactgacctcccactttggggaactcaaaggactgacctgcccctgccgcctgtgcccttgctgggtccagggtaggcaaggctgccggctgcaccctgtatggagctagagaggggcctctggctgcctggcccagggaggaattggggtttctggttggaggcccttttctggctcctgtgtggagttattcactctcccagaggctcctggagccagccaccctaactgagctgccagtggggtcgtgaggcaagatccccgccacccggggacatcttcaatctaggcgaggcgaagctgagcgggtctagtggaaagattgtgtctggtcgtttgaccacacaccgccctgatttgctgttttctttttttagggagaagggcttttctttagtggagaaatggaactcgcccccctacccccttgtctgctgctcccagccacgttggtggtattggccgatgagctggtttgactcattaatttctctcaatttgggtcccagctaaagaggtggggtgaagctggggacagctttcctgggtgagtttttcttttgaataatgtagtgcagtcaccctgtggcaaatgccaggacagctgcaggtgcccattagcaacgcctgccttctgggcaaggtgagggatgccataccttgagaccaagccggtgcccacctaagggctaaggcctcttgctggtgcacatgacatttgtcctgcagagctggggggaaggcgatgtggtgaccccacccccacccgttaatttaaagctgtttctaaacagttgagtttcttctaaagaggaagccttgcccagcaaggaccagtgagacagccggatcttggagacaattacaagacggggagtgagactcctgattgctctggaagcctgctgatttctacaactgatcatttgcagctgctggttttggtttccaccttaccctactggctgtaaaaacacaaatgtgtactttattgattttctttctaattctcccgcattggtggcttgggacttgggagagggagcaagccttcctccatggcccatcactcggctgtggagaacaaagaccaatgtgaagacactacagaggattctgtcttccaggcccagtccactggggagtgctggaatggggacctggggtggggaggcagagggtcactttacataggattaagttcgaggtggctaccgatttcagcacatgcactactgaaatttacacaaaaagaaagctgtgaaattgaagtcccaatttaagagtcctgaggcagaacctggtggctggaggcattcccagaggtggggaagagagcctgcccggccggagaacatctgccttgctgcacctgaggcccagcagagccgttcctgggactgtcagataatcggtgcagcggtggaaggagcctgcggctgctggcacagacttcacacagcacctcctctctgctgggtttccacacagcctgtcttcagatcctgctgccgcgtgcgaccagaggtgggaggcccctggtggcatggaagagggagggtcagtgccaagtctcaggaggagggcgcatgtgtgtatcaccctcagctggcggaacctggctgcgaactgtgcagttacgttgcatccacaggattccagttgcgtgtctgtttccttctctttctccgtatttatttttttattcttcggaggaggtggacatttcggaagtggtggggactaagggaagaactctctagttccctcagtgtgaagcctgtcgtgttctctccccttgcactggtcatcagtattgtgtaaaggaacaactgatatacttgagtgtgcaagcaaagaacccatttgccatgctgctatgaagactacttttagatcaacaataaaaaaaaacctacaaaaaaacctttattctttaattgttgcttttacggtgatattgtgcatgcaaaccaggagcattttgtgtcttaagaaaaataatcttagaacagatggctgtgaaaattacacccatgcacagaacaagccacaggaataatagttcaggatttggtttttctctttttcttgtaaacctggagggttgatatattctttccatgcagttattagaacttagttttgttccaacagttaaacttgcaatgaaaagaaaatgtgccatttttttcactcagaattattcatagctgtatatttgaaactgctaattacacacgtgtgatgtatgttggttttttagtgcaatttcttctgtagctattctttgaccaaactgtgggtattgttaatattaatttatatttgtctcattttgtatgtatgtgtagtgtgtttgtgagtatgtgtggtttataatctgacaaagtcatgaagctcagtttggctgtaatttaattccccttcccttatttttatttatttttgtactgtgctgattcaataaaatgcactgaccatccattacagaga

SEQ ID NO: 7311 - DNA, 2536 bp, Homo sapiens
tttaaaaataagatttaatgctttattgctcttgatggcaaatcaaaatatgctttagaaataaagttaatttactggaaaataggagtttttgcaccaaaccataaaattgcatttcattacatcaagagaaccccctcattgtctacaatcatgcccgcttcctttcccctcagcgcccgggacacgtgaccgagatcataccctaaattcctgatccttttgcagtttccacatactgtggcttttagtacatcataaaaaagtgcttgtcctgtggcctcagctgggaggccctggcgctggggctaaggggcccaaggcaccatccaaaggctgggaggaaagaacccaaacccaggccctcctcctgccctccagcctttgacaggcaactcatttggcatgatctgttttggtgtgtttaaaacatacatttgcatgtgtctagtgtaaagcaacaagtttgaggaaataagtggaaggagagaggaagttccagttagatggttccactagtgtctactggtaattggcaaaactatgagtgttgctaatctgggctgagggcacctctgcctgtgcaggcagctgaccaggcttggagaatgagaaagggttcccaaggacaggatgccagcgggattctttgttgcaaactgcacacagtgcaatttttgggaagcagggatggggagtgggcatgagaccgggttgttgggaccactctggggtcaggccctgggtgaggcacaggaggctgcacacaggcacttggtgggttctgccgggtcagggtgggaaggcaggagaagtgtctgtggcaggacgggaagaagcttcagtacatccctctcttgcacctctgcccactccacctgaggcgtgggctccctccccctcatcctctcaccacatgcctgaggcgtaggctcccctcatcctctcaccgcatggggcatttgctcccagcctctacttccctcaaggccttctcagcagctggggctcagtggggaaggtggtctcagaaggcccctgaagcatacgtgcttttgctgggcagaaactggcaagctggcagtgctccctggcaccagtttcacgggcgcaggccccaaggggccgtgtagagggcggggtgggcatcctggcctggcctgcagtgccaggaccccacgctgtgctgctgccccgcttcctgcttcccgtcatcccgtgtcttgaccccgcccttgctgtttctctgagtaggaaacgcagcgggaggtggtccagagggaaagcggccgaccctgagggctgccctcaccctggcagctccccgttctcattagggttcctgacccaagtgtggtgacagcaggtatctgattagcaaccctgcaaacggtgaaagtatctataagaggaccacagccacaggctgcgagttaagtaagatgatccttggagcatgccacactgtcctctccagagcggtggtcagaggccctggtgggggccttggtggcaaagggagtctcccaggggagaacctgggaaggatggactcactctgctggatgggctgttccgctcctgccactggctcctggctgaggggctggccctgtgggtgactctgctcacccagtggctttggctggcggctgggagttgggttggggtgggtccgccgaactctgagcagagcctccctgagctgggtccccagggctggctcaccttgggcaagagaggtggctatggggctcccgcagagtggggtcctgcatccccaccccttccctctgcagggtcagcagcagggaggacacctgtccaggtgctctgacttgacctggccacggggcatccgcaccaactaaaggcaccatccagttgcctctggggtgagattggtctggacgtcagcccaggggtctgggcggggcaccagggtctttggcttattgaacagggaccgtggacagtaaggacagaggaagatgataccaaaggcagaaaaccaggaaggaaatcttacaggggcggggctcctctgggaggggccctcgcagcaggtttctagcgggcatgggttgggaggcagcagctggactgggacccaggactcggagtgtggccgggctccgggccaggcctccgcggggcgtcagttcccgggcacgctgaggatgaagcccgagcgattcttggtgaagtcgggctggggctggttgagccgcgtctccacggagacggtgcacttcttcccgtgcaggctgcactgtactgggttggtgacgttcacttgaaggtggcgcttctcactgcaggaaccaaaaacaccagacgggcagttagcaggcagcatgagaacagggcacctgcccggcagctcccggccaccattggctccggcgcagcctgcttcctccacaagtgccaggaggatgcctgaagggccccagagaggccgaggcaaggcgagtgtggcactagctgggcctccaaccacagcctcggcaccatggcagggcccttggctccc

SEQ ID NO: 7312 - DNA, 2612 bp, Homo sapiens
ggactgcattttttatggttttgtttcaaaagccattttcttctgggaaaactattaccaaacaccaggtaagatttttgcagaatcttttattcctagcagcttctcgtttagtgggccaggaggcaatgcttattttttataatgggtacttaatgaatgatttaagtatgccacagaacaattttagagttaacttgctcttgtcttttcagaatggagactttaaatcataaagtactaagatcatggaatgtttttaaaaaaaacaagagggtaaaaaaaattataaagcattcatgtaattgttttcttcagtacacacttcttattctgaaagatttacaaattggacatgaaagcatgcccaagagcctagtacaaatgtcactggaaagctgacaaagcataggggttaagagtgtgatttctggagtcagacaaagtcatgttctgtctgtcctccttactgacccttactttgggcaagttacttgatttctctctaccttaatttgctcactgtaaaatggagataacagtaacttcctaacagaactgtgaggaaaaatgaattaatacttatgaagttcttagaatgatgcctcatcatcattgtgacaatgtgacaccctcatgatcattgtcactgttctctttaggcagctgtgattcaaactagaaatgtcctacattttgcataatcatctcacatcatcacttctttgggcagcagttataccatagtacatgtttgctttatgccatgacttacaaacctgcgtcataatttttttattagaaagacgaatttaagtacttctgtttcagagaccaagaacattttttaaaatatgattaatagtctaaaccccattttaacttttttctctcctttcagataattggatcactaaaaattcctggtagaaaagaatttaaagacaaaaagttaaatgatcctaggaaactagtgggaaactgagaaatcataaaattgtactctgaagaaaaagatttcaaaatctaccagcagacaagaatatagataatggaaaacagaatactgtcctttttttttttctttctttttttgagaaagagtcttgctccatcgcccaggctgcagtgcagtgacacgatcttgtctcactgcaacctctgcctcccgggttcaagcgattctcctgcctcagcctcctgagtagctggaattacaggcacccaccaccacacccagctcatttttgtatttttagtagagacggggcttcattcaccacattggccagcctggtcttgaactcctgacctcaggtgatctgcctgcctcggcctcacaaagtgctaggattacaggcatgagccacagcacccggcccagaataagaatactgtcttggaaatctagacttagtcaagggatcttatgttttctatttacaaaatatgtaatgatttcacctttaaaatatttgttattattatctttctgtattttatttaaaatttggatatatagcaaaatatatgtgactgaaatttttaatttttttgtttccatttatagtggatcaaaatatttaaacatgcagttgctgggtgtattatttcactcttgtggttttttggcctcactctttgtggaccactaaggtaaataaaaatgcatattttgaatgtgtgtttgtatttcttcattttgaatattatttttgttccactgtgttttacgtcaaatatttatctgtacaaatgtgtctagcacttttatagcatcagagagaattcaacagatagaacaaacctgtttagtttctggactagttctttagtgaataccattaatatatttattcatgatttgtcatagatattttactagttagaattccaagtttcagaaaatttttagcataaacggctttttaatcatttattcatgatccctgttaacagcttagaagctataataaaaggtctgaagtggtaaataaaattagccaataagaaggagaacaaaaatctctaaaagcactcattttttgcacaattttgcaaatactctcataaataaatgtctcagaagtagtatatcaattatcagattaaatgcgtggtggataaagtaaactactcccatttcatatttccctagatctatatagattagtctttttctgcaagtggactggtttaaggaggaaatgcttagggaccattgataggaattgtatcatgcagctgtgtatgagcattcttttaacatttccccatctgtaaaggattttacttagtgaataagtgtaagaaaaaatgccttgccgtgagaatgagaggtaaggagtgaaatgaagaatgttcttggccagcactgtggctcacgcctgtaatgctagcactttgggaggccaaggggtggatcatttgaagttacgagttggagaccaccctagccaacatagcaaaaccccgcctttattaaaaaatatacaaaaattagccagaaatcacttgaactcaggaggcgaaggttgcagtgagccgagatcacgccactgcactgcaggctgggcaacagagcgagactccgtctcaaaaaaaaaaaagaa

SEQ ID NO: 7313 - DNA, 2614 bp, Homo sapiens
ggactgcattttttatggttttgtttcaaaagccattttcttctgggaaaactattaccaaacaccaggtaagatttttgcagaatcttttattcctagcagcttctcgtttagtgggccaggaggcaatgcttattcttctttataatgggtacttaatgaatgatttaagtatgccacagaacaattttagagttaacttgctcttgtcttttcagaatggagactttaaatcataaagtactaagatcatggaatgtttttaaaaaaaacaagagggtaaaaaaaattataaagcattcatgtaattgttttcttcagtacacacttcttattctgaaagatttacaaattggacatgaaagcatgcccaagagcctagtacaaatgtcactggaaagctgacaaagcataggggttaagagtgtgatttctggagtcagacaaagtcatgttctgtctgtcctccttactgacccttactttgggcaagttacttgatttctctctaccttaatttgctcactgtaaaatggagataacagtaacttcctaacagaactgtgaggaaaaatgaattaatacttatgaagttcttagaatgatgcctcatcatcattgtgacaatgtgacaccctcatgatcattgtcactgttctctttaggcagctgtgattcaaactagaaatgtcctacattttgcataatcatctcacatcgtcacttctttgggcagcagttataccatagtacatgtttgctttatgccatgacttacaaacctgcgtcataatttttttattagaaagacgaatttaagtacttctgtttcagagaccaagaacattttttaaaatatgattaatagtctaaaccccattttaacttttttctctcctttcagataattggatcactaaaaattcctggtagaaaagaattcaaagacaaaaagttaaatgatcctaggaaactagtgggaaactgagaaatcataaaattgtactctgaagaaaaagatttcaaaatctaccagcagacaagaatatagataatggaaaacagaatactgtcctttttttttttctttctttttttgagaaagagtcttgctccatcgcccaggctgcagtgcagtgacacgatcttgtctcactgcaacctctgcctcccgggttcaagcgattctcctgcctcagcctcctgagtagctggaattacaggcacccaccaccacacccagctcatttttgtatttttagtagagacggggcttcattcaccacattggccagcctggtcttgaactcctgacctcaggtgatctgcctgcctcggcctcacaaagtgctaggattacaggcatgagccacagcacccggcccagaataagaatactgtcttggaaatctagacttagtcaagggatcttatgttttctatttacaaaatatgtaatgatttcacctttaaaatatttgttattattatctttctgtattttatttaaaatttggatatatagcaaaatatatgtgactgaaatttttaatttttttgtttccatttatagtggatcaaaatatttaaacatgcagttgctgggtgtattatttcactcttgtggttttttggcctcactctttgtggaccactaaggtaaataaaaatgcatattttgaatgtgtgtttgtatttcttcattttgaatattatttttgttccactgtgttttacgtcaaatatttatctgtacaaatgtgtctagcacttttatagcatcagagagaattcaacagatagaacaaacctgtttagtttctggactagttctttagtgaataccattaatatatttattcatgatttgtcatagatattttactagttagaattccaagtttcagaaaatttttagcataaacggctttttaatcatttattcatgatccctgttaacagcttagaagctataataaaaggtctgaagtggtaaataaaattagccaataagaaggagaacaaaaatctctaaaagcactcattttttgcacaattttgcaaatactctcataaataaatgtctcagaagtagtatatcaattatcagattaaatgcgtggtggataaagtaaactactcccatttcatatttccctagatctatatagattagtctttttctgcaagtggactggtttaaggaggaaatgcttagggaccattgataggaattgtatcatgcagctgtgtatgagcattcttttaacatttccccatctgtaaaggattttacttagtgaataagtgtaagaaaaaatgccttgccgtgagaatgagaggtaaggagtgaaatgaagaatgttcttggccagcactgtggctcacgcctgtaatgctagcactttgggaggccaaggggtggatcatttgaagttacgagttggagaccaccctagccaacatagcaaaaccccgcctttattaaaaaatatacaaaaattagccagaaatcacttgaactcaggaggcgaaggttgcagtgagccgagatcacgccactgcactgcaggctgggcaacagagcgagactccgtctcaaaaaaaaaaagaa

SEQ ID NO: 7314 - DNA, 137 bp, Homo sapiens
ctgtaatccctgctactcaggaggctgaggcaggagaattgcttgaacccgggaggcagaggttgcagtgagccaagatcgtgccactgcactccagcctggtgacagagcaagactccatctcaaaaaaaaaaaaa

SEQ ID NO: 7315 - DNA, 137 bp, Homo sapiens; identical to SEQ ID NO: 7314

SEQ ID NO: 7316 - DNA, 1047 bp, Homo sapiens
aggatgctcgctctatggcagcagctgctgcatccctcgggggaccccgagcaaacacagtcctggagcgtgtggaaggtgcccagcagcggtggaagctgcaggtgcaggagcagcggaagacagtcttcgatcggcacaagatgctcagctagatgggctggtgtggttgggtcaaggccccaacaccatggctgccagcttccaggctggacaaagcagggggctacttctcccttccctcggttccagtcttccctttaaaagcctgtggcatttttcctccttctccctaactttagaaatgttgtacttggctattttgattagggaagagggatgtggtctctgatctctgttgtcttcttgggtctttggggttgaagggagggggaaggcaggccagaagggaatggagacattcgaggcggcctcaggagtggatgcgatctgtctctcctggctccactcttgccgccttccagctctgagtcttgggaatgttgttacccttggaagataaagctgggtcttcaggaactcagtgtctgggaggaaagcatggcccagcattcagcatgtgttcctttctgcagtggttcttatcaccacctccctcccagccccagcgcctcagccccagccccagctccagccctgaggacagctctgatgggagagctgggccccctgagcccactgggtcttcagggtgcactggaagctggtgttcgctgtcccctgtgcacttctcgcactggggcatggagtgcccatgcatactctgctgccggtcccctcacctgcacttgaggggtctgggcagtccctcctctccccagtgtccacagtcactgagccagacggtcggttggaacatgagactcgaggctgagcgtggatctgaacaccacagcccctgtacttgggttgcctcttgtccctgaacttcgttgtaccagtgcatggagagaaaattttgtcctcttgtcttagagttgtgtgtaaatcaaggaagccatcattaaattgttttatttctctcac

SEQ ID NO: 7317 - DNA, 294 bp, Homo sapiens
gggcgcggtggctcacgcctgtaatcccagcacattgggaggccgaggcgggcggatcatgaggtcaggagatcaagaccatcctggctaacacggtgaaaccccatctctactaaaaaaaatacaaaaaatttgctgggcatggtggcgagcacctgtagtcccagctactcgggaggctgaggcaggagaatggcatgaacccggcaggcggagcttgcagtgagctgagatcgcgccactgcactccagcctggggaacaaagcaagactccgtctcaaaacaaaacaaaa

SEQ ID NO: 7318 - DNA, 247 bp, Homo sapiens; identical to SEQ ID NO: 6479

SEQ ID NO: 7319 - DNA, 686 bp, Homo sapiens; identical to SEQ ID NO: 6480
  SITE (95): n equals a,t,g, or c

SEQ ID NO: 7320 - DNA, 4293 bp, Homo sapiens
tcaggtaccacgtctggacgaaaggccacgcacccacaaacttcgccaagtggcggaccgccaccacgccttaccgggttgagtgggaggccgattttgagccgtatgttgttgtgagacgtgactgcccggagtacgaccggaggtttgtaggctttggctggaacaaagtggctcatatcatggagctggatgtgcaggtgagaagaacggagcatccacctggtatggtcgacgggggagaggcctagatcctagagcttaagggatccttggagacaagaaagcagagagctaagagggaacaagatatgcttgaggaccagtggtagtactgatccttgggctcttgatcccaaaccattgctccttcctcaacccttgggtgagagttgggttcttggccaggacccaggtaaatgtgagtttcctgtgacaaaccatttcatcttctcatcctcacccaacctgatgatgaagacaagcaaatgtgaccattcatcacttggtctttgagtcacgtaacagacacgaagcatccttagagttccatatacatgacaaagcatgctgctaagatgcagctagttattccaccctttactaaaagattaatagatgcatccatcattactaaaagagtggcgactttgagactgtgtttaatcacgaactccttcattcatccaactgatacgtattgagctcctacttcaaagtatgaatcttctacagaattctagtaggtgaaaccaaggatcagcacacattttctgtaaaggaccagatagtaagtgttttgagcttcatgggacctacaggtctccttttcaactacttaactctgctattgtagttcagtcttacagtctttaaacaaatgggtgtggctgtttcaataaaactttgtgtacaaaaacatgaaatggaccagacatgcttcaatttttcagcccctgtgttaaacaaacaaaagcaaaactgctctggttaaattagaagaaggattcctcggtccctccagcctttttttttttttcttttcttttcttttgtatgctcttctccaagatctctcctcctggtgcacagtgcaaatatttttcaacaagagcacctccaattcagaaaaagctaaggttggatactgagcgctggccgttcatgagaatcaccaggagaactttccttccaatagttccaatatgtttgagaacagccccaggtgattgagaggcgttagggttgagaacactgatgtagataggttatagaatcatgtccatatttaacaacagaaagcagggctgtcagtatccatattttttataatactttgaatgagcagagtgccactcacagacaacagtgttcagtcagcctcagcttctgcttaaaaggaatgtcatgttcatgtgtccagcagtgctgtgagatgaactagttcaaagaaagttaatttttctagccatgagacctgggctttgtttgttttggacagttttgacagaattcttgaaaatacgttgcatattttcttttttttctttgcgaatagcatgtcccagacatactcttaaccttttccagtaccttaaggaaataatgagtgcacacctgccaggtattaacacccacacccatggggctagtgcggttggtggggttctttgtccctccattaaatgtcccagacagttcagctctgggagatcttgcattttcttttgatggtttttctcactcattcctcaccagcaactgtcttttcttgctgctgttgtattgttctacctaaaacagccgcctttccccatcccagttatccctgagtttattcttatctgctctgagctgggaaactagataacaaaagcttgtcagacaatatgtccaaaatgagagtaaatagatctgagtaaaagtgtgctgagttctcctctaagcgatatgacctaaatctgggtcacctgttttggctattcagaggccttttatttttggcctgagtattaagctgtattctgccaagttgagaatactgggtgacagtgtgacctgcgataaagatgtgtcagggagaggtttgttcttggtgagcttaggtccagcaaaatacttgtttttatttcatctggtctctcattcctgttttgtaccctcttttgcactcatctgttgagactgtcagatcgcatcaagtcctatgaggaatcataaacagatgtcagttaatcgagcaagagaatatcccatggcgtgtgtcatcctagactgtccatgtgggtgtgagctcacatctatttatcaagaaaccttttctaggccatgagctcggctcagcactgtttatacagtattggcttctccgtcatggtcatcattcaagaatattattactttcaccttatagatgagaacatgaaggctcagagaagccagtttcctggtccaaggtcatggaaacagccctgaattaccccactccaaagctgttgtgctgtcctttgccatctgcttgtgggtgccattatcaagtcattcattcactagccattcaatcattcgcttgggccttcatcatgcatgaccctcggctcttgcgggttctcacgctgctcttgtcttcttccaggagtatgagttcattgtgctgcccaacgcctacatgatccacatgcctcatgcccccagcttcgacattaccaagttccgttccaacaagcaataccgcatctgtctcaaaaccctcaaggaagagtttcagcaggacatgtcccgccgctacggctttgctgccctgaaatatctcacagccgagaacaacagctagcaccaagaagcccaccactagggggagacatgctgtaggggaagtgccactcgctgtttggggcccggccttcaaattcaaaattgagccatgctttttcggtttgtttttatttatctctttggcccagccaagctgccctcactacagagaccttggacaaggatccagccagtccctctctgccccacaaccctgcattcccagaggttagctatgcagcccacctagatgagtctcttcaagaatgggaaatcaaggggtgacagggagtaaaagggttatcatcttactgcaaagccacaagatcagggcagggctttaggatgttctggatgctttttaataattatgcttcccatcataactggggagaaagggaagtcagggttctaggggttattcgtcccaggaaatagaagtgaaattgtctttattaagtgaaaactttcccctttgccctgcaatgtagctgggcattcaaacggagggcaaaccgatgatctaaaccaaccacttggaaaaacccaatggggacattgtaaccagagggtcctggaggtggggttgatgggtttccttatccccaaagtcactcctgttttgttttgtttttctttgggggttttgtttatttttggggctggcaatccaaaatagaaaatctgatcctttgaggctctaaaggaaaatcagctgcctctaccaaccaccctctatcagcagtggcccaggaaggaggtcaagcatcttcggccgatatttaaacatgggcagcttccttcaggatgatcaccgaggctcccgtgactttgaactccctactctccagaatccaggggctatagcgatggggactgcggaattacgagggctggctgttttacaccggtcacattttctattggcagtgactgattcatgggaaagggctttgaaggaactacttcagtgcacacacaaggtacgaacctctcaggcctttcgaagaactttcataattcatgaaagcccagttctgaagattcacgtatccatctggagacctacaggaagaaagtgattgggttcctctggttcttgcctgcttcactgtggatgggaagaggtgacaacctcagtctccctttgggacctgtccaagggtaggcaaccaccttcaccttcacacagattgaggagacactggactttttacccattttctttaatcttcaatattaatattgtgtttacattgatgagaacaagagttaatgccctaccctctgctgggctgtttgtattgagttgcaatgtgaccagcgaaagctgcatttaataaatgaaagtacagactgtttcttccccattcccctcccactcttgcaggaagctactgagacacaccttgacatagagagctaaattgcagtggataaacagcaacttcacactttctgttcccccattctattttt

SEQ ID NO: 7321 - DNA, 109 bp, Homo sapiens
ggaggctgaggcaggagaatcgcttgaaccggggaggcagaggttgcagtgagccaagatcgtgccactgcactccagcctggagacagagcgagactccatcccaaaa

SEQ ID NO: 7322 - DNA, 3902 bp, Homo sapiens
ctgatgtctcccggaggaatctgcaattgcataatttagttggttgcttgtctactgtctctctctttggcaagaatgaaagctctatgagcaaacagaccttgtctgccttatgatccattttattactagagcctaggactgttaaattcattaataaagtctttccatcactttttgttctttatattcctttactcaattgatattcagcatgtgcagaacagttcttttccaaggctgcataaaagttttggaatgaggcacataaataatatccttctaccaataaatgctatctgttataaaatagtttttattttataatcactgaatatgtcaaaactttacagttcaggccttttgaatcaaatgcaaaatcaaatatgaaaaggttaatgatcttgtccactaaaattgtagtttgccatacaggaaaatagactcttaaaaatgataaataaaaaaaaatcattcttaaggaaacatattaataagacatttaaaaaggctaagatctttaatgtgaaaaataataagataaagatgacaaccactgaagagaagaaaaaacgttttatgttttttctaaatgtgtgtaaaaacaaaatcttgtacctaccaaaatgacacttttttcaaagaaaggtatcaaatgtgtatactttaacacacagcccttccttgtgtaaatatataggaaatccttaaaggagcataaaacaatttacttagaaattctatacttaaacttattcaaaggaaataattaaaggtgtgtagataagatatgcatagcattgctctaaatgtcaaatagtagggaactaggtaaataagatatatctatttagggaattagtcaagtaagatatacctatttagctaattccatgtagccatcaaaaggataccatagaacagaacttattgatgtgaaaagatgattaaaatgtacttgttactaaaaacagcaggctgcaatactgtattaaataatgagcccatgctgtatatctagacaaacatatatcataatgataataataaatgtatgagacttatatttttgcttctctgtattttctaatttgtctgtgataaacaaatattattaatgtaatgaagaataagctaaaatatacaaaaacaataacaactataaaaagaaccccttcaatcaaaaagagatcatcagggatttaattcaactatggattggcactattaggaggccaaatatgattcgttgaactgaactgtagtaaagacaagatattaggaaaatgtttaaattatgtgagaactattctcaagcactttaaagatctatttgcaagataacaatgtgctaactttaagtaatgtctatgtattcttgagaccagctttgacaatgacagctgtcattccatttgacttgtacttacattatgttttgtctatattttcaaaaacagaacccagggactgattcttacaagcattttcttaaagattcactgggtgtctgtaaatctgatcaagctgttctttgggagatcattattcaacacttatcacatactttatttctacagctatgactgtcactccccaagcttcacttcataatgaaaataaagaatacagcccttttggaaaagttggatggtaataccaagtgcgtaagtttttagtacatgccatatcacaacctcctacgtggctgacttttgactttttcatttcttttataactgacagaagacacaaaggcaaaaatgtcaacttcacaaaaaatcttagtgctttttggaaagaatgttatagatcatccagtctaaccccctgatgttataaatatggaaatttaggcctagaaaataggtaagtgatgaatcaaactagaagcaggtgtcctgcctctaagcccaatccagttgccatcatcatttactatttacatggaacatcaggttctactttagaagttaactatcaacctacagggttaaggaaaatagcaatgtgtatatacagaccttgcatctggtagctgtatggtgcctgtccaggttgaggggtactgaagcttgtgccatagctgagaaatcctgtctgtccaggtgactgagactgtgacaatccaccttcagtcttgatgcctgcccacaatgcacctaaatcagttagtgatagcttatctatctgtccattttcaaaagctggtaaatatacaaaaacatacacttccacaaccgtttaactacaaatgcttccccaatcttatctcaaaaataaagggtatacatgcattcagtgaaataccataaagtacaacttcagttttttaaatccaggattacagatttgaatgtctattcacattattctctcttgttttattgcacttcaagacatatcccttctataaaatgtaactccagtgatatattttcatacttaattttgttgttttaattatgtaagagttgaagatcatctccttcacagtaaagaaatagccataattaaattttagctaaatgttcccaaagttgctatattgactagtgttaaaaataaaatccttttttatattaaaaatattaattagatcctataccatcacagtatttttccctcctttactctttctactacaaagctgatttcagtaccaactcattttgaagtccaaagaagcaatactgggcacagaactaaacaacatggtggaaaggcttttcctgaatatctaggtcctatcagaaaataagcacaaaggaagcagaacactaatgagctgaatcttataaaacagcagtgatttataaacaagtgaggttgaccagcagtttccttttgtccctgttagtgtgaaatatttgactataattgttttcgatgtagtctaaagtacctttgtttttatcatatgataatataaaaatgatgtatctgtggcccccaaatacttccccaaacaccaggctaacatcgtaattttgggacttggatttggcagcactgaggtatggggctcagctctgtctttaattaattacaattaaagacagtcatacatgttaacaactctccttcattctcacagagggagggaagaaaaatttctgccgagggaattcacattttttaataattttgcttcgtacttaagataaatgatatctttaggatctagaatacacagtagtcttactgtttatttccattttaggggaatctcatcagcagagtacagctaggtaattgttttaaggcagtgggagaatctgactcttggctgagagtgcctactttaattcctgcagtatctctaaataacttcataatgaccttaacatttaagtcttaacacaaccttaacattttaaaaatgtgattttccctgtaaaggtgatcccaaaccaatgaataacccacacatagaaatggtccctggaaatacacctgccccagacaggtggcatgatggctttagaaaatccctttctttccatgttgtcacccctagggattttccacctcttgctgcatttgagactatactgatctgcttccagccttcacctataccaataaaataccaataattcatgtattttttttttttttgagacggagtctcgctctgtcacccaggctcgagtgcagtggcgcaatctcagctcactgcaagctccacctcccaggttcatgccattctcctgcctcagcctcccaagtagctgggactacaggcacccgccaccacgcctggctaattttttgtatttttagtagagacggcgtttcaccgtgttagccaggatggtctagatctcctgacctcatgatccgcccgcctcagcctcccaaagtgctgggattacaggtgtgagccactgcgcctggcc

SEQ ID NO: 7323 - DNA, 12513 bp, Homo sapiens
ggcagctgttgaagacagagctggggtccttcttcacggagtacctgcaggtaggtgggtcttgctccagccaggctgggcctgcctcatgagccagccagaaagcacaggggctcacctgcccccgggggtgtggagcgccggctcccccactgtctgcctgcagttccaaggacctgcctcgttccttatctagccacgtggaatgttgtggaggttaaatgataagatgaggtgaattcttttttgagatagtctcactctgtcatccaggctggagtgcaatggcgtgatcccagctcaccgcaacctccacctcctggcttcaagtgattctcacaccttagcctcctgattagctgggattacaggtgcccaccatcacgcctggctaatttttgttttttgtcttttgttttgttgttgttgttgttgttgttgagatggagtcttgctctgttgtccaggctggagtgcagtggcgcgatctcagctcactgcaacctctgcctcccgggttcaagcgattcccctgtttcagcctccccaggagctgggattacaggtacccaccatcttgcccagctaatttttgtatttttgtagagacaggatttcaccatgttggccaggctggtctcaaactcctgacctcgaggtgatctgcccgcctcagcctcccaaagtgctgggattacaggcgtgagccaccgcgcccgaccaattctgtacatttcatattggtggcataacacggcctgcggacttttgtctggactctttctcttagcatcaggttctttctcattggagcacaagccagtgcttcatttctttgtgtggagatgggctgcattttgtggtccatgctttcattggcgggtgcttgggttgctgagaccacacagcgtggttcttggccgagccaccccaggcagtgcgtccagggtccctgaggtaggatggcagctgacgggcccggcctttggtaatcagagtcacctcttgatgcaaagtcctttcttcactgtgggacatgccaggcttctgcctgcccagctgagcccagtgcaaggagctctaggccctgcccacctctcgggatgtccgtgtgaccacctcctgtctcgtgacaacccggggttgggtcagttaccctcctggatgaactgatgctcaggccctgcagcaggtggactgtgggacctcagtgagtctcctccccctttaagccttggctgctcactggtggatggactctcgggggccctgctggccaggacacccccgggcatccacaagggcggtgacagcccctctgtgtttaccttcagaaccagctgctgacaaaaggcatggtgatccttcgggacaagattcgcttctatgagggtgagtgtgggccccttggcggccactctgggccatgctgggtcctggctggctgctggactgctgggcctcgtgctgggggcctctgggtgcaaggtgtggctctctggtccggagggcttggaaggaacacgtatagccttagggcagcagggccgagatccttacccagagggaaccctgggagagggtctgccccccgaacttgctggagcccaggagggctatgagacatcggggaaaagccccctgcttcccctccctgcccacgggactttctggccctagtgagctctgtccccgcagcctgggagagcccctgtcctggtctttgggggtcagaggagaagtcggttagggctgaggtcaccgatactcacagaggaggggacagggtgggggactcagctgaattttctctgtcgaggctcacagccacccactgggaccttcaggttattgttcctgagtgggagagtacagtgatgataagtgatttgcccaaggctacagtgcacatcaggggtgggggcgggactcaaacccaggtctgcctgactttagggcacacaccctttgcccttctcacggcccggaggtccccgctggcctcactgtgcaggttgggcttcccgtggccgagagcctcgggcagcagcagcagcgtgcgcatccttgcaggagcgagctgccctgggagcggggtcaggtgagggggtccactcagttcccacggatgctgctttgctcgggctgtgctgggatcgggcctgcgctgtacccgtgtgttgagcacctgtgcactaggcaccgggtgtgtgcgtccctccgtgctggactgccccgagtgtttcacatctactaactcatttgatttccacaaccctgtgaagaagccaccgttgttagcactgaatgaatggggaaagtgaggcacggtgtcctgcccaggccacacagctgcaccgtggcaaggccagggtgccaagcaggccaccgggtcccgaacccatactcttcactctgctgccccaggctcctcctccaggtctccctctgaccctgggaaaaagagctactagcccactccacagagaaggacacaggcccggaggcctggcatgttccaggggaccttggagctgcgtgtcatggtccttcctcacgtccactgaacatgttgggtggggccagccaagacaggaacacaaagagaggccatgaaaaccatcagaccgtcggggagacatgggggttctgggaaggcttcctggaggaggcaacatctagactggcaggacagagctgtgagcatttggcacctgacgaagatggccacccacgcccctcgcttgatgcggcacattctggcggtgcctgtacctcccaccagatctggcctaggggagccggggctctcggagaagggagttttgtgtggcttgaaaggagctctgcgtgggacagccaggtctgccaggcctcccagcaggggtgcctgcccagcagaaggggcagaggacagccctgggaggcccagcatcctcttctgcctcgccagcccttcctggcctccccaggtctcagggacaggcactgggctctacgctgggagtctgaggccctggcctccagttcccatgtagctgcagacacagggtttcctctccagcctcagcacccctgtcttagcaatgtggggttgaacaggctctgtccacttgagtgttctctacatgtcaggcccaggtgacctctgggagcccagagatggaggagaacctggccctgcccttcagggactcacagcccaattggggacacagacacggacccgagggtgacagttgagtgtgattaatgtcattgtgaaggagtgtcctggggaagaaagggttcattccaccttggcagtcagagagggctgcatggaggcagtggcccttgagtagggcctcaaagtgtggtctgttcaggggaacttgtggtcccttttggccccatgcagtggggacatagccacctccacatcctgatgggcggcctcaggggcctcccccttcctgctccctacccctgcttgggttccactgggagctcttcactttgagcctgctccttgcagctgtccctacagagcctctaccagaggtgggtgatggccccctgtggggaagccccaggaccttgccccctgccccttctcagcctccagggaggccttggacttcagcccctgggcagagccggtcctggaagcggagagcctggaggagtggccttgaggtggagggctgcctccctaggaaggggaggaagactggaccgcggccggggttgtagtttgatggcctgtgtgtggcttaagggaatcggctccagctgcagccaagcaactccttggaagccagaaacttgggaactctgggcgggagctcctggtcctctgctgggccctgggatctgccgtcgctcatccaccagggaatccaaacccggtatgggtcacgtgacccagctgtgctgccttacacgcttgcctccatgcctgtgcctcggccgtccccgcgccagacacccttgacctggtccacccagcgcgtggcttttgtcactgccctgcgctcctcactgttcctgagtctcccgacgggctgaaacagggttgttggtttgcagggcctgcacagggccctcagcactcggataaagaaaggaaagacggacaccagcctgcgcccacagcgagaaccccagagtgggagccagcacggagccaaggctactgcggggccgctcgcctgcatcagcccctgctactgccaggctggagccaaggtacggcgcgcacacacccggccccgtcctgccggcagcaaacgcccagtgctgtttcatctcagctttcgacctgcccacgtggggacgtgtatcacgcccctttcatagaggatgccactgagtccgcctggaggaacttcctggggtcgccccatacctgcctccgactaaccctactgccccacagaggggcccccacaggacaggccccggcagagagccccaacagccgcgaggctgcccttcctggcctctcgtcaccgtgtggctccagctggggcctggattctgttttacaacatctgctttccgcagcatttccgccccgtgggctggagaacagcctgcgctgagcagaacgcaggcctggccggtgcccagagccaccccccggccagcccgggaactgagctgcctttcttcctgccgcggcggagggggactgaagggactttgtgtgtgggcacagttcggcggggcggtgagcatccatccgtccggggcattcctgctggcccccatcaccctcagagccaggtttgggctacccgggtgggcagagggctggccactgggctgggagccaaagatgggacccagtccagctcggccccagcccccagggctgcccctggcggggtcccactcctagtgccctcgaacctacatgaagctgggggcttccgggagtgggggcagggcccagagagtgagaaaaaggcaaaggtccctgttcagcctccgcattcccatggaaacctcaaagcagttctggccgggggcgcagcctgagagacagccggcaacgcttccctcttcactcagaggcgcccacaccaagatctctctcgccagttgttcgtctggcttccaggggacagcagaggccttggggacacgtccttggactgtgcatccctggacccagcagccctcatcccagctccgctcagtccaggcagaaaggccaagggttcttcacgttgcctctcccactggaacccagagccagcttgggcagctgtccccgtcccacaagggtcactcacctggtgcatggcaccgttcctctcaaggccagcagaaatcctacagagctggtcccgatgtctgctacctacgtatctgtttcagagactcacctgtcaagatgtgtccccataccactacgtctggcaagcccagctcctatagccagcttggatgctcttcctccaggaagccctccctgcctgaccctctgcaccctcttcttccttcgacgtggtgctgctattggaaggggtctccgtggatccccagacctgaccacaggcagagctggcctggccctgggtcctctgggccactgactgtggtgcaccctttcctcggaggctcagcctctgtctgcttggtggggggtcgatcacccctggctactgcccttatgatcctgctcagtgtcccacttccctgtcatgtgatggatgggcagctgtttggggctcagctgggtccccagtgcccagcatcagcgccagcacacagtaggtgttctgtgtttgttggaggggcagatagtgtgggggaaggagggaggaggtcggtgggtagaagaaatcaactgcttagccgggttgttaggaggatctgatgagactaggatgtgagttgaaactgctgtgccaggcacacctgtgtgggtctcacttgtgccaggcatacctgcgtgggtctcacctgtgtaggtctcacctgtgccaggtgtacctgtgtgggtcttacctgtgcaggtctcctgatgcaggtctcacctgtgccgagtgtacctacctgtgcgggtctcacctgtgtcaggcgtacgtgtaggggtctcacctgtgaacgtctcacctgtgccaggtgtatacctgtgtggctctcacttgtgtgggtctggtatgtgacaaaggcctgggaattggcagctgtcatctgccaggagcagaccctgagccaagttccctgtgccttaggctcatttcatgccctcagctctgggaggccaatccctttactgccacattttataaatggaagactgaggttaagcagtgggcccagggccatagaacagctgagctgtggagctggacatcgaccttgggcaggtgctgccaggggcctgagcccaggccctccactcccgcatcctctgatgacccatcctgggtgagtggaggcatctgcccgcgccagtcaggcccagtggtgatggcccccatgcccacaggacagaagctgctggactcactggcagagacctgggacttcttcttcagtgacgtgctgcccatgctgcaggccatcttctacccggtgcaggtgggcagcccagccctggggagggaagcccagtgcccctgctgtgcccaccctggcctcactctacagaggggggccgccaggcttggggacacacacacctgctctgctctgtgctgctctccttgggctacctgagttgctcagagcctgtttccaccccttcaagctgcagatatggacgcctccctccctgtgaatcccccagcagcgaggcacagcgtaggggctctgtgacagtaaccctttcactgccagaggaaactgaaggggccctctatccttgggacggggtcatctgaggagaacggggtggaggggcctgagggtcggcaggtctcttccccctgtggggtcccaggaccgggagaggggagatgaggacgcatgtgaccacagccggtggggtggggtgccttccgtccacagggcaaggagccatcggtgcgccagctggccctgctgcacttccggaatgccatcaccctcagtgtgaagctagaggatgcgctggcccgggcccatgcccgtgtgccccctgccatcgtgcagatgctgctggtgctgcaggtgggcacagtgggcagagggtcgggcatggggaccgtggggcagtaattgggctcaggtccccacaggcagagcatgagatgaggatttaggggcacgagacttaaggaagggcccgatcagaggagaagcctgtcagggccagggaccggggagcagctggtcagagctgtgggtgcaggagagctcaagctgcagacccgttcctcttgggcacagggctgggcctttacaccctgtgtcggccagcctggggctgtgcccacccccagcacgcacacgcacatacacactacacacatacttgtgcacacgcacatagtatgcacgtgcacatgcatacacaccacacacgtgtgcacgcacacgctacacacatgcctgtgtgcacgcacatactacatgtgcacacgcatacacactacacgtgtgcacgcacatactacacacgtgcacacacgtgcacacgcacatactacacactgcacacacacaccacacacgtgcacacgcatacacactacacacgtgcgcacgcacatactacacacgtgtgcacacatacgcgtgcacacgcatacacactacacacatacatgtgcgcgcacacatactacacacgtgcacatgcacatacacactacacacatacttgcatgcacgcacacatacacacagtgtcccagtcatttctgcccagagggcttttgtcagtgggtcagctctggggaagacactctgagagctgttagcccccctcacagcaggtggggagaggtgcctgccccagaaaggagtggggcccccagtggcatccaccgcaagccaggggtttctgcacacggcccttcccaggcaccacactttgcagttggccggctcatcacactgtcgcaggaccacacagtcactgccggccaccccattttacaggtaggggacccaagtcctgcttgctatgagctaataagggcgggagcccagcttcaccccggctctcgcaggtgcaaagccctctttatcgttctgaatccccgtgaagctcttttaaaattagggtctgtgaggacactcgggaccctcacagggcaaccagagcaaggaaggggcggccagtgtggagctgtgcaaggtgggggctgccctgggtggaagttgagagagtttaggtcaggcctggctgggttgaagcggggacccttgagggactttgctgtgtcagcttcagcttcccggtctttaacagagggaggcctcctccctggcaggataggtgaggacttggtcattcacaaccaagtcactgctcctacaggcagacaattccagggacacgtggggtcccctgtgttagtgtaggtgaccttactgtgggcacctgtggagtcccacctactcattgtaacacaggccaggacataggagcctgtaccagccccgaaaccccaagagttcaggcgactttgctcacccccagggacgtggcctggaccgtgcctcactccctgcctggagtggcctcccacagccatcccaagagtcctgggttagtcctcgcctctggctggctggattgtcacttacaattgtacctgggtgtggccgggtgcagtcactcatgcctgcaatcccagtactttgggaggccaaggcaggcagatcacaaggtcaggagattgagaccatcctggccaacatggcgaaaccccgtctctactaaaaatacaaaaattagccgggcatggtgatgcatgcctgtagtcccagctactcgggaggctgaggcaggagaatcacttgaacctgggaggcggaggttgcagtgagccaagatcgcaccactgcactccagcctggtgacagagcgaaactctgtctcaaaaaaaaaaattctacccccgtgtatcttgtccctgaaccccctgacagccccttgaggcctgctgtcttccattcattcacttatttaatgagtgcaagcactcgttataagtcagctttctcccagccctctttgctgggtgctgaggtcccagagcttttgtcccagctcagcgcacagctgggtgagcagcctcatctcccgggccttggctcaaatacacctggaggtagcggtgagcccttcagagctccggatgaggggagatgatggcgtgagccagtgatgggaagaagagagtggggcttgtgaggtggtccctgatggatgtggactgcacctggccccatggggcagggagccccaggtgagcagcttggccctccctgcgtggggtcagccagtgtctctggagagactgtccaaagcctctaggactcttgagtacagggcccctccgaggggtggaaggtgcagaacacccatctcatctggccacagggcctttttccagggcacaccatggtctcccagatcccgacgctgctgtgagcagcagagtgactcaggccacatgctctgagaggggctgggaggccaccgtgggccctgccatggggacagagagcctgtgggaatggggaggcgggaggcagaggacaggctgtctggtgggtgggacatatggttgagagcctggagccaccaagctcgggtgcatgaccccctaccccctgccccactctcctgcagggggtacatgagtccaggggcgtgactgaggactacctgcgcctggagacgctggtccagaaggtggtgtcgccatacctgggcacctacggcctccactccagcgaggggcccttcacccattcctgcatcctgggtaggggtccgcctgggccttgggctggggcaggggtgaccacgggccccatccattgtgaacaaatgggcaagccgaggccccacgacagaaccaggatctgactccagactggttctcagccgggcagcagcccccagcctgccatatgctggcctggacgtggggatccgtgagagtgggcacacaccctgagcggtgatgtggcaacaccttggagagctccaccagacctccgtgttccccaggaggccacattcatgtgcagtcttgaaagtcagaagtgggccaggcggagtgctcggaacatgcaaatgccgaagcttgaggactcctggctcagttaggggacccaggctgggagggactcggcctgggggtgggcaggctgagccctgtgggcagcatcccgggactgcttggcgcgtccagcacagctggccacgttgctcccttgacggagggcctctgggttccttcagcaatgtcccttgagtacctgttgtgccccatcccgagcccacgcccttcccctcccgcgggggaggccgaccagtgagtctcctccacgacccaccattagctggaagctgggagcatcccaggcagaggggacagagctggggcaaggcccgcttgggactatgccctcctcatccagaggggctccccgtccccacctgctggtgtaaaacctgcccactggtgtgtctcagctcaggcagtgccctggctgctggagaactttgagccacccaggcttggtgtagccctggatggcaggaccccagcccctgcctgatgggacccgcatcctctggtctgggaaaggcccctgagccgctcgtgtgtgtcgcccgccacctggtggccactcttgggattgcagggtcctgcatgggaacctgaaccctgccccccaaccagccttggccacctgtgccactgcctcccgcccagatgaaccaaggggcctcctccctgggtccccacgtctaccctcagcccccacagtctattactctccacgcagcggccagcgaggcccatttacaactgcctggctacaggctccccgcatccccaggatggaatccccgccttgaccttacatggagggcctgtccccatctgctcccatcacagccccacaacctggccccatggctcgcctctttgggcttcttggccctcccaccatccccttggacaccagctccagtggggcaggggctgcgcctgcctgggaaagtacaggtgtccagcaggtgccaaagtccatacacttccacaagtggggaaactgaggcacgggggtgaggtaacttacctaaggtcaaacagaggtcgctggcggggtgcaggttcaaacccaggcatttgacttgaggtcctgtgtgaccaggctgggcctaggctggagaagagagactggaacctgagctggtgtcagggcttgtggcggtgggacctgctgagccgggccccgggtcgggccttccctgcagctgcccctgcacagggacccagtgtgcagtgagcagcaggtgccaaggcgggcggggacccaggtggcctctggtgtgacagtgcccgtgtctctccccagaaaagcgcctcctccgccgctcccgctcgggggacgtgctggccaagaaccctgtggtgcgctccaagagctacaacacgcctctgctgaaccccgtgcaggagcacgaggcggagggcgcggcggccggcggtaccagcatccgcaggcactctgtgtcggagatgacgtcctgccccgagcctcagggcttctccgacccgcccggccagggccccaccgggaccttcaggtcctccccggcgccccactcagggccctgccccagcagactgtaccccacgacccagccccctgagcagggcttggatcccacccgcagctccctgccccgctccagcccggagaacctggtggaccagatcctggagtccgtggactcggattctgaagggattttcattgactttggccggggccggggctctggcatgtccgacttggagggctctgggggccggcagagtgtcgtgtgaggcctcacagctggccttgagtttttactgacacgtccctgtgtgcgggggtgtccatgtggcgtgtgtgtgagtgagacttttttactgcgtcccgtcccgccagccctatcggcctcgtcactggccttggtcactttgtatttctgtcttggttggaaataccatcagccttccttgctcggcccaggtctgtttcaggcatctgagtcggcgtttacccaggggccgggccagagacgggggtcggccgctcgctcccacgctcctcctgccccagccctctggtgtccacacctgcccacagagaatgtaaacccagtgggctctgcccacgccgggccccaaagtgaccagactccagcacacctgtctcctcctgcctggggtggccatggggatggaagggggtggaataaaacctgtcaacctggctcatgtctgcagtgcctgccctgggggcgccccttcagggtgctcaccctcaggccttcgctcccttctaggg

SEQ ID NO: 7324 - DNA, 104 bp, Homo sapiens
ccaacactttgggaggccaaggcgggtggatcacttgaggtcaggagttcgagaccagcctggccaacatggtgaaaccccgtctctactaaaaatacaaaaat

SEQ ID NO: 7325 - DNA, 869 bp, Homo sapiens
gctgagccgcagttttgtcatctgtgatacgggtgcataccaaccctgtggagctctctgaagctactcggaatgggtaatgtgccccaggcagggctcagctgggcaagtaggggagcaagagcagcctcgggacccaggcctgggggacaggtggtcgttgaacagaaagccagaacctggtctgagaaccactaagccaggctgatgaggccgagatccgtggaccaacctctttggctcccagctccatcatggagcccgaggtggcctgaggcggggagtagtgggtgaccattagcaacatgggcaggagggttcccagcggtcacctcaaggcaggaggaccaaagaccagaagccgtggcagggagttgctgtctgggctctgtccacaccagggtgctagaccctgtgttctgtcccctgagtggtgggggttccatcgtggggggtcgagcatccctggcccctggatgctgccgggcctggggtggcccagggactggtggcccctgctggctggcacttggacccttggcaaggcagtccctaagctctcagtcctcctgccctggggcaggaggggaggcccctgggcagcagccagcagcatccccaaccacagattggggggctgcagtccaggagggtgggtgctgggcctgggccctgcagcagctcacaggactcagtgggggccccaaggaggtgaggaggctgcactcccactcccagaaagcagcagcccaccaagagggtgtgtgtgtgtgtcctagccttgttcccaaagatgtcagaggtgatctgcattcagacatcttataaattggtaaacacctgtaatcccaacagagtctcgctctgtc

SEQ ID NO: 7326 - DNA, 22459 bp, Homo sapiens
cggggtttcgcagcgttcatgaacctttaattcattatgaacctagaggcagggacattaggcaaaaaatacagcgtatccttcatctcgggtggggaaaaaccagggcactgggttttgccgcgtctttgcacagagtaagacacagagataccttcgtggggagagtgtgcagctccggcctgcccttctgtggcccatctgcgcaggccgcccaggagcccaccaggggatgggtgtgacccccaagggacaagggcagcaggggcacccgcccgcttctttacaatataaatagcattttcaaacaacataagaatacagtgtcagcgccacgccgggcgagggctgcgtgcagagggacacctccacgttttggctgacaccccccaacctccccgaccccggccctctccagggcaaccgcccccctcccccaccaaggaaatgaaaggcttgctcctgcgtaacactctctctgttttccttagtcctctctagcccggggactgttaggacactcttttataatataaacattgcttttttttttttttggagacagggtctcgctctgttgcccaggctggagtgcagtggtgcaatctgagctgactgcagcctcaacctcctggactcaagcaatcctcccaccacagcctcccgagtagctgggaccacaggtgcgcaccaccacacctagctaatttgtaaaaaatttgtagtgatggggtcttgctatatagcccaggctggtcccaaactcctgcctcagccattttttgtttttaatataagcaaattatctcctccatccctccctggggcaggagacagctaaggtggggaaggctccccagaggggtgcagagctggtgagggagaggcacctggagaaggcgcttcccagcctgggctgaaggccgttttttctctatcagctcaacccactcctaagaagcagattcccctcaggtgacagcagcgtgggtgggtggagcgaggacaccaggcctcgtccctgcccggaagcaggcgaaaggggccccgaaggcctgcctcggccctgtgtcccccgacctgctcagggttgtacccgaagagctgggaagctgtccacactcactaccaaccagaagggcctgggggcctccctcatcctgagccataggaggtgcaggggtgctttgtctgcaaggaagcctctggaacacctgcgtttctctcaggtgagagaaacaaagatagacaaaccccaggagagagtttattctgcaaaggtgggcgcagacggagggaggccccagacccccgggcttcccctggccaggtgcacaggggcggccaccagagagcctgggcctcctcccagcaggcacagagtgggcacaggcactggcaccagaccatcaaagcccaggagccggggtgaggcgagagcgaggccgtgagtgaccgggctgtgccgaaaccggggcgtcctgccccccccccgaggctcaccctccaattaccgggtctctttccctgcctggtctgtagccaaatcataatattttaaaacaacaacaaaaaaacagcgagatgctctgacctctcagagaatcctggttctgagaaaaacaatgtgtttgttttgttttgtttttcttaaagccacaaatctagaaaacaactttggggatattttcctttgttttcctttttttcttgcttttttttaaacaatatgtatttatagaaagagcctcacaaaggtggtttatgtacagaagtgacaatctcaaaggttgctcagtagggcattgcagtagcaccttttcgagaagaagagagcttacatggtttaaaattctgagtagttgagtggggtgctcccctggccggcccccgagcccgcctggccctgctccctgagtctggggccgcgtgcggcgtcccgctggctcctgtcgccctagggggcacccgcggcttggaggtggcctctcgggggtcggggacacgaggacaggaattcacagcaagcgaacgcccggggcatgccatggcctccccgccgggctgagggtcgcctgagcggccagctgtcctagaagggggctccgggccggccctgcacctgcaggaggctctccacgaaggccacgtagtcctggctccgcccggagtcctccgtggcaagcggggtgcccacacgcgggcgcttggcggccttggcctcctcccccgagaaggcgggctcctgcggtgcccccgtgctcagtgactgcgggagagcggaagcacagtggttagcacggtggagacactctgtgcggccccagccactgtctatggcctctgagaggagctggctggacacagagccctgattgctgtgggggctgctcagcaggctcctgttttcgtgtttgtaaacccctgatcctgccagcagaggggccctgcactcggccccagcctctggccccctagtggggtgggcaccctggctggggctgggaccgtccatctggcagctcccatctgttttccgagggacccctctgcggctgagcagctgtggccaggaccaggaacctcccccacgggctctgcccctcaacacctcgcctctcgcctctcgattagaaagagaataaaggaagcccatgagggctgggggagcgaaagctggagctgcctccgctgcctccaggactcaggctcccgtttaataaggaaaaacctcaggaaaagcttttttaagccgacaactggggtgcccgtacttcgcctgtaccccaaaacctgtgatggttcagaggccgccctgtgcagggtggggcagcgcgggtcctgcagggcacagggggctgggagggtctgttctgcattcgtgataaggggaggggcggggcttctccaaccctccctccccacattaacggcatcgcccaggagctgcggcaccaggagtcaaggcaaaggaagggtctcctgccaggagcccatggaccagctgtgctggggcggccgggacccccttccagcagaggtgcaagaggagggggtggtccacgccattggaagacgcagtctgtgccctgcctcgtcccagacgggctccctgagtcacccggagccaccaggccagcctcgcgcactcaccagccgagagcggaccctcttgggcagctcctcctccagggtgaagatgtccccacgcttcaccgtcagctgggacccgtcctcaaactccacctgcagggggatgtggctctcaggggcctggcactgccaggatggcaggtgctccaggcaggccacggcctcaagagctgggaggccagcccccttgggtgcatggggcccgctagaggccacatgcagccaagctgaagctcatgtccacctctgacaccgcctgcagcaaacaaggatcaggctgagggtcccgtaccacggggcaaggatgacggaggacgggacagcctggggcagaggcagggccccgcagcttccacatggagacagaacactcacccctcacctcctcccagctcaaaagacatctgtctccatgaagacacagccccaggacaaggtgacagagtcactggtggacacagagccaggcaggaggcgcagtgccctaacagggcctgggaggcaggggaggccggacaggcggactcaggggcctgagctcaggagcccccaaccagaaggtgaaggacagggtccctggcttatgtgtggccctctgaaaacagctcagtcacctcttcccttcaactcagagaaaaatcacccccttccagcctccccagctggtgccttgttccaggtggcagatgcctgactggtgaggggcactgggagcaccccgcttcctcctcgttaagcttggtgccagctcaggctcgcggagactctctcaggggccctctggcaacacaacactgtcccatgaagggcgtgccagggaggggcgtgtctccaggcccacctcataactgcgatgggcgccgtgttcccaagccaggaaaggtgctggggtcactccctgggcctgactgccgttctgctccagggggagaaggttcccatatcagagggctcgcttttcacatttaaaaactcaaaacaagccaggcatggtggcatgtgcctgtggtcccagctacccaggaggctgaggtggaggctgtagtgagctctaattatgtcactgcactccaggctgggtgacagatcaagaccccgtctcaaaatgaacaaaatgcacacataagactgtcacagaagcgtacaaaagtcacacactaagaccatgacggaagtgtataaaagtcacacagtaagaccatcgcggaagtgtgtctggggctagacgccccacgtagtgtgcagcgggggggcccgggatcgcagcacctccctctccaagggagcacagaccctgccttggggcagccaagcctgccggtccctgtgactcctccagggatgggtggggatggagacagacgtaggccctggagcaagtgtctgctgtgggttccacatgcctcttggccggcgcaggcggcgggagaagcagggctgggagtgcccagtgtggactctcagatggccggttgcctctgggccgtgtcctgggacgacagcacacatctctcggggatgtgtggaggagcctgctgggaaccaaggacatgggtgccaccctctgccccgtcctacccatctcatttgtagaggaaagccaccgggagaaggccccttcccagcgtctgtccggtgaggagagtctgggtgaaggagtcctagtgtcggagccccagcaccccggaaagcgatttccacccccggcgtggccaggctccgctttgccacgggcagcagcgggttttggaggctccgctttgccaagggcagcagcgggttttggaggctccgctttgccacgggcagcagcgggttttagagctcccactgcaggagtcccagggcccacctgctgcctttccccagctccccggccccgactcggcctctcggcttctggcaggcgtggcacacagtgattcagtcaggcacagaagcagccttgccaggaggggaaggcgcgttctagaaactcagtggaaactggctcaggtttctgggtcaggaagactgcagagatccgccccagattctcaggagcacagaaccgcctaggaggatggcgctcacactgccgggtccaagtgggctccagggaaacttctgtgcctgggtcatttgggaactgggggctgactggagactcaggctgatttcctcccagtggcctccctggaacgtgctttcactatgagtctccacagggcgagttctgaaggcggcgtttgctttttaacattttgagaaaactggatatacttgcagctacaggaaatcagaggcgtgcgcctcggcccgggctccctgtggtgacgtcttgcccggcacgtctcagaagcatctcgaggggtcacgtgcgagggaaacatgttccaagtgttccggacaggcggggaggctcttggggccttggcatgtgggggtctcagccactcggcctcgctgtcacctgggcccaccccagccacccgccccgctgaccaggcccttggcctcggggcaggcagctccagccccatctccttggccaccacacagcgggcgtttgcatgattgtgtgatcgaggtcctgccgccacctcgcaggcaggcgcgcactccacggtggcttgctggcttccgataccacccattcctgattccacagcctctgcccccccgccccgagcactctggaaatgtgacttttttttttttttttttttgagacagggctttgtttcatcacccgggttggagtgcagtggcgcgatcttggatcactgaatcctcaacctcccaggctcaagtgatcctcccacctcagcttcccaagtagctgggactaaaggtgcgtgccaccatgcccagctaattttgtttttttgtagagacagggttttgctgcgttgcccaggctggtctcgaacccctgtgctcaagcgctctgcccacctcagcctcccacagtgctgcgatcacagcatgagcccccgcgcctggctggcatcatctcatttctgactgtctcattagctcggcttccttgaggtgagctcccctgacgctggccctgcctgggctctggtgacatgacaatgatcctgggagcacttccttcgccaccagggtgggggctgcgtcagcgcctcttctgtgggatgttgtcaagacccaccctgagtctcccttgtcattttccaccacagttgtgctctgtgtacgttataaatggctatttatctatttgtgtgttttctatcatctccataggtttcttgagggagggagagagactggcacatgctcagcctgatctctggagtaaacttccatggtgttctagaggtcctggctcaacctcccctcctcggagtccagtccgacctgcctgggccagactctgaggctcccggggcaggcggagggtgttgtcactgtcacacagaccccacccatcctgccgtgtactagatgcaccagaatgcttcccagcagagtttttgtttttttttttttttttttttttggagacagggtctcagtgtcacccaagctggagtacagtggctcaattacagctcactgcatcctcgacctcctgggttcaagcgatcctcccacctcagcatcccgagtagctgagactacacgcgcacactaccatgcccagctaatttttaaaattttttgtagagattgtggggggggggggggtctcactttgttgcccaggctggtctcgaactcttagcctcaagtgatcctcctgcctcggcctcccaaagtgctgggattacaggtgtgaaccaccgcgcccagcccacctgaaactcataacctgagagaagagctgccaggtgagctgagcagggattattctcttttgctgctgcctgggatgggctaaggggtgcaaatcgaccttgcccttggtctaagcctaacacaatcaggaagtccaaggagctgcctgagcctccccccagggaaggctggagctgagcagaagtgacagtgtctggagattggtggtagctcccacagggctggccatggggatggcttgtccccgaaaccacccccttctcaaggagcagggaagaccctgcaaggtccgagagtggtgaccgggtggggccagcctgcatggcaaggaggtcctggatgctcagtgacaggtcgagagtggtgactgggcggggccggcctgcacggcggagcggggggggtcctggatgctcagtgacaggtccgagagcagtgaccgggcggggccggcctgcatggcaaggcggtcctggatgctcagtgacaggttgagagtggtgactgggcggggtcggcctgcacggccgggggtgggggtcctggatgctcagtgacaggtccgagagtggtgaccgggcggggccggcctgcacggcggggggtaggggtggtcctgggcactcagtgacactcgatcatttcagttcattcaggtctggcgggagatgcgggcgggacctttccttaatgcggcctcgggaccatcgcaggggttagggttttcaccttaaccgacgtggtaaagagctgaactccgatgtttacaaagaacttggggctcggggtgcgagctaaggccaggacgtcaccgactgacccgccgcgtgacccgaggtgactctgagtgaggcttcgtttccactcctcaaatggggcagatgtgactggaagagacaagctgtcgcctcctcccgggagcctcgagccaggggagctcaagggaagtgcggcaccaggcttgggagcgacgcttctagctgctgggatatgggcagctctcctcctaaaattccacgcttttatttcatttaattaattaattaattttttgaggctgagtctcgctctgtcacccaggctggagtgtggagtgcagtggtgtgatctcggctcactgcaaactctgcctcccgggttcaagcgattctcctgcctcagcctcccgagcagctgggactacaggtgcctgtcactaagcccagctaatttttgtatttttagtagagacagggtttcaccatgttggccaggctggtcttgaactcctgacctcaagtgatccacctgcctcggcctcccaaaatgttgggattacaggggtgagccaccgtgcccggtctaagattccacacttttaaataattcctcttccacagtcatgagaagaaactcactaccaatttgattaaaaaaaaaaaaacccaggggtactgagctgtacactccaaaacggtgaaagggagaacttatgttaagaaaaattgagaaggtgtctcaaagggaaatgtcacccgagtggaggcccctttagctttgaaaacaaacaagccctgtgcttctaacttaggcaggcgagccaaggctcagctgggtcctgcgggcctcactaaccatggcccacacccgccagtgccccaggcaaaggcacctgggccaggggtgtgatcctcctgtccccgcacctacaagaagagcttggtgaaggcatggcgcggctgccagatcccccgcttacctggtagatgtggctggtgacggaggagatgaacttggccttgtagaggttgccgtcagtccaccggagctccaccagctccccctcggaagggggtcccagctggacacagtccctactctgcagggagaagaggtgggaggtgaggtcctggccacactacgctgggggctgtcgctgggttttagaccctctccgcgctggcaagtgaggttctctgcctgaagccccaaagctggctgcgggggcccggggtagcggggcggtgcagagccctggctgcgggtcgctttctgctgaacagtgagcggtgcttttcctgaaggggcctggggccctgaggacaaggggaccccatgaagggatctggagtcaggccactcctagcttccccccgcccacccccacagctcaccgtgatgctctcagggtacaggttgtcgctgtgctcccagcctccccccgccccctgccccaccccacagctcaccgtgatgctctcagggtacaggttgtcgctgtaggagccatcgtcgaagttcacttcgtagcaggtctgcgaggcggcaccgatgacgcgacagcggtagtacagcccgttgcggttcttggtgatgaccacctggcctagggacacggccctcaggagttggacctgggagggtgcggagggtgtggggggcggtcagcgcgggtgtcggtgggggcgggagccaggggctgggggcaaggaggcgggcaggcactcacagcgtgaccccccgacttgtgcttgaggcaggtgatggagaccacatagggccagtcgtccggctccatgagcacgcctgcggcgtgggcgcaggtcacgtggaaggacgtggagcagtgctcgtaggagcactggatacaggcacctgacaccttcttcatccgcttccggcagtacacgcatttctggggatggggacacaggcaggggcatggggctcgagcttccctagggaccctggaacggagtccccggcccctcccggcacagccttcaagggaggcatcgcgggagtggccctgcgctctgcccagtgagggttcccctccacagcccagagcccgcagcctccctggccaagccctccagacccactgacccagcctcctgctgctcagcctctggggagtcctctcccatcccccctgcatgtcactggctgctgggacagatcagcccccggggagtcctctcccgtccccctgcgtgtcactgactgctgggacagacactgaagagccccacgtggtgtcgctcagccagaggaaccacgtggcgacagagatgtgccctggggacacagaggtgagtgcagaccatgtgaccccgtgttctgcaacccccagggcaggccacccccagacacaggaagtgggctcgtgggcacagggtaggggatgggagcgactggtaatggggcccattcttcatggggtgatgaactgttctggaattagacggtgtgatagttggcacaactcagaatgtactaaaaaacatagagtggcacactttagaatggttagagtgaaggattttttctttttttttttgagcctgggtgctctgtcacccaggctggagcacacggcgcgatcatagctcactgcggtctccaactcctgggctcaagcaatcctcccacctcagcctcctgagtagctgggaccacaggtgcaaccatcatgcctggctaatttttgacttttgtagaggtggagtcttgctatattgtccaggctgctctcaaactcctgagctcaagggatcctcccgccttgacctcctaaagtgctgggattacaggcgtgagccatcgcgcaggtcctttacatcggcttttaataagaagccctgagagaagcctccttggtgaggagggagcaccggagagccacctttcatcccttgaggctcccgctgcaacacctgcccgagccagcaccggggccctggcggccgccacacccacgccaggcccagctaagcatttaataagcggcaccgtcaccactctataaaccacgttcaaaagccagataagccaagggcctggagcagggccgatcgacggcatcgagatctcgttattaaactgtaaatacccaattctcccatcacacaacacgcgccaggcatcactccagcacggcctccccctccggcagagtagccagtgtgtaggagtggaggctgtgctccctggggagcctgggggtgggggagaggccccacctggacactgtcaggtggggttgctgagccgtcttgaacacgtcacccacaggcctccacccctcggcccaggcccaggagaaacccagccccggggcaggctggtgcccagcaccatccccttccgcctcgtggtagcaggcagcccatgaccctgcatctccacgttgtgaaaagcgtgcccccggacccatgggaccatttgtcaggagctgtgcctggggccgaggttgcccagagccacccctactaaggcgaggtccagtcacgccacgcgctgtggccacaggaggtcgggcaggcgttcttggccgtcacctcccttcctgggagccgcagtttgaagacccacatccagtgctggcctggcccaggccagtgtgtgccggggagtcagggtctacggcccgtggggggcctggaagggcccaggcactggtgtttggttcgaagttcccggctcggtgtccttcctcggaggccacagggctgtgaggacgacgcgggtgggcttcagaggtctgcagagcaccacggcctggaggaagcaggtggtcaccgctaggtaccacccatgaagctgtgtcctcagcctgtcacacactgaggcgcagtggctgtccaccaacctgctttcgcaaacaaccccaacccctgaggagcagagagcccctccctcctgaccgagccctacccctccaggcaggactgtgggcagtggagagagctggtgcaactgcccacccctcctgctgccctggaggcgcctccccccatcccaagcccctcccagacctcccagatcctccagggagctcccggtgcttttgcctgctgccaggaacctgcccagccggtaggtgagaagcttctcagcagcacggccttgagaacgtggtgataacttggcccaggcgggcggccagccggagccccctgactcaccaggactgcctggagccctgagccggtggctggagaagtcctggagacaaactgacggatgggtaaccaggagtgagtgccccatgcctgcagcctgcccgtggcccgcgaaggtggctgggcggttgggcgagcaggaattaaccgccgcctccttgcaaagccccattaagcagtacaagcgggcctcgtgtaaaaggatttttaattcatcgttacaagcaccggtaatgaagaggctgcgttctggaaatgtcagatgatccataaggcgtcgggcaggaggacttatcactgcaccacgcatcgcaccatcactccacctgaatcatgaggccttttacgcccacgtttgtggactgagtcactggtgcctcggaagcatcacccgcgggctgccggcttcctaatcgcctggccgtgcccggccaggccggcgtgacccactgcacactccactccacgaacaaggaaagagggctccccttccagatgagcctctgtgactgcctgcacagccctgcccaggtggcccagcacctgtgggctccaagcatggcatccaagcccgccgggctcgtgggcacctcgcaccagtgcatgggagcccgggctttgtggccggcatcagtcccacccttgtggtctccccagcagacccaccctgccagactgatctgtctgcttccagccccacctccacgcaagcctgaatgtcaacaccaggcactgtgtccgcggctgggaagataaaccaggcaggaaaagcaggcaggacgctgctgggtgctactggctgcgggcccagcctccaggggcccacgagacacgtgtgcagaggccggagtgcacagggacaaatgcgtcctccccatcagcgctgccacatgcacagcccttagtggggacgcggccccagcaacatctgcattttgctctcctcatctttttttttttgagacagagtcttactctgtcgcccaggctggagtgcagtggcgcaatctcagctcactgcaacctccgccgcccaggttcaagcaattctcccgccttagtctcccgagtagctgggatcacaggcacgtcccgccatgcagagctaagttttgcattttcagtagagacggggtttcatatgttggccaggctggtctcgaactcctgacctcaggagatcgacccgcctcggcctcccaaagtgctgggattacaggcatgagccaccaggcctggcctcctcatcttctttctgggccaggtcccaaggctctgcaggaagctgatttaaagggccagctgagtgtcattttccagcaggcgtggacagccccaagtgccttgtgcgcaggtgggctacagggtgtgcagcagacagccctgcagggctgcagcccaggccatgatcggccaagcccctccaggccccaggctcctcacctgcagaacagacagtgcaggatgaccccacaggctctcactgtgtggatcaaatgcagtaggtgacactgggggcctgggggagcgaggctgcagatttgacaagccctgagcagctgctagtgctcagacagggtggtccatgctttagggagtgggcccagctcacaccactgcaaccctgcatggcggggactgtggcaaccccacagcacagaagggacggccgaggcacagagaggtcgaggaatctgtcccaagtgcacagccagctggtggccagcactgaccactcctgactgccctgtggctccaaggggttccccaaaggggggccatcattgctgagagcaggaggaagcttcacaagcccccacgatgaggccccgctacgcccaaggtggctgcgcgcatctacggggggcctcaatgtgcaccaagagtggagcagcagagatcctccaactcaaccacaaaaggccaagcaacccaggcacggaatgggcgaaggagcagaacagacgtttctccaaagacggcatgcagatggccaacaggactgtgcaaagatgcccagcgtcactgaccgccaggagaacacaaatcaaaccatagcgagaccacctcgcacctgctagggcggctgctacaaaaaagtcaaaggtaggtgtgagtgaggacgaggggaaggggaaagccctgcacccggggggtgcggatgggagtccgtccagccgcaagggagagcagtttcctccagtgctaaaaacagagctgcccgacggtccagcaagcccactgctgggtctgtatccacaggaaatgacatcagaatctccaaaccacaaccacactcccacatccgctgcggcgcaacccacaacagcctgaaggcagagacatcggcgggtgcccggatcaacacaacgtcgtccatccacatggtggcacatcactgagccaggaaaagaaggaactcctgccatatttgggttgaatgaatgtggatgaaccttgaggaaactatgccaaatgaaagacaccactcgcgcctgtaatcccagctacccaggaggccaaggcaggaagatctcaaggccaggagttccaaaccagcctgggcaacatagtgagaccccatcttttaaaaaaaaattgggagttaacctaactttttggcacgtgcttgtggtcccagctactcaggaggctgaggcgggatgatcgcttgagcccaggagtttgaggctgcagagagctgtgatcacaccactgcactccagcctgggtaacagagtgagagaccctgtctcttaagaaagaagccggtcgcagaagaataaagactgtacaatcccactcacgtggggtctataacacaggcaaacacacagaagcagagtgctgggtgctggggtgggcggagggagctgctgcttagcacgtgtgaagtgtcagttatacaggacgggtgagcgggccgcagagccctgctgcccaccactgggcccgtggtgaatgctgtactgaacctcagatgcttcttaagagggcagatctcacgctaagcattgttacaattgtttgtttttttttgagacagtgcctggctctgttgtctaggctgcagtgtaatggtgccatcacagctcactgcagcctgggtatcccgggctcaggcgatcctcccacctcagcctcccgagtagctgggaccacaggtgtgtgccaccacgcccagctagtgttttttattttttttatagagatggggtctcatcgtgttgcccaggcttgttataattattagaaaaacagcaaagatcagacagcccggttgtgtcggggcacgtgcggtgcctctgcttttgtgggaaggtggaaactgcatggggtgctcgattctgcagaggatgcccccaaggccacacctgacggggcctgcttatctctgccacccttgatgccttctgatttttgtaccttgcacctcggggaaggattcaaaaaataacacacctgctgaagtcgggatcactggcttcctgaaagctgcccaccacccccatggagacgcagagcttggaggaaagaccgcttcagatcgcgcaggtggggagccgagcatggccggcagccctagaggcacgggcagggtgggcctcgaccgcaaggacctaccagcttccaccgctgctcggggatggcgctgatgtccacagggtggcgctcaatcacgttcaggaagcgcgcctcggggactgcgatggcacagatcacgtggatccacctgggagggcaggtgcagcggggtcaggtgcgcctctgaggacctgggctggtcacagaggggctgggcgtgatgtggctgtcggctgggtcagggcctggggaacttcaggaaggtcggtgcaggcgtatgctcctcctcagccctggccaccccatccatgacacagggcggttatgtggaggtgatggtcaacccctaggcactggggtcacaccctgcagagcctcagcccagggcaggctcccctccggccctccagccccaacgcgcggtgccacccacctcctatcggtggtcatctgcagcgcacctcctcgcaggttgcacaggcagcactcctgtggagaccagacagccctggatgagcagggctcggagcaggctccccacacactgcttggggcctgatctgccaaccgtccccagcccacggcccttatatttcaacctagcagccaccaaagtgacgggtgggaatcccttgggttccaccccctcagggcagaggtgaaggaacccaggcccacggaggggagactacgccccaaagtcaccccactggagtggggccggggcccaggcctctcagagcaccacccccgctgcggggagcgagttaccgcagtccaggcgtgggccgcgcaccgggaacacgtccagccttcattgaccagctcgggacggatgccatagcaacctggaagacagcgggggctggctgagatctggggggcaggtgagacttggggagccgagtgaaactcagggggaggggccgggtaacttgggggccagtgtccgtatgtggagtgacgaggcctccgcacgcagctgcagcattcagggtgcgtgctgttcccaccctctgagcttcaatccaggccactgcatgtggagcgagagaaaggtctggaagctacttgtgtggaaagaggacgcaggaggggaagcagggaccctgagctccagctgggtctgccgcgctcagcctggtggtgtcttgagggcccctccttgttgggtgtctgcacccccaacagcagctcctcctgctatgtccagaaaggccaaagccgcaagggagactcactgtgggatgtggccctgggtctggaaatggggaaagggcacaaaaggccgaatcatgcccccagagcgagggcaggggtgccgcctgccccccagggctctgcctctgctggggatcactgcccccagtgtggaaggggctctctgccagtgctgatggcccactgaagaggctgggggcggggacctcactgcctccagagcagcagggtggtgggcacggctgggggtgggggcgtctgctggggtagcctggctggggcggcccggctgtggcaggcctgggaccctcggcaacccttcccccagggagcccatctgccccgggggcacatctcaaacccaggcccagcaaagcagagtgaagagcctcccagccaggagacaacgcgagcccccaggcaggccaccgccaggaggaaaccgacacagatctatggctgccaggggcacagaaaattaaacgtctccagagagccctcctccttccctgaaagtccaattcctgccaccgcccccccgtgcgtgggaaagagacagacatccattttcttgtctgtgaccatggtcgagcctcaggactggggaggggtccctgagagcagagataaatcagacgccctgaccacgctgcaatctcactgtgaccatcagtttcaaccacagccacaaatcacaggcgtagcggctgcctgagttcctcctgtcgcctcccaggccttggagaagactcggcagaactgtccagagggccagtgaggaggaaccctgcctgggccaaggtcaagggcagggatgtttgcccccaaaggctgcttggcagagacagccattctcagggaacacagcctgcggagagacggggtgcctggcccatttcttgctctggccctagggtgagcttctgggtgtcagggacagggtgggatgagcccagtgccccttggagcagaggcttcctccgcagaggctggcaccagaggccagcacctgggcctgcactggcatcttctggatgctgggggcggtggaggccctgtcctgccccagggtggcatgcggtcatccagcccttccatggccacagcctttccccctgctctagatggtgggaccacaacgggaaggatgagaaagtcagaaattgcaggaagtcaccgggggaggcccctgccctggccctgaaagtgcagcctggggagaggggccggtgtggccctccgcaggggaggatggagcccccaccggcacccccaccaacaccctgaaggagggcgcagctcctctgggccccacagtggcactcactggcatggacctgcaggcagcacttgccgcaggcgatcagggggctggtcccgtcgtcgccgatgtaggagttggcaggcagcggctccgtgttctcaccgccagaggtgaagcacatctcagggatgagcggtcgggtcttctgacggcttttggagggtaatgtggccgggcagccctttccgagggaggctatgggtgcctccttctcagtctgtagggcctgtaggggagaggcgaccttcaggggacagagccatgtgtggggcaggcgggcgggcggcgcggacctctctcagggcacctgccccaggcttcgacaccccctggctctggagggggaggtcggggagatggccagagccacctcggcccctcttctcactcctccagaaagtcaggatccccaaacactgtctgaccctgtccccaacccgccgaagaccttcccatgagggttgcatccagacacagagctcaggctggcctgtgtggcccctggtgctgggtggcccctggcgctggggtatgctgggggtggtgtgtgatgaacgagtctccacactctgcctggcaaggggaattaggaagacgcatgtctgaagtggcattccaggccctgtggctcccagcagcctctctggcctcacaaaggacagcaagtgcctggagacggtgtcggctgtcaggtcttgtttgtctcaggaaccagagcactaaatccagctcccagcagcagagccccaagacaggctcaccaccctcggcacagcactctccctggctctgtccacccagacccggccggcgcacaggcctggggggtgacgtccccaacccagggcagctctgctgatgcctggacatgcttggcatggggctaggagctgggagtgcaaagcatgtggccaggtcctgtcctggggaggctgcatgcccaggggaagagagaaggggggatctaagagatccgaggaaaacggctgggctgggtgctgatgcctgggatggccgtgggcagaggccagctccccatctgggtgcagaggacaggcgaggccagcatggaaagagcaccagaaacaggaccttagccaggtgcccagctcagctagacaggccagggtttgcgggagccccgcccggccacccaggtggtgtacctgggccttcactgcactcccacaccacccggcccatctcagcgcccaccagacacgggcgctccctgagggcagtgaccccgagcctccgcagcctccctctgccccatccaccatggctcatgttgcacatgggcacgttagtaagcttcattccaataaaacccagagaccaggctctgcctacggctgtcaggaacaagccctcacaactcggggtgctggccaacaccctgccctgcgtgagagagggaggcgtgtggggtgcccggtccctcgccctctcccaccgcccctgcctggggttctctgggacccgtgaggcccgcctgcccacctggcagtaggggtagaagagcgtgcagatggcgcagtagggctccgtgcgcgcagccgctgcgttgaacttcctctcggcctggaagctggccgccctgttcttccactgcagagacagcagcggcctcaaggcgtccgggtcactcacatcttcctccccggagaaaggggatgcctctagaagaacagaggggagagggagagagacacttgagccccctaaaaactcgtccaaggaatcaccccaactgcccaggggatggccccgggtctacagccctggctgcccacagggtccctggcccatagctccccctccacctgcctcctggctgccccattctccacaatgcccatcaagctgacactgcagcgtcccatcccatcaacaggagggggacacgtctgtctcggctgactgccacctgaggccagagcccccaaacatggttcctctgagcccctcccccaacacctggttctccctggacatccagagccgtccactcacccagggccttctgggccaaggactggccaaactcagtgcccagccctgccccggctgccctacacccgtcctggggtctgagtctgagtgggggcgtcggcagtgaccagccgagactcagagacactgtccttcctgtcttaggtgggcacagactcactgaactcaagggaggtgccagaggagtgcgacagggagtcaggaggggccgtgaccagggctaggaagccaaggcagcccgccccaggaagagctgcgtgacggggacactctcccggaaggcaggtctgctgctgagaagccgcggcggtctctctcccacctgttgcctgttcccattgaactctaatggcctccattgccagctgccgcaccccaatctccccacgtcccctccctgcatctcctgtggacacaggggtgctgtccccaggaagtggggtgcccactcctgtggcccaatcctcagcccaacctaaaggggagcctggggtcctgggatcagcccagctgtggcactgcccctggttcacctagaggagggcagggcagggcagggcaggctccccgaggtggaggcccaggtctcccatggtggactcaggaagcccttaggccaagactcctctgaaaacccaaaccagacagtaccgccagcggagcccagggaaggccctaagcggccccgaggccctggggatgagaacagagccactggctgcgtctgtcactcacaaccccagaatgcctggggttctggggccgtgatggtctcacaggcaaatgctccggtctcaccaaagggtcacagtggggtgtggggagtgggggagtccacggaggccccagagatgccttctggaaggatacctgggtagaaggcaagaccccttcccaagccagcccgcgggggcccctggtcattcctctgtccccgtgccgattcctccactcctgggagctcccgccctgtgatcccacgcgcttctagaaccctcctctccccacccctccaattgcatgcaggatgaaagacgccatccagaccattttcagattctacatgcatccccaatgaaaggccgaagcagaagttgaaaaactggcttagcaggacttctgcacacaagacagcagctctcggctgagggttaaatcgaagattccatctcctcccctcccactcaaagcttcgcgggagccttttgttccaacctctccaagtcctggagaggcctgtgctcagccctgggaggaatcttccatggggaggtacaagctccccagccctgaaccgcccatcatgggcagcccagccagcagagcagagccgagcatctctaacagcagctgcctccccgcacgaccacctgccccagtgacagcctgtcgctacggcagagccacagaaaggcctgggttcaggggaggagacccaggaagtgggggaaggaagccgcaggggagccaggccccccctccagcagcagcagagcgcggagcagggccgatgagagccgacctggggaccccccactcaccctcgtcacttgaggcctcctgcttcaccaccgacagtggggaccgggtgggcggccggcccaggggatggcgccggctcttcttgatctccatcttcaatttggaaaatgtggacggtgcctgaaacacacaacaggctgtagtgagggccccgctacagacccctgggtggggctccctcggagccacacaggggctcggcgtgcctgaggcctgagtctcctctcctggggtgactgtcccagcaaagaaccacagggctcctctgttctctaagtacagacaccccacctaccctgtgagaagagccacagttccctgtgaaaccagcagtcagccctcctgtcccctcctccctgccccctcccccgccaccagctcccctgtgccccacctgccccctcctcccctgccccaccccacctgcccccctcctccctgcctcccccgctccaccccacctgcccctctccggcccgggctttggtctccatgcgacctgccccactgctggctgcaccgtcctctggccccgtcagctccatgggggaaactggttccttccaggtcggacccttctgggcaaagtgctcaaaggcctgctggcaggacacgtgctcctggttgaaggctgccttgcccggccgcggcaccacgtacagcatggggatgatgggccgaggcttggcctctagctcctcactgggcacctcagggggcacgacattaaggggtgccggcagggggctctcctccatggctgcagggcctgggcccagcaccgggggctccagtggggatggcagccacagcgcctcctctgaggggaagtgagcaggcgggggcggcagctgtgggggca

SEQ ID NO: 7327 - DNA, 193 bp, Homo sapiens
ccacctgctcctgccacggcccctctgccagcttggggaggcccagggacgctgacctcacagggcctagggcgggcgggggggcaccccagaggctttggtttcaggctgtgtctgtccccgcacacagggaaggctttcgagatggagaaaagagggacacagtctttgtcgggaaatcgcagcaggtgga

SEQ ID NO: 7328 - DNA, 585 bp, Homo sapiens
ggaagaccagcctggccgcacagcacactgtggaccccagaacaccgtgagccctggggccctggggccctgcctgctccatctggaggagggggacaggggctcaggcccccacctgtgtgtctccaggccctaaggctcttgggacattctggaaggaggaaccgtggttgatatccaagggattcttgggctgtggggctttcagtgctaaaactggaaggtcccaagcagatcaggatgaactggtcactgctaacatttcaccacctccacctcccccaacaggctggaaaaataaggaaaaattaagagaaggaaattcatttctgcacactaaactgttgaccatgtggcacttaacggggtctggtttggagcacagcgcccacatctcaccacttgctataaaacccaccacgggctgcccccagctccacagtccgtgatgccaggaccagtggtaagcgctgagaccctcagcaatgaggctcccaagggccgagggtgacacttaacccttgacccacactgaccccagtaagggtcaagtgaggaccctcccccaacagaccctgcagccag

SEQ ID NO: 7329 - DNA, 14010 bp, Homo sapiens
tgctcttccttttaaaaactttatttaaatggagactcttagtcaaatgattggaaaaccaataacgaaaaatagttcttcaggttcttctcctggtaaggcggaggacacaccaaactgcactggccctgtcaggggacacggcaccctcgtgggaccaggctcagccctcggggtggcacgaggtcctgcaggctgcaggaccctcacactccagccccgtctggtgacccaacccgggcccgtggtgcatgctggggaaggccactggccggcccctgggcttcggctcctgaggaggcatggccccacaccctgcccggccataaatatatacagattcctgggcatccagggcaccaggaccgacgcagagctggggtcctgtccctaagcctgtggcacagcgactcttgacatgggagccagggagctgggaccgccgcacccctcccctgcctccctcctggggtcaccaccctcaggcggctgccagctggcctaggacgcggcggaactgctgggtgctgtggcccagctccttgaccctctccaccatgtcctgggccgcggaaggcgatgggtactgcaaggcagcggccttggtggtggccacgatgccgcgcaggaggtcgcacagcaggttgctgtagtgggtcacctggctgcgcacgtcagcagccttggcctgccgtgacagtgtgtccccgatgaacaccagcttgtgggcgctgaggatgacgaacttgctgtgcgccacaaagatcttgggcggctggttggtggccacggcggtaaagaaggcgtccacggcgttggtcagtgtggtcaggttggcctcacactgctccaggtagaagagcagcagctgccggtccgagggccccaggccgcctgttcgccccggggccaggggttgggctggcgtccagttggccaggtcgtggtctatgggccgtgacacctcctgttccagtcgttcaaactgcttcagctggggcaggagggaagcaggagcagggttaggctctcgggtgagttggaactacaggccgagacctgggcaccctgggctgggcttctctaaaagggccgctactcagagtgcatgggactgcagggaaacgggcagtctcctctcccggggacgggaccaggaaccatggcaagccttctggaggttgttcagttacccttccaccagtctcaaaaggtcagactccgtgccctgaacatttttgaaatgacaagatggacaacagaaaagtggctgcctggggtcggggggtcaccgtcctggcttgggtactgtcccacgtgacttgagacgtggcactggggaaaatggctgaagggcactggggacccctcgaccctatctttgcaacttcctgtgaatctataaatatttcaaaatggaaggttaaaaaaattttccccttagttcaaaagtaacatacacattataaaaagattcaaatatatcaaacagaaaaaacgaagatgtcacctgtaatccaatgcccctaaatagaacctctgctaaatcatcttccagaaccacacacgaaagttaacatttccactcccgtgcctaggagtcagctgaaggggacaatgtgtcctcactagagccgctctggctccggaagtgaccagccacacccagactcaggactggtaagctctgtgccaccctaggcgcaaagatccaagccacaatgagcaaaaccaataggaaacctccccttcctaacacttagaacctcgcactgtcccccttaggcagccacttggtgaaatcctccatctctccgttcccttagccagtgagatacatactccgctttttttctttgaaaagctctgatgaggcagggtgaggtggctcatgcctgtgatcccagcactttgggaggctgaggcaggtgaatcacttgagtctgggaagtccaggctgcagtgagccctgacagagcacaggcaacaagctttgtggggttttttttttttcaatactatttttatttttataaagaaggagtcttgatctgtcacccaggctaatctttttttttttttttttaaatggagtcttgctctatcgcccaggctgaagtgaagtggcacgatctcggctcgctgcaacctctgcctcctgggttcaagcgattctcctgcttcagctgggattacaggcctgcgccaccacccctggctaatttttgtatttttggtaaagatggggtttcaccatgttggccaagctggtctcaaactcctgacctcagatgatcctcccgcctctgtctcccaaagtgatgggattacaagcgtgagccactgcacccagccctttttattctttgacaactcttcatagttatataatatcccactgcataaatgtccatactttattgaatcaatactctcctattagacactttgtgggtggagatttcagattcttcaccgatacaaaaatggggcaacagatgttctcatcagtaagtcttcatggacttgcatttaacatggactttatgtccttggccttggaattctacatctttaaagttcttcacatatattcttgccctttaatccagcttctagcaagttatctaagtgattcatcagatacgtgcaaagactagtattcatcacagcactgttcacaaaagtaaaactctgggaacagcctaagtgtccaacagcaggggactggtgaagtcagtgctggaggcacacagaggacggacaaagtacacgaccacttctgaaaacacggcgatcccagagttctctctctagacagagatatagacctatatattgttgatatttcaggaggttttttgtttttgagacggagtttcgctcttgttgcccaggctagagtgcagtggtgcgatctcggctcaccgcaacctccgcctcctgggttcaagcgattctcctgcctcagcctcccaagtagctgggattacaggcatgtgccaccatgcccagctaattgttttgtatttttagtagagatggggtttctccatgttggtcaggctggtctcgaactcccgacctcaggtgatccgcccgcctcggcacccaggaggtttttaaaacaattttattttattttttttgagacggaatctcaccctgtcgcccaggctggagtgcagtggcgcaatctcggctcactgcaagctccgcctcctgggttcaaatgattctcctgcctcagcttcccaagtagctgggactacaggcgtgtgccactatgctggccaatttttgtatttttagtagagatggggttttgccatgttgaccaggctggtctcaaactcgtgacctcaagtgatctgcccgccttggcctcccaatgtgctgggattacaagtgtgagccactgtgcctggccacaatttgtattaatgtatacagacttgggtctcactacgtggcctggctggtctcaaacccttggcctcaagtgatcctcctgcctcagcctcctaaagtgttaggattacaggtgtgacatttattcttttcttgggtgttttctttagtagatttaacaggggtgcaggtgcagttttgttatgtgggtacaatgtacccattaggtaatttctcagcccccaccccctgccaccctgccaccgttctgagatgtcaatgtctagcctctcctgagtgtctccatgtgccaggtacttcccaggcatcttccacttttcagtgattctcaccgagctctcatgaggcggctgcagcctcactgctgtgtgtcgtgggtctcaggcccctgcctctgccacctccttggtgcccagaaggtaggcgagggagatttgacgggtgatatttttatgttcacttcgtgctatcctgtattttcacttttaaaattatcttcataatcagaataaagctcccttagtgtttttttacatacctctttcctaccctgaagaactgattcaaaatatgaggaaaattctattaacatgtctgcatataaacacagcagtatatttataataaggggccagatgtggtggctcacactataatcccagcactttgggaggccaaggcaggtggatcgtttgagcccaggtgtttgagaccagcctgggcaatgtggtgaaacctttgtctctataaaaaatataaaaatcagccaggtgtggtggcaggcgcctgtaatcccaactactggggaggctgaggcaggagaatcgcttgagcccagaaggttgaggctgcagtgagttgagatcgcatcactgtactctagcctgtgtgacagaacaagattctgtgtcaaaaaaaaaaaaatactaaggaagtgtgggtacaatacaaacattcaatagacgctaagtggtctttgaaagaatccacaagaatgcttaacgccatggcagatgctgggacagaagagtcgaatgcccacaggacaccatcccggccatgcagggagcagcttggaggaaggagcagggcagagccagccccgtgctgagcctatggcagctgtgaggggtctattttctgctctcaccccactctctaattccctaaatgtctccaacaattactcttgaaaactttaaaataaaccaagtgaaaagatgaagatggtcaggaggcaggggggtggcaggccgggcccagctctgagcactgtcagacaacatgagaagctggggacccggggtcggccctgcagggcaagagctgggggctcagggggtcagcgggcaaagctgggccttgctctgctccggggcctcacctgctgcaactccagctggctcttgccctgccgcgtgatgctgcccttttccagcagctccttctgggtcttctcaaactcctccttcccctggagggcagagacaggggctgcgctgaggccagttttctgagccagaagcacaggccagccctgtggcgggcgcagtgagctgagtggccaccaggtggtgctgcgtgtgcgcgcacacacacgcacacgtggacgcacacacacactagcacacgtggacacacacacacacacaagcacacgtgaacacacacacagactggcacgtgcaggggcaggcagacagacacacacacacacacacacacacacacacacacacactcccccaggctggcatatgtgggacacagcccccccaggctggcacatgcggggacacacagagaaggtggcttcctaggaagcaaccctggcagcccctttcaccgcctgccagctcaggaagagactgggcagagggtggggtacccgcagaaagtccgcaagctccaccctgccttcccaggctccaacaccaggaatcacacccaatccctcccccttggcctaaaggcctggccacctggtccctgcccctggatgcctctctggcccagctcagcctggaatgttccttaccaggactcccacccggctagcacccaggcctctgctccaggggccagcctgggaggagcagtcccagccacctcccaccacctcctgctgctcccccacgctcagagcatccttgtgtgtgtgcacatttctgcagatctgtctccccacacagaacagcagagtcaccgctgctggtcaccagagataccagcccgagggactcaacgaagggctcgatgacatggccaccctagcacatggggccaatgtggggtgagggaggtcaaagtgagaggagggtgcagggccttgccagggaccaggccccagctgagaacaaatctccccctaagcacaggagcccagcgtggcagaagaggagccggggctgggcaggcggcacccacctgtaggtggacgtagtcatagtcctccatccagcccccctcgctgttctcgtactgcccatctggcgagtcctgggaggtgaacttagggggtgagggcaggggtcgtgactggatgctgctggtcttgtcagtggggttggggtgcagggtgccacccccctcaggccccggggcagtggccttggtccgtctgaagagcagtgaggcattgccgtgcaggaaggaggccagctgcttggcgtcctcgggcacagcccgcgagcaggccaccagccggtccaggtcctcaagggtggctccagagcctccccggccagcgtcgagggcctgaccatgtgccaccagcgtctggtgcacgtcctccatcttctgcagctgccggctaagcttggcatgcagggcacggtcagatgtgtgggcagcattgcccaccgcgctgcgggcaaactccaacagctcgtggacggcactctggacagcggccacagcagcctgcaggtcctgcaccagcggctcctgtggctcagaggggctacgccagctcccagtcgcaccggcgctgcctgccaggtccagaaggtgggcaacggtggcgctcacaccctgctgcagccgtgccaggggcctccacagcaacttccagctccaggggttcccggcccggccctgccacctccaaggaggacgcagactggctgctggcgtgtgctgccggtgctggaggccgacaggcgcttgccctctgccggggcttcacgttcagctgggggaggcaccgcatacacaccactgtcgaccacgccaccatcagccacctcaggaggaagcacccgttcacggggcacatcgtacagggtgcccgggccaggccgccgcaagccagggggcacgtcgtagaggtcaggagccgggggcggcacgtcatacacgtcctcggccggcggggagtctggagggggcgcagccagtaccagtggggtgcgggccgggtcaaagggcttggccttggcgaaggcggggggcacatcgtaggtctcctcacgcagcagtgggccatcgggcacatccttgctcaccgatggaggaacgtcgtagacctgggggacaagcggtggtcaagactgtccatctgtccatctgcccaccccagggactgggggcagcacccagccacacacacacacacacgtacacacatacagacacacacacagaggcacgcgcacacacacaggcacacatacaaatgcagaggcacgcacacaggcacacacacgcgcacacacactcgcagccctagcacacacatccttcacaattcctatccatgacagctctgggacgagccggctctggagccaggtgaccacccctgtgcctgaaggtgggagagcttcctcccaaagaattgcatgtgttaattcacataattgtgtcactgcagacactcactgaaaggttagctgtgatactgccactgccaccaccatcatatcatgatttcatcaccatcaccgccgctgccacctcatcaccaccatcactgttaccacccagcaccaccaccacgtgtgaactttctactctgcagcaggtgtgcgactgagctctgtgtgtattatcaggggaccaaattctggtttgcccaggacagtgctggtttgtccctgatgcccccacataattactagtccccccttcactcttggaagtatcccaggtgagatgacacatcccgtggtcaccttgcggataccctctcaggagctcatggagaaggcctcgcaacaggcggttctgccgacaaagaacctgaggctcagaagacagcttgatttcctcatctgtcaaccatccagaaccagggtctggagccagtctcttcctgcccgccacccccagccctgcagacactggtcagcacccctgtgcacacacccagacaccccacagcctcagcctggccctggcattgccctggcatttgctcactgcgtggtggttggacggtggcaggcccttctccacactggggggcacgtcatacacctccagcaacgggtctcggccattgggacccttgacagccatggggggtgtgtcatacacctggggcagaaacagtgcagggttaacggcgccagggccacttgggggaataggaaaggtgggaaccccgcagcaccgtccccaggcctggccggggctgagaagatgcagctctcggcccagggccaagcagaggcacagacttgccgccctgccctcccaccgctgcgcaccccacacctacctcctggccatactggctgggaagcagcccccgaaccgggggcacatcatagatgtcctgtggccccggggccagcaggtgtcgcgggatgtcgtactcgtcctgctccggctgggcggcctcgtatacatagccctgccccacgcgggtgggcaccaccacctgggggcagagagccgacttcactgctgccctcaaaccagcccttagggaggctccactcacacctgggagccacgtccttttaggaggtgggcagggcacaccaggtggaagggacggggctccccaaggatgccagttctcaccccctctgcaccatctgaccttcctctagcagaacgcagtgccaggtacggcaagaactctgggttttattcagagctgcctcgtcctgggccaggacaccaacgtctctacagcctgctgacccagaaggctccacagaggagcatgggtatgagctgatgacaccggtggggtgaggggctgaggccctggctctggagggcactacccacaggcaaggaaccccccgttactgggggcgcctagccccacaggacaagaggccacgtcggaggcctgggagtctgctgcccacaccacctagctgtagcctcctcagaagggttggcccagcaggggactgcatccggcccaggaccagatagagcctagcaccccctgccccacagcacagcatggggagactctggaggacagggccagaggggcaggttgggtgtgtgctggggggcgcagcagctgggaccaaggccccctccctgccgcgcctgccccgggggagctgcctgcagcaggtaagatccccagcgacctgaaaggatgaggcctagtgggggaagtgggtccagggccagccctcccctccccaggtgctcttaccatgacccagagcccagggaagccaaggcccgcacagtgggtgaagaggcaggcagcacaatggcctgcccagggccacaggacccctcaccagcaccagcctgaagcgggtaggggccatgccaggcagcctccttccctgaaggtctccctgccttggggaggtcaaggcctccctggtgggattctccagcccccgggcacactgcgcccacacgcctccaccaccaggctccctgttcagctctctccactgaaagaccttttgttccttcatcaaaggggatgtctgggacagggttgactcagggcctccccgcacatcccccagggcagcagcgccaaagcagcccctcccccgggcccagtgcccctgaacccctagaggccctcccaatgcaggcaggcagccagccctgcttgctgagggtgctgtgaggggggcgctgagcatgggggtggcagaggcgccagcacacccccagcagccgcaggcctggcagagccccccgcagcgcagcagaactgggcccactaggtctccagcacgcctggtagcagagtcccggctgggggcctccgtggggtgtccccgcccccttccagtgcgtctgggagtggatttggcggctgcctctccagactcatctccctccacgcgccccagacttgagtctcctccagaactatttttagatgcagggacctgccaacagcggggcaggcggggcggagggacgtggcaggttggctgggcctcgaggcacggcctgaggcttctccaggcctcccagcctcccaaaggcaggtggggacccagcctcaaggctcagccaggacccagcaccagcaggagggatgagcatcctccaaaagcaccctgccggtggccatcccaacctcacgcggtgaggcccaggggtgcagctggacccaggcctgcctccccaggcaaatggccgcctgccactcttggagctgagtcgggtggcagtaggcagccacagtgaccaaatgtttctgttagaaaaacagagcaacgcagccaccagggggaaaagctctttaggggaatgactcagccccactgctaatcacaggccaccctgctgcacacctgagaccccactagcaggccgtggaggtcccccgggggttaggggaacacagccagagcccaggaggagagaacagaggcacagtcactgacataagacccacacggtctctgacacacatgcctcatacaatgcagagaaaacacagcacaggcccactgccaggtgcacgcacagaacccaggcagccccagggccagggtgccgcccctctcctcccctactatcaggcatcaagcggggggacaagcgaactcaggaatacatcccagcctcccggtaagggccccagaggcaggtgtcaggtcggaggaaggggacaaagtgggcccccgccctggagctcagtggctggtctcccccttctgcaaaatgggtgtcgcccctgacctgggttggctcccggctctggcacccccaggtcccaatccaggagcctcgtttcctccttgggaaatggagcaccacaggagcgctgcgaccacggccaccaggacacaccccagcatgaggggctcacccgacctgggtcatggtggcctgaggggccaccaccatagcccgctcccctccctccccagctccaggcaccccagcctgaggtcccagcacaggggagcctggggcaagatgaagcttctagggcgaggagggtgaaacacaggcccgacaggaccacgtgcacgcctgacctcacgccatggctgtctccttagacactgaccaggggcactacctgagcgacctcccacagacgccttcccccgggggtcccatctgaccatgaaagagcctctgccctcagattcctacagcccacacccggcccaaagagtctcggtgccagtgtggccctcacctctccctcagccatacgggccaccaggctcccaccttagcaaccactggaccctgctccagggcccagggttctgaccctcctggccaccatccttgtcactcaccctcttggcttcctgagagccagtgtccctcccgcccacgtgaagtcctggcaagggctccttctcagcccagccaaccactaccctggaactgggagactcagtttcccaggcatttgaggggcaggcctgaggcttggaggggagcacctggaggttcagacacagatgtcccgcagccaggtgttaccgccgtgccaccgtaatgaaggcatgagcaatcggaaactgcccagggcccgccccagcagagggggcaacccagcaaagtccaaggcggctcagggacaagctttaagaattcaacaaaatgcttttgatatctaatgttggatttacaactttgaaatgcaaaactgcatgtataaatctgtgaaacacagggcagatactagacaaaatatgccagaatttcccagtgattaccgcgattggaaaatttcatctccagactttcccatacattatgcattttctacagcaaacaagcattgcttttgtgatcataaaatacaagcagacacaatcaagactgggggaggtttcctgggggagagcagccaggcccaggacacagggctctccttcctgggccatcagccaggtcagggcccttggggcacaggtctgggcagctctaccagtgggcatgggcagagaaggacccagctggctgagcccctgatgcaattgagagcaggccccctgccggagacggagacagaacagctgccaaaacacagcctcgaggccgggctctgtctgggggtctcgctgctgctccccagcccacagggcttccagccgcaccaggacaagcttcactgcaaaggcgggagaggaggggtggggatgtgcctgaccttggggcatgtgcagtgtggactgtgtgtgcgtgtgcatacgcacatacatttgtacgtttgtgggatactggtgggtgcacacgctttgtatgtgtggacgtacacgtgtctgtgtgtggggtgagtatgcacgtgtgtttacacatatggggtttgggtgtgtgcgtgttcatgcatatgatgtgcgcatgtgtgggcgtatacgtgtgtccatttatggggtatgggatgcagatatgtgcatgtattcacgcacattcatgtagcgcatgtgtgtgttcgtgcatatggtgtgtgcatgggtgttcgtatctgtggggtacaggcatcatgcacgtgtgttcatctgtgtggggtgtgggtatacctggactgtggcctgaggctcccctacaggacactgctccctgccgcctccccaggggataacaggaccctgctcctcttgctaaagccagtttgggagcacccccacccaggcaccccacgccagccaggctcgcctctgaccagatggctgaaggagcaggtagagcaggaagtgggagccagtgacccaggttcccctggtggccaggcttggtggcccatgtccatggagtcccccacccgccaacgacctccggccatgcctcctgggtaccaggccacccatgggcgggggtgggggtaactcccagctgactcgctgcccagctggcaccaatgaggtctccacctcagccctgggctgagtgtctagtgctgactccttcctacaggcaggtgagcttgggaggcaggggccctgtggacttgggaagcgggctcagggtctggaggccagaggtcttgtccccaggcccagcatcccatcagcaagagcccaggaggctctcagggcagtcctcctctagcaatctcaggggcagcgtcctcccaggagtcacatccagatcaccatacgcacccgctggcccctagcatgttccataagtggagaggggttggcctgtggaggcaggggcggccagaagatgtgccggaaccccatctagaggctgacacgtaaacccagatggcacaggggagcctgagcatgaagtggctggcctctcccttgcgggggcccagcaactgccgaccccatgtgccaagccccgcctgcccactggaacgcctcaacaggctgctccctgtggttggtgacaccaccactcgggtcggcttggctgaggccagcggagcatctcccctctgggtccattcacatccatcttccccggacaaatgaacaccccccaaacactcacttcccactttgaccccagaccaaacacacagccactcctggaatgccggtgattgagggtggctggacccttctgtgcccacaaaccagggcctgggctatacctgtgtggctgcacaactgtgccaggacagccttacctttgccgggggcttcgtgccctcccagctgcgtgtgtccatggacggggggacctggtagatgtcatgccccatcccggcagaaggtggcacctggtaaatatcctgggcagggcctccaggccctgggggcacctggtacaggtctgtggccgggctgggaaacgggtgatggggtgtctgcttcgagaaggtggatgtctgcttggctgggggagactggaactgagggctgggacccgggacttggtagaggccttgctgagccttgctgggagtgggcaccaggtagacgctgtctggctggggctggtaggtgttggggagcatgggcgtgtactgggaggccggaggcgctggggcatggaggccaggctgaggctgggccggggtggcgggagggccggggccaggccctgctggcttcttatcatacatgcccaccaagatcttgaggcggttcccaggcacgatgccctggcgcccatgcagcgagcagagccaccagccgtccaggccctgcgtgtcctgctccagcaccgtcatgatgtcacccttgcggaagg

SEQ ID NO: 7330 - DNA, 417 bp, Homo sapiens
ccccagcggtgccctcggctcacaggaacccgtccccttgtgcagctgttcctgccccaatctgccctcactccagatgccagctgtgggcatgggcaggtgctcactgtggcagctccctagggttgcaggggccatgcccaggctgtgctttctgggccccagaccctgcagctctgaaactgccccctttcttgggcccaggctctgccctggctcccagggccttgtggccagctgcaggcctcaccccgcctccaggagacacccagcctcggcgttccttggttttcttctagagagacccactcctcctctgccctcccgggagatgccacgcatggcccttgcccccgggtgccttccccagaaccgtcacccaccccgggctgctctcatctgccaccctcaggcagc

SEQ ID NO: 7331 - DNA, 2769 bp, Homo sapiens
gcctgggtgacagagcgagactccgtctcaaacaaacaaacaaaaaactgttttcatttgctctcttgaccaaaggataggactttagttctttaagcattattttaaacactatattgatacaaaaatatcttgcttactctaaactttagagtctaaatgaagctttttctcagtacaagattctgagtatcataaaatggttatttaattgaaacgtagtgtggtatactcttgatggttagaactcttacagccttatttatttttaagtttgttacagccaaagggttggagtgtgccagtgcacaggtagactaaggaaaacattatagaggagtgaagagaacagaccattgaaaagactattatctgaccagcggaggcagaaaagagaggaacccagttgaataggatccaatccctggttagcctctacacaataatagggagacaaggattaggagccatacctcccagagcaaggtatctttctagagcaaatttctctttctagaaggggagggtcacagggtcacagattcaccaaagctgaaagggctgaggagctcatggtagcctgggttgacctactctggagcacggtgtcttccttctaaactgagtgactgtagtactatctgtgcctctgatggtaataaaactgacaagatgtctaatttttttttaagtaggaccaaaggaaaacaagatttagatagtctgactttgcttttgaacaacagacattgcaagtcaaaattgttgtcaaatttacatatggtaaatgatgaactttaaaaatgtgtccaggtgttagatgagttcattagactcttttaatgctaatggctagtacgtttaaacaaaacagcagttctctgctgcaatattcccattgaccacttaaatgaccataagtggtcatttaagaacatgttagggttagccctgatctgaatataaaagtgagaaaagggctacagtgcatttcttggtaacttaaactgagtcttgaagttataatgatccattcgagttctgtgatccttattgttcttaattgtgtttctctacgtattgttacagatgagccatacgtttctttgtatcaatgtagacatgacttcagatacctctgaggacctacccagcagtctaggaccctgggccaagtgctgggactatggtactaaatccagtagatgggctgtgtagcaactctcccagggaacacactagggtacttagggaggtgctttgtggagcatgttgaagctttgagatctgagcaggaggcagtgatgtccctggtctattcagggaaagatttcagtgtgaaatggtaaacatccaattgacaggatttagattttgcttagtttttctgctttttaatgtttctatcccccatctcagtgttttctttatccatcccagtgatgccttatttgaaactgggcttaaactgcaaaaagaatgaagttggatttaggaagctgttagatcattgagtggtgttgagagtgaagtttcactagcagggaagtttccttgagcctaaaataaaaagaaaaaattaaaaagaatcagtttttttaattaaaaaaatagaaagctgttaggctcctaattcgtggggttttttttgtaaaaacagtttagataatcctgaatgcaatcattaacttggttgctaattacaagaatgaaaattataatggaaaaggacaaaataatataccagctggtttgttattatagtccgtgtattaaaatactattgaaatacgttaaaggtaaatttttaaggtttaaaaaaaatttagtaacttacagggatggagaatttagatgtcagaggtggggagatttatttttataaggtaatttttatcctgataaggacttaaaaaaaagttttgcaactgaaattttaaagtaaacatgttaagtacagttaaaaagtaagcattgtagtaaatagtggattctctggtgtgtattttttatctcagtgttgaaaattggaaaagaatggactgaagtctaaaaactggaataatgaaggacactaaatgcctttattgtagatactatgtttgtaagtctatagctaagcaacttaagccaaaaaggtctttcaactgaagctttaatcaacttattttggagatgttctcttcccttatctcatgcgtcatccctaaaataataagatacatgggatcaaatagcccttgccttttcaacacaaatcagttggaaaattatggtttgagtcctgttgctgccatggcttctgtttctcagaaatgagtgtgtatgaacataccaatctatgtaataggctacctttttttgtcttctttggaactttgtacacaaaccaagacaatatcagggtgacaggtgaatgaacttaaattctcagtcttgtctattcaccaaaaaagtatactgcctgttttttctttaattattcaaggttgatgacttttaggaacatgttttatactgtattttttaattaaagcaagtgccttgatgtaattccatgtaaatcattgcttaaccctcttatgggatgaggatgagttattaatgtattgcagcctactggaaaggagggggagttggttaatagcagatacttttcttctagaagcttatgttttatgctgtttattatgtaagatcctgtatgtgtgttgagatttagaggtttcatttgttttgtctgctaataaattgttactctaataatac

SEQ ID NO: 7332 - DNA, 1034 bp, Homo sapiens
ttatttttttccttttttcttttttaagagacagtcatccaggccagagtgcagtttgatgatagcttactgaagcttcccactcctgggctcaagttatccttccattttggcctcctgagtagctagaccataggtatgcatcaccacaccctgctaattttttaaatttttttctagagagagggtctcactgtgttgcccaggctggtctcaaactccaggctcaagcaatccttcagcctcagcctcccagagtgttgggattacaggcgtgagccactgcacttggccaagttatttatttttaatctctcttgcccttctcccaaggcaggcttaagttgagactattataggtgtctaataacctgtgacagagtaatgagtacatgcttaagatgttataattagccaacaccaacacagcaaaaaatataattccagccaaagattctggaaaatccctcagaaggagggataacaggatttgacctttaccagcgatttctgtccatatgtggatgtaaacagttctggaacgttatgcatgcagttagcgaatccttgaattatgttctggtttgtacttgtcccatccatccaaacaagagattctgcttttggtagccatctgtagaaacatttaagatgtcactagaatttacatttcatcctctctacttgggttgaggttgcctatacttgcatattgttaaaatgttttggttgctgatattcagaggaatgaaacctggaaccaaagcctaatttgccgataaaaaaactgttttcggccaggtgcagtggctcatgcctgtaatcccagcacgttgggaggccgaggcgggtggatcacctgaagtcaggagttcgagaccatcctggctaacactgtgaaaccccgtctctactaaaaatacaaaaaattagcggggcatggtggcacgcgcctgtagtcccagctactcaggaggctgaggcaggagaattacttgaacccgggaggcggaggttgcagtaagcagagattg

SEQ ID NO: 7333 - DNA, 289 bp, Homo sapiens
gctgggcacggtggctcacgcctgtaatcccagcactttgggaggctgaggcaggtggatcacgaggtcaggagttcaagaccagcctggccaagatggtgaaaccccgtctctactaaaaatacaaaaattagccgggcgtggtggcaggcacctgtaatcccagctactcgggaggcttgcggcagagcattgcttgaacccaggaggcaggggttgcagtgagccaagatcaggccattgcactccagcctggacgacagagcgaaactccatctaaagaaaaaaa

SEQ ID NO: 7334 - DNA, 6565 bp, Homo sapiens
cgcgcgggtgctgggaggccttagaacgccgtggcgtgccgcaggacgcgacggctgcagaacatccgccgcaccgctgggggccaacgttgtcggaccgaggagtccgaggtggcgactgagtgagatacccagctgtgcggagctaggacgcggaacatcccagaggccagcatcaacatgtcagtaccgcacccttcccatttgctgcctgtaggtccaccccgcgcgtgcggtccccaagtggccatgccaccctgcacgccctccccgcgtcagtcgttcgtttccagaccatgccgagccacacctgcccacagagtcgagctctcgaagtcctcattcccaaaagctccacagcctgtgacccactaggagggagggggaaaccgaggcccgggagagacggagaagccactctctgaggaccccggagccccgcccacagtgggtggggtcggcactgaaggggttaaggccgcggggaagccccgggctcagccctaggggcggatcctggggcttcctccctctagaccaaagggtgcggctgctgcagaggtggctgatgcaggtgaggggcttacagccctgtgaatggtgtgggaggtgaggggaggggggtgcctgttactgaccagtgtttaattggcctcaagctcaggagaggtaaggggagccaggaggccccctctggagcaggtgagtagaaggagggggctcagctgcccgcccacgactagaaaacccccagcatagacctgccggacggcaggaccttggttaagatgggaaaacagtagggtttgggcacaggaggtctgggcccccaacctggtgaccgttggacaccctgtggatataggaaggaagctgtggtccttatctagggtgcctgcgaaactcaagccagtggggaaccaagcctgcagaggcaatactgctgtgtgactgtgggccaggcccagtgctggtgctgctggggccccatctgaggagacagttgggtctatatccaaagtgtcctgagatgggcagagttgggaagggggccatgggctccaggtggggaaggcagtcaagacaggccaaagctcagcctgatgggtgcatgagtggggccccaggatccactaaggcagtgggcatagcccaggtagttgaaaaggctgggagctggaggagactcggaacatagggagaagaaagggacaggaagactcccgggcagtttttcctatggagggaaccttgggtaggtttgagcagggggtatagtgtctgctttgcatcttctatcccatgccctagtggtggactaggaggactactggaagacagaaggccagcaagtagattgggtcggctgttttatagacctggtggttacagaccccctgtgaggggaggtcctgaggaggacaaatttgtagccagagcaggctggggccaggactcctaggttctgccccagccttaagcagctcatccatcactcccagcctccctccaatgtggggtagacacctggatctatctgccctgctctataggggatgggtctcttccaggtcacctgtgctatcaggtgagtgtgggacaaagtgcagcccaccactccccagttccagtatgcatggtcccccctgcactctgtcagcccttccctgctccaaccccaccctccctcctggcacagcccagcatggctgttatctacaggaggagagccactgtggtctgaagagatgctactgcctggagactggggtcttaacctccagcctggcactgagccacctgcaacctagcagcaggtgaccttggctcccagcctgactcagctgaacctggatcctgtgcataggcaagagctgactctgagccctggcccagccaagctgacccctacactagaccctacacaccggatggagctgatcctgagtaccagcccagctgagctgactctggatcctgcgtgccagccaaagctgcccctggattccacatgccaaccagagatgaccttcaatcctggtccaactgagcttaccctggatcctgaacaccagccagaggagaccccagctcctagcctggctgagttgaccctggagcctgtgcaccgccgacccgagctcctggatgcttgtgctgacctcatcaatgatcagtggccccgcagccgcacctcccgcctgcactccctgggccagtcctcagatgccttccccctctgcctgatgctgctaagcccccaccccacacttgaagcagcacccgttgtggtgggccatgcccgcctgtcacgggtgctgaaccagccccagagcctcttagtggagacagtggtggtggcccgggccctgaggggccgtggctttggccgccgcctcatggagggcctggaggtctttgctcgggcccggggcttccgcaagctgcatctcaccacccatgaccaggtgcacttctatacccacctgggctaccagctgggtgagcctgtgcagggcctggtcttcaccagcagacggctgcctgccaccctgcttaatgccttccccacagccccctctccccggccacccaggaaggccccaaacctgactgcccaagctgccccaaggggtcccaagggacctccattgccaccaccccctcccctacctgagtgcctgaccatctcacccccagttccatcagggcccccttcaaaaagcctgctggagacacaatatcaaaatgtgagggggcgccccatattctggatggaaaaagacatctgaggccatccagggcaaggaactgtctttctggttcaatagactgccccgacagtctacaagcctcagcccactgaccatacctcagcccctagcccctggggggcagctttaacctgggcatgtttcctgggtaccagtggggccaggaggtggctctggctcagagccgtcagtgtggctgaataaaggctctcttgggtatggctgtgacagtttatttgttgatccccctaccctcacctctcacctcttctgcaggtcccttatccctgcagaagtctccagatccaccttggccctgaggccattgatgggaggatgcctgtcctttgcctttaccccccacctggctcaggagacagggtggctgttttcttccccattcactcattaccattcactgagcacctactgtgtgtcaagccctggacgggacataggcaatgggtaactagacaaacaggcatacagtagcaggatccatgtggcacaggggaggtacagaggctttgggaacccaagtgacttcactccacctggggatccaggagacctcccagggcagtgatgtcacagcagagacctgagtgctaggtaggaattaaaccaggcaggtgaggaggtgggagctgactgttcttggaagagggaacaaggtgggcagaggaaagaaggggacttgtgacagttgtgggaggacacagtggtgtattgacaaagacggaacatgggagggaatgtaccctcagctcactgtaaagcccgctttggtgtgcacctgccactcgatgcccggggcatcatagccagcttgcggtgtggctgctttaaaaggcccaagagacccctggggaaacatgctttccccagctcctcctgtaaggatggggaggagctgggggagctttcctggctttccctgccatgtggaaggtgtggccatagctgcggactctaagcttacacccccctctctcctgcaggtttccatccttggggaatgaccacgcaactgggcccagccctggtgctgggggtggccctgtgcctgggttgtggccagcccctaccacaggtccctgaacgccccttctctgtgctgtggaatgtaccctcagcacactgtgaggcccgctttggtgtgcacctgccactcaatgctctgggcatcatagccaaccgtggccagcattttcacggtcagaacatgaccattttctacaagaaccaactcggcctctatccctactttggacccaggggcacagctcacaatgggggcatcccccaggctttgccccttgaccgccacctggcactggctgcctaccagatccaccacagcctgagacctggctttgctggcccagcagtgctggattgggaggagtggtgtccactctgggctgggaactggggccgccgccgagcttatcaggcagcctcttgggcttgggcacagcaggtattccctgacctggaccctcaggagcagctctacaaggcctatactggctttgagcaggcggcccgtgcactgatggaggatacgctgcgggtggcccaggcactacggccccatggactctggggcttctatcactacccagcctgtggcaatggctggcatagtatggcttccaactataccggccgctgccatgcagccacccttgcccgcaacactcaactgcattggctctgggccgcctccagtgccctcttccccagcatctacctcccacccaggctgccacctgcccaccaccaggcctttgtccgacatcgcctggaggaggccttccgtgtggcccttgttgggcaccgacatcccctgcctgtcctggcctatgtccgcctcacacaccggagatctgggaggttcctgtcccaggtaagtggaagctgaggtctaggggtctgagtcaggaggtatggccctgttctaggaaggtcccaggagaagaccttgcctaggggttggtcctaatctaggcgttctcagcggaaggccctgtcctggagcatctgatgagggaggcatggctttgccctggaagatgttgaggggtagggaggcccagcctttggagtgctggcctgaggggagatattctgagtggaaggcctgagaagccactcagagactcgatacaaaggggccctacttgggctgggtgagtgtctcacacctataatcccagtactttgggagcctgagatggaaggattccttgaggccaagagttcgagaccagcctgggcaacatagtgagaccccaacctctaccaaaaaaacatttgagacagagtcttgctctgttgcccaggctggagtgcagtggcaccatctcagctcactgcggccttcacttcctggttctagtgatcctcccacctaagcctcctcccgaatagctggactacagatgcataccaccacacccagctaatttttatatttttgtagagatggggttttgtcatgttgcccaggctggtattgaactcctgggctcaagtgattctcccgcttttgcctcccaaagtgtgggattacaggtgtgagccactgtgcccagcctaaaaaattattagccaggtgttatgcacctgtagtcccagctgcttgggaggctgaggtgggaggattacttgatcccaggagttcaaggctgcagtgagctatgatcatgccactgcactccagcctggatgacagagtaaaaccccgcctctaaaaccaaaccaaactagagagtccctactgtagagttagaatcagattgtgacagtgaaccagaagagtttcttgaatgtggatgtgtgcccacatggatctggccagcccagcactggcttagcagctctctgcctccaggatgaccttgtgcagtccattggtgtgagtgcagcactaggggcagccggcgtggtgctctggggggacctgagcctctccagctctgaggtgatcattgcccctttgagcctgccatgtagcacatgctggggtcccagggtgggggacggccatgtcaagattatagagcaggcatattgacacatatcttcccttctcctcaggaggagtgctggcatctccatgactacctggtggacaccttgggcccctatgtgatcaatgtgaccagggcagcgatggcctgcagtcaccagcggtgccatggccacgggcgctgtgcccggcgagatccaggacagatggaagcctttctacacctgtggccagacggcagccttggagattggaagtccttcagctgccactgttactggggctgggctggccccacctgccaggagcccaggcctgggcctaaagaagcagtataaagccagggcccctgccactgcctcttcttttccctgctgccacttttccagtcctggaactactctgtcccactcttgctctattcagtttacagtcaaccctcccaagcacacaccccgcttcccttggaatccctgaggggtagaaggggccagaaaaaacgcttataaaaccagaggccctctgagatcatgtgagtcctccatggcaaggaagcagttccagggagagtcaggttccagctagttagggctgccagcctagggctttgtgcctacacctcactaagcccatggagaggtcacagatgggccgtgcacgggcagatgggccccaaaaaatcttggcgaaggtcggtaaagtgctaagctgttgtctgcactctttcatcataaagtcacttttttccactgcc

SEQ ID NO: 7335 - DNA, 6565 bp, Homo sapiens; identical to SEQ ID NO: 7334

SEQ ID NO: 7336 - DNA, 4867 bp, Homo sapiens
ctcgccttcccggcgacctgtttggcagggcggggcgcctcgcgaagatggtggcgcgcgtggcgtgtggctcccgtcgtctggccaagtctcagcgcagcgcaccggccggcgtctcgttggcctggagcccacacccaccgggtccctgaccccgcgccccccgcgcccggttcccggcatgcctcgcgcccgtaagggcaacacgctccggaagggtggtcagcgccgtggaggaggtgagtggggtggggggcgcgggacagctgtatgagcggcgggcgggggtcctgctggatccccttggttgttctcgagggccctgggtggggaaccccctcggccagccccacgcagcttcccataactctaccgaggctggcacgtgccccagcagtcattggccacgtgcgtgcccaacttgagctcgctgcccactgcctgttgggagtccgcgctcccagcggtgacccggccagcccctccgggcctcagttgcctgctgggtggacaaactcaccggacagggcaggaagccagtcctcttgccaaaccctgatcctttcctggactggtcaaggaagttggcgggagtcctggcctgctccggtgaagagagggagggggctctgttgggaagctacctggttagggccttggcagcttggcaggcctgactccacaaggtagctgagtatcctggagcctgaggcagtcttgggactcgcttatcagcttagaccaggagcctatcttaatgcgttaaacacatatgtttactctgctgggatggggtgcctaccacgcacaaatttatttatttttattcttgagggggaagggaggagggccgggcacaggaaggaggaaaatacctaggcacaactttaaactggtcaccaccatggtgggttttgggtgggggacatctaatagggtgtggaacatgttcactgagtggtgtcagccccagacttaggactcagggaggcctggggggaagtgcttctgggtgagtcctgagaggatggagaagagagcaagttgtacaaagacctggcagctggagggaccccagcgcagtggagtgaatgagggaaggctgggctgctccggcaggtagaatagtaagataaaatgggagcaggctgggcgtggtggctcacacctgtaatcccagcactttgggaggccaaggcaggcagatcacctgaggccaggagttcgagaccagcctgaccaacatggagaaaccctatctactaaaaatacaaaattagctgggtgtggtgtcgtatgcctgtaatcccagctactcgggaggctgaggcaggagaatcactggaacccgggaggcagaggtcgcagtgagccgagatggcgtcattgcactccagcctgggcaacaagagcaaaactctgtctcaaaaaaaaaaaaaaaaaaaaaaggtggcggggagcagaggccagtgcgcaggctggactttgtcctgcagatgaggggtgtgagtagttcttagaagtagggccagcctggtgatcacaccctgtccaaaactctgccacagcagccaaccttgccaatgtcagcccttggccctggacagaccccacacacaggagtgcaccagccctactgaactgacccttggctttggtttttcatctctgagagggacaccattctatcttttgggattatgaggtcgagtgaggtacccccagccatccctcatcagtagaggcaagttgagtgtcctattccaccttctccaggtgcccggagcagtgcccaagctgactcgggttccagtgacgatgaggcagccagtgaggcccgcagcaccgccagtgaatgccccagccttctcagcaccactgcagaggacagccttggtgagagcgggtggaagtttgacaggggcttggtgagggctccatgggctgaggacaagaagcggtgctgaccaggtggccttgcagggggggatgtcgtggatgagcagggccagcaggaagaccttgaggaaaagctgaaggagtatgtggactgtctcacagacaagaggtacccctggctgccagccaactcctacacccagctccaagtgtgatcaagggagggctggcccatatgaccccccttctcgacctcccccagtgccaagacccggcagggtgctcttgagagcctgcgcctggccctagcgtcccgcctactccccgacttcttgctggagcgccgcctcacgctagccgatgccctggaaaagtgcctcaagaaaggttggacctgggggtgtgtgggagacttaaactgggcagacactggcccttgctgcatgggctgactggaaagcatcccacagggaagggcgaggaacaagccctggctgctgctgtgctaggcctgctctgcgtgcagctgggccctggacctaagggtgaggagctgtttcacagcctgcagcctctgctggtctctgtgctcagtgacagcacagctagccctgctgcccggctccacgtgagtgtgcctgtgccccatgaaacccttcctgcaccttatccctcagcagagtggtgggttccccctatcttcagcctcctttactctgaggggagtgagctccagggctgggaacccaggttcacccgctgaccgtggcattgcattgcccttctcccaacagtgtgcttctgcccttggcctgggctgctacgtggctgccgctgacatccaggtgaggggtctttgggcacaggtggtagagcatctagggctgtaactctgcctctgagctcccctgcctctctgtgctcctaggacctggtctcttgccttgcctgcttagaaagtgttttcagccggttctatggcttggggggcagctccacaagtcctgtggttcctgccagcctgcacggcctgctctctgctgccctgcaggcctgggcattgctgctcaccatctgccctagcacccaaatcagccacatccttgacaggtaggggtggctgtccactgggagggggaggggatctcaaagaggcccccaagccacacatatagctcagcctgccccttccctaggcagctgccccggctgccccagctcttgtccagtgaaagtgtgaacctgcggatcgctgccggtgaaaccattgcactgctctttgagcttgcccgggaccttgaggtgcgagggacaaggatggggggtgcttggtgacaccacctgcccatcacaggctggatgcagggggtgccacacaaaacagaacagctttaggtcattatgcagaggaggtggccccaaaacagatttatctcctagatgtcatgatgggtgccctcagcagtggtgtcctggcctgacagaggccaaggaggggtcaaaggggccaggcagagaagagagggtctctcagtgaaaggaggggtttgggcagtgccctgttcagagccagcagagctcaagcatctaccacacaccctccaatgctcccattgcaggaggagtttgtttacgaggacatggaggccctctgcagtgtcctgcgcactctggccactgacagtaacaagtaccgtgccaaggctgatcgtcggcgccagcgctctactttccgcgccgtgctgcactccgtggaggtgtgtgtgagaacatatgtgtcctagcaagggtgcacccccaggcatagcagccaagcccagttgtgttggcacctctaccctgcagggcggtgaatgcgaagaagagatagtgcgcttcggctttgaggtgctctacatggacagctgggctcggcaccggatctacgctgccttcaaggaagtgctgggttcgggcatgcaccaccacctccaggtgcggggacggacagggaggggacatctggtgtggttgcttcagtctggcctgagctcactgccctctgccccccagaacaatgagctactccgtgacatctttggcctgggccctgtgctgttgctggatgccactgccctgaaggcctgcaaggttccacgctttgagaaggtttgcacccttgggcacctttctcttccccctattcccatttcctggaggcctggaattctgtagaggccggaagaggacccccagccctttcccttcccagctccccagggtgtcactctctgtccccactctagcacctgtacaatgctgctgccttcaaagcccggaccaaggctcgaagccgtgtgcgggacaagcgggcagacatcctgtgaagcaggacctgctgaagaggagactttctatgcccttggtccgtatttttaacagaagacagtgcaacaactggtctccaccagtatttgtcactttattttttttaatgacaaaaccaaaaacagacatggggtgggtagctgggggcccggacacttgggaccctgacccctttgtccctgcactcagccctgtggccccttcctgtcctgtctcaggccaggctaaatatgtgccttcctcagggctgtggggcaggcactagggggcctttcccttcctttcctttctcaggccttgctcccccaggatgacccactcttaggggggtggtggcatctggacaaatgccaccacagcaggtggggtggcaaagctacctggaatggatttgtgtgctgatttttaaggattattacagataattaaacagaacggtcagccttctgtggtcttaacccctgggtatttttctgttctccctccccatctactatcccaggcttgggcccaactggtcttccacgatgtcacctttgccctccaaggcagtcttccccaggtggtgcctctccccctactcagagcccagcctgtcttt

SEQ ID NO: 7337 - DNA, 1145 bp, Homo sapiens
agctggagtggtgctctgggtgagctgggaaaatacaagaaccaaggtgagcttaggcctggcatgagggtgggggtgggggaggggtggggccattaagctgacggggtagaccctgacttaccctttctacctgcaaagtcctggctgaccagcaggtgagtgcctcagtgccctgggtgggtccatacatggccatggtgtccctgacgctatcctcccttcccacctaggaatcatgtcaggccatcaaggagtatatggacactacactggggcccttcatcctgaacgtgaccagtggggcccttctctgcagtcaagccctgtgctccggccatggccgctgtgtccgccgcaccagccaccccaaagccctcctcctccttaaccctgccagtttctccatccagctcacgcctggtggtgggcccctgagcctgcggggtgccctctcacttgaagatcaggcacagatggctgtggagttcaaatgtcgatgctaccctggctggcaggcaccgtggtgtgagcggaagagcatgtggtgattggccacacactgagttgcacatattgagaacctaatgcactctgggtctggccagggcttcctcaaatacatgcacagtcatacaagtcatggtcacagtaaagagtacactcagccactgtcacaggcatattccctgcacacacatgcatacttacagactggaatagtggcataaggagttagaaccacagcagacaccattcattccatgtccatatgcatctacttggcaaggtcatagacaattcctccagagacactgagccagtctttgaactgcagcaatcacaaaggctgacattcactgagtgcctactctttgccaatccccgtgctaagcgttttatgtggacttattcattcctcacaatgaggctatgaggaaactgagtcactcacattgagagtaagcacgttgcccaaggttgcacagcaagaaaagggagaagttgagattcaaacccaggctgtctagctccgggggtacagcccttgcactcctactgagtttgtggtaaccagccctgcacgacccctgaatctgctgagaggcaccagtccagcaaataaagcagtcatgatttactta

SEQ ID NO: 7338 - DNA, 1145 bp, Homo sapiens; identical to SEQ ID NO: 7337

SEQ ID NO: 7339 - DNA, 4867 bp, Homo sapiens; identical to SEQ ID NO: 7336

SEQ ID NO: 7340 - DNA, 7238 bp, Homo sapiens
cggccccaatgcccagtgacttccaggtcctcagggccaagtaccgagagagcccgctggtctccgcctggtccgaggagctgatctctaagctggctaatgacatcgaggccaccgctgtgcgagccgtgcggcgctttggccagttccacctggcactgtcggggggctcgagccccgtggccctgttccagcagctggccacggcgcactatggcttcccctgggcccacacgcacctgtggctggttgacgagcgctgcgtcccactctcagacccggagtccaacttccagggcctgcaggcccacctgctgcagcacgtccggatcccctactacaacatccaccccatgcctgtgcacctgcagcagcggctctgcgccgaggaggaccagggcgcccagatctatgccagggagatctcagccctggtggccaacagcagcttcgacctggtgctgctgggcatgggtgccgacgggcacacagcctccctcttcccacagtcacccactggcctggatggcgagcagctggtcgtgctgaccacgagcccctcccagccacaccgccgcatgagccttagcctgcctctcatcaaccgcgccaagaaggtggcagtcctggtcatgggcaggatgaagcgtgagatcaccacgctggtgagccgggtgggccatgagcccaagaagtggcccatctcgggtgtcctgccgcactccggccagctggtgtggtacatggactacgacgccttcctgggatgagggcgcctgtgccccttgcccgcttcgctcctgtgctttccttcgcccgtgtcttccctcccttctcggccccgccacctgcccagcgtgccctggctctccagaaccttctatcccacagtcaggccccagagagggcaggacaagccttgtcccgatgcctttgaccggcagctctgtgtattggtggatagatgcagaaacaaggaagaaatggagtctgctcctgagaagcttcaaattcaggccaggagagaagtcttaagaaaagacctccagcagttacacattcatatcaaccagcacaacacgggatggcgcccaaactccggcgttcacaagaggagacgtgacgtggtgggctgaggttaatcagggaaggtttcctgggggaggtgatccttgaactggctcccggggaacattcagagcatgattggtagacagaagggtgcagaggcgcccaggggagtacattgccccgtgcaaagcaggggcattggggactgtcttgagaccctgagggggtcaagcccctccttccccagctgcccctccttctagaacctctgcacatctagcctctggccctcctcttcactgcctccacctgctcccgcttgccatccctgtctcctccatcctggctgtgcagtaggaattccaggctcctccctgtgtctttgctgttcttcagactccatttatagagaatgagggctgataacaggaatacagtggcaaagactagactgtggaaagggttccagaaatcttttttcttttttaattaaaaaaaatatttgcagagatgagctcttgctatgttgcccaggctggtctcaaactcctgggctcaagcgatcctcccatctcagcctcccagagtgctgggattacaggtgtgagctactgcgcccagccccagaaatctcagtgctgtttggagctccatttctcatttgatgacttgctctgcgtggggaggtggggtctcattcccccaacttcctcagggaggacccctgccctccgctgctcctctgtcctgctagccttcctccaggaagcacactgggtgcagataatcaggacattccagagatccccaatttaagagggtcatttccatctcaggggactcccggatgggtgtttccgctctcaatagcccctcttgttttaccaggaaagatccagttaaatcacccactgaggtgacagctcattagcggggagagagatggagcatcgagtgacactgggccatccaggcggctctgctcccaccagacaggagctaggcctcactggcaggggggctgcccacagccttttcaggggctcgcttggcgggtgacggggccgcagccaggccttctctccctgccccttggtgaccccgtggcttcctgtctgctggcctctcctgctacttatcacttcaccacgaactctctgcctgagactggggaagtaagcgggtatcttctcagtgagcataggttggggactgtgatcttgagaagccatgggccagcaatacctgcttttctgaagcccccaaggagggctctgacattctttttaaaaacaccacaaagcaaaattcccaggacatgtgtagttttgtttgttcagtatcccacaacttaaggctgggagatggaactcttggttaaggtcgatttttctgtctggcttctccgcaccttccacttgctctctggatcaggcagatataaactttctagcgcattttgagagagggctttcttgggtgagggagcatggcaaagtcggtttctctctggactgtttacacttcaaggcggtggatttagaggaatcctggctttcattttcaatgccagtctgagacatgttcccaagccggggctcttgttcacaccacttactctggccaccaacaacaacccaggccagacagagcatctcttttttttttttttgagacagagtctctgtcgcccaggctggagcccagtggcgagatcttggctcactacaacctccacctcccgggttcaggcaattctcgtgcctaagcctcccgagtagctgcgactacaggcgccggccagcatgcctgtctaatttttgtattttagtagagacagggtttcaccatgttgcccaggctggtctcgaactcctgagctcaggcagtctacccacctcagcctcccaaagtgctgggattacaggcgtgagccaccgcgcccagccagaacatctgtttttacacccagagagcgcccctcgttaggacagaaccacggtgcccagagccaggaagccgccctcctggcgcccagcatctgagcttctacacgtgatgggcgggctcaggagaggacagggagtcgtggtggaagttccacagctggccgcgtgggggggcccttgcaccgcactgccgcctcctgactgcccctatccccgcagcccctgtgccggatttcatttccctcctctctcccagggtacctggccccagcactctcccatctgttcttcaggaaccgactcctctccagttgcaacaccagggagaaaggggcctccacatgcccaagtacccctgcaggatgaagggcaggccggcccttgatgtgccatttctgaataatagtcactgccgccgagtctaggatgtcctgttctaactcagccctgcctcggatgcaccaccgatctgtgcagagtgggtgtgggagtgtgggtgagggtcgaaatgccaaaggtctactttccagaatcaagtgccttctgcaaatcatgttggaaaagtccaaacctggagatgtccctgtgcctccgcccctacccaccccttttccttcagctgtgttaggaaggagaagttttcagaaccctctaggctggtggctttcaaacttcagaccatgatctgcagcaagaaacgtgccttccatcataaatcagtccatttgtttacaactgtgttccaagcaggtttcataaagaaattcttaaccttagaacctcggatatcctctatgttttagttttcatttttttaaaatgcttcttaaaattcactaaattgggctaggtgtggctcatgcctgtaatcccagcactatgggaggctgaggtgagaggatcacttgagcccagaaggttgaaaccagcctgggcaacatagtgagaccccatctctacaaaaagttttaaaaccaggtatggtggtgccctcctgtggtcccagctactcgggagtctgaggtgggaggatcacctgagcccaggagactgaggctgcagtaaggtgtgattgcactattgctctctagcctggaaaacagagtgagaccctatctcaaaaaaaaaaaaaaaaaaaaaggaaagagtgatgacaacagcccagggagcagccccgctcagaacccaagtcccaagttccagcactgtgttcccaggcaggctgtttgcctcttcctggtctggaagcccttgggtcctatggtggcggcagctcccacagtccaggttccctggtggggaccaatgattccatccgcatggaagcccacgtgtgcacttaggggcccataaatggcagaagggcccctcctttgggagaccttgtcagtcagcatctctagggcaaccgtgattgccatttgtagaggggaaggaatcaagggactttaagctagatcaaaatctggggacaaattctcctgctaactgcaagttaaaataggcccttcttactgaatttccctgtttgtttctctgcagacaatgctttagccctactcttgggcccccaagttagcagagtaatcaaagcttcctaccgtttggcctactattccagactagtccctcgaggggttcccttccaaaatatgcagggctcaggctcccaattccgggcctgtctgctttgcttgtgtttctcctgtccctgttctcccggagggcccaggtggaactcacgacagggagggagacgcttcccaaaaacctgcagggctatttcccagaatttggttttcaagtacaaaactttttgtcctgtaagatatatgcagcctcacagaagcagcctctgcctccactttaccagctacgtttttatcttaagcacatggggctcccttagaacttactccactgatttaaaaaaaaaaaactgcctggcagcatctcagtgtcagagtgagcacggcacaggaaaggcccgtggtgacgagggtgaggtggccacagtgaccggacgacaaatgagactctgcaaatgagactccagagggtgaagatctgcggtctccagacatcataggccatgtgacccactaggggccgcttacccctggccgtccgctggctgaactgaacgcattccctctctccgcaactctcccgtgaggctgcacccgtgtgggtagcactggaagcggcactgtttgcattgtacataggaaggaaggaagttcttccagcctcaccagcacctggcagcgagtcagagcctgtgagggcatccgaagcagtgatgcagtgtcaacctcccagctggtgccactctgccctcgggggctccaagcattgtaactcagtcatgggagctgcctctttggaagtgcagatttattcctgtaataatcctgcctgcttttacctctcgtccactgaccagcaagtgtgagtcccggtgtcagtcggcacagtccagtgtccatctgcatttgctcatgcagagggggtgagttgggcactccctgttgttggttttccttttgcagcacactgggcagtctccctataaaacaaaaaccccaccttctgtgccttctgctttagagcagagctccccctcccatttcctcagtcttccctgcaaaatctgtccaccggggaaggcagcaggaaccctgggcagcgggtgttctgggaaggctagtgacagcagatgtcatccaggaacagccacacacggttctccaggccgccgtcagcagctcaaggtggggtatgagtgagaagctgaggatctcgcagcttgttgctgagcaaggtgcaaccgggctcatgctgtcatcagcacaagacgggatggcaagggctttcagacgcatttccaagagtccagcaagccagggggaagatgatccctttgccgaagtgtaccctctagccaacttttgggagcgcttctgtttgcaaagcgctggggatgtgcctgtctctgtgtgacccacgaacgggaagggagagcactggagtaatgacacttctgctgctgctttgattctcaaggctgatctttaaaaccctcgccttgctgacaggtgctttaaaggcagtctgcatcttttcttcccttggtgtgggagaggtaaacactttgatttgctgaaagctgtatggagtatatttgaacagctagtagttagctttgaaagtggaagtgtgaacagacactacttgtgtcgctttgggtccttcactttacccccacagaagtctagaggcgtctgttataaagcgttacggggcgcctgcatgcaggaggaaggacctgtattagctggaaatcatcaggaacccagcttgcctccatctctctgagatgtgctgggtacagcctgcccctcctagttctgtccaccgggaagagccggctggcggcagatccccaggggcagagcccctgctggatcctgggagctcatctttacctgtgccggagtgggaactgtgattccagccgggcaggtcagagtggagcagtgctaagaggctgttgcaggagaactagacgggcggggcctgctgcatctggatcatgtttctgtgctctgccccgcgctagggactcagggtctgggcttctgccaggtgaggagcagagagactgttcccttgggtggagaggtgtgggcatgagagccacccattgccaagcagcaagaatgttcgtgcttttttccagagaggggaaccccactggtttttgtggaaacaatggaaacttacagatgcctgcctgggatgatgaggcacattcagaacaaatgcttttttttttttgagacagagtctcgctctgacgcccaggctggagtgcagtggcgcgatctcggctcactgcaaactttgcctcccaggttcaagtgattctcctacctcagcctcccgagtagctgggattacaccaccatgcccagcaaatttttgtgtttttagtagagacggagtttcaccatgttggccaggctggtctcgaactcctgacctcaggtgatccatccgccttggcctcccaaagtgctgggattacaggcgggagccaccatgcctggccagaacaaatgcctttttaaaccttttaagaacatttttaaaatgtctttttctatgtcaaatgtaacgtttatttttttaaacaataaaattgatttgccaaaa

SEQ ID NO: 7341 - DNA, 4966 bp, Homo sapiens
  SITE (2355): n equals a,t,g, or c
  SITE (2360): n equals a,t,g, or c
cggccccaatgcccagtgacttccaggtcctcagggccaagtaccgagagagcccgctggtctccgcctggtcctagtagttgatctctaagctggctaatgacatcgaggccaccgctgtgcgagccgtgcggcgctttggccagttccacctggcactgtcggggggctcgagccccgtggccctgttccagcagctggccacggcgcactatggcttcccctgggcccacacgcacctgtggctggttgacgagcgctgcgtcccactctcagacccggagtccaacttccagggcctgcaggcccacctgctgcagcacgtccggatcccctactacaacatccaccccatgcctgtgcacctgcagcagcggctctgcgccgaggaggaccagggcgcccagatctatgccagggagatctcagccctggtggccaacagcagcttcgacctggtgctgctgggcatgggtgccgacgggcacacagcctccctcttcccacagtcacccactggcctggatggcgagcagctggtcgtgctgaccacgagcccctcccagccacaccgccgcatgagccttagcctgcctctcatcaaccgcgccaagaaggtggcagtcctggtcatgggcaggatgaagcgtgagatcaccacgctggtgagcccgggtgggccatgagccaagaagtggcccatctcgggtgtcctgccgcactccggccagctggtgtggtacatggactacgacgccttcctgggatgagggcgcctgtgccccttgcccgcttcgctcctgtgctttccttcgcccgtgtcttccctcccttctcggccccgccacctgcccagcgtgccctggctctccagaaccttctatcccacagtcaggccccagagagggcaggacaagccttgtccgatgcctttgaccggcagctctgtgtattggtggatagatgcagaaacaaggaagaaatggagtctgctcctgagaagcttcaaattcaggccaggagagaagtcttaagaaaagacctccagcagttacacattcatatcaaccagcacaacacgggatggcgcccaaactccggcgttcacaagaggagacgtgacgtggtgggctgaggttaatcagggaaggtttcctgggggaggtgatccttgaactggctcccggggaacattcagagcatgattggtagacagaagggtgcagaggcgcccaggggagtacattgccccgtgcaaagcaggggcattggggactgtcttgagaccctgagggggtcaagcccctccttccccagctgcccctccttctagaacctctgcacatctagcctctggccctcctcttcactgcctccacctgctcccgcttgccatccctgtctcctccatcctggctgtgcagtaggaattccaggctcctccctgtgtctttgctgttcttcagactccatttatagagaatgagggctgataacaggaatacagtggcaaagattagactgtggaaagggttccagaaatctttttttcttttttaattaaaaaaaatatttgcagagatgagctcttgctatgttgcccaggctggtctcaaactcctgggctcaagcgatcctcccatctcagcctcccagagtgctgggattacaggtgtgagctactgcgcccagccccagaaatctcagtgctgtttggagctccatttctcatttgatgacttgctctgcgtggggaggtggggtctcattcccccaacttcctcagggaggacccctgccctccgctgctcctctgtcctgctagccttcctccaggaagcacactgggtgcagataatcaggacattccagagatccccaatttaagagggtcatttccatctcaggggactcccggatgggtgtttccgctctcaatagcccctcttgttttaccaggaaagatccagttaaatcacccactgaggtgacagctcattagcggggagagagatggagcatcgagtgacactgggccatccaggcggctctgctcccaccagacaggagctaggcctcactggcaggggggctgcccacagccttttcaggggctcgcttggcgggtgacggggccgcagccaggccttctctccctgccccttggtgaccccgtggcttcctgtctgctggcctctcctgctacttatcacttcaccacgaactctctgcctgagactggggaagtaagcgggtatcttctcagtgagcataggttggggactgtgatcttgagaagccatgggccagcaatacctgcttttctgaagcccccaaggagggctctgactttcnttttnattaacaccacaaagcaaaattcccaggacatgtgtagttttgtttgttcagtatcccacaacttaaggctgggagatggaactcttggttaaggtcgatttttctgtctggcttctccgcaccttccacttgctctctggatcaggcagatataaactttctagcgcattttgagagagggctttcttgggtgagggagcatggcaaagtcggtttctctctggactgtttacacttcaaggcggtggatttagaggaatcctggctttcattttcaatgccagtctgagacatgttcccaagccggggctcttgttcacaccacttactctggccaccaacaacaacccaggccagacagagcatctcttttttttttttgagacagagtctctgtcgcccaggctggagcccagtggcgagatcttggctcactacaacctccacctcccgggttcaggcaattctcgtgcctaagcctcccgagtagctgcgactacaggcgccggccagcatgcctgtctaatttttgtattttagtagagacagggtttcaccatgttgcccaggctggtctcgaactcctgagctcaggcagtctacccacctcagcctcccaaagtgctgggattacaggcgtgagccaccgcgcccagccagaacatctgtttttacacccagagagcgcccctcgttaggacagaaccacggtgcccagagccaggaagccgccctcctggcgcccagcatctgagcttctacacgtgatgggcgggctcaggagaggacagggagtcgtggtggaagttccacagctggccgcgtgggggggcccttgcaccgcactgccgcctcctgactgccccgatccccgcagcccctgtgccggatttcatttccctcctctctcccagggtacctggccccagcactctcccatctgttcttcaggaaccgactcctctccagttgcaacaccagggagaaaggggcctccacatgcccaagtacccctgcaggatgaagggcaggccggcccttgatgtgccatttctgaataatagtcactgccgccgagtctaggatgtcctgttctaactcagccctgcctcggatgcaccaccgatctgtgcagagtgggtgtgggagtgtgggtgagggtcgaaatgccaaaggtctactttccagaatcaagtgccttctgcaaatcatgttggaaaagtccaaacctggagatgtccctgtgcctccgcccctacccaccccttttccttcagctgtgttaggaaggagaagttttcagaaccctctaggctggtggctttcaaacttcagaccatgatctgcagcaagaaacgtgccttccatcataaatcagtccatttgtttacaactgtgttccaagcaggtttcataaagaaattcttaaccttagaacctcggatatcctctatgttttagttttcatttttttaaaatgcttcttaaaattcactaaattgggctaggtgtggctcatgcctgtaatcccagcactatgggaggctgaggtgagaggatcacttgagcccagaaggttgaaaccagcctgggcaacatagtgagaccccatctctacaaaaagttttaaaaccaggtatggtggtgccctcctgtggtcccagctactcgggagtctgaggtgggaggatcacctgagcccaggagactgaggctgcagtaaggtgtgattgcactattgctctctagcctggaaaacagagtgagaccctatctcaaaaaaaaaaaaaaaaaaaaggaaagagtgatgacaacagcccagggagcagccccgctcagaacccaagtcccaagttccagcactgtgttcccaggcaggctgtttgcctcttcctggtctggaagcccttgggtcctatggtggcggcagctcccacagtccaggttccctggtggggaccaatgattccatctgcatggaagcccacgtgtgcacttaggggcccataaatggcagaagggcccctcctttgggagaccttgtcagtcagcatctctagggcaaccgtgattgccatttgtagaggggaaggaatcaagggactttaagctagatcaaaatctggggacaaattctcctgctaactgcaagttaaaataggcccttcttactgaatttccctgtttgtttctctgcagacaatgctttagccctactcttgggcccccaagttagcagagtaatcaaagcttcctaccgtttggcctactattccagactagtccctcgaggggttcccttccaaaatatgcagggctcaggctcccaattccgggcctgtctgctttgcttgtgtttctcctgtccctgttctcccggggggccctggtgttactcacgacagggagggagacgcttcccaaaaacctgcagggctatttcccagaatttggttttcaaggacaaaactttttgtcctgtaagatatatgcagcctcacagaagcagcctctgcctccactttaccagctacgtttttatcttatgcacatggggctcccttcgaacttactccactgatttaaaataaattttctgcctggc

SEQ ID NO: 7342 - DNA, 1487 bp, Homo sapiens
tgccttttttcctgatattaagttttatagtaaaaaagcaactagtgattgcacaaagaatataaaaatccactctttttacaaaggtgtgaatttaaataacgttattgattggaatatgaaaatagaccaatcatttaagagctttttagcaaatgattcaattcttactctttttctcccaagattgaaaagcataatgtatttctctaaagtaggaatctagagagcccctgtgagtggacaaatgtcagtaacacttgaacacatgagaagataagtgttatgttgtgataatttaaagttaaatttgctttttgggtaggatccctaaatagatgggatttttaaatagatgatatatagatgacaattgcaattgtcattttaattattttccctacagtaaagaacctagctctgagcagtgaaattgtaatggcactttaaaggaagtaagccgttaactgttctctagtggagcgatctccaactgttttggcactagggacgggttttgtggaagaaaatttttccacaggactgggggtttagggggatggtttcaggatgattcaagtacattacatttatcattagattctcataaggagcatgcaacctagatctcttgcacgtgtggttcacagcaggattcgagctcctttgagaatctaatgccatggctgatctaacaggaaactgagctcaggcagtaatgcttggcaccgccccccaccttctatgcagcccggtcgtggcctggggactggggacccctgctctagtcagtaataaggtacttgtgccagaatataaatcaacacattgcttcctttatcaaagaagtcttgttatttaaaaaaagtcaactgagccagtatgattagtgatgtaattgattttcattctggcacaagcctctttcattctggacagctcacaaatagttaatggaccatgctttgaatagccttcctctaagcaacatttataaatactgatattttagaactgtttacatttcttctgtttatttttgaattttcagtttgatatcttgtccttattcattgttgtataaacaactgtactttaatttcaagtagtattaaaagtatttcacttcagtttggggggattattatcaatttataattttataaaagtattttaaagaataattgtaaattttccataaattacaacttcctgccatattttattaaataataatcttgcttaaggcatatagacagacattattatgagtattccagtaaaaaaaatctacatcaacttgaccattctggctaaaaattaaaaagcacttttttatatctgtggttgtcatttgtttcaaagcatttctaaatttattgttcttaaaagtatgtctgcatgttctagcctttgacctaggtcatctatgaaccctctttgtgtctaataaacatatctgtaaaggcatataaatctgaaaacaa

SEQ ID NO: 7343 - DNA, 1244 bp, Homo sapiens
ctcccccacaaatgataaattagtgtttttacaaatggaggcaatgatgtttagccatttacttggatacataaattgtactatgtccacattgagttttttccctgtcactattctattttacaaattgatggagacatatcttgggttaagaaatttctttcacacacacacaatggtttctttagctacaaatctgttttttgccaatcatctgagaaggccttttgttcacatatggggaaggtaatctcatgtttgtggagtatcttcatgggtattaccaccactatttacatgaagtcttcaagtggccttaggaagccgctggtaactgaacaactttctctaaaaagccaagctcatttttaactagagaatctgggaaatactgtgagttttttctctttccttttaaaggtacaattattataaattcctaactgctcctaaaatcatatagaacatttccagagccaaagaatttctaagctatagtttaaaatgatagcattttggaagcaagcctgaattcacttcctataatgttttccagattgtataagcaaaggctattattgctgctgtggtatagtcactttggtggtggtggtagcaggctagagagaatctcctttgccctgaagtctagaatgtaaatttgtaccaccaaacacaatagccaatattataaacaggaagtaagaaaaaaacctcatctcacttgcaaaagatcagcttattttcaattgtggaaattaatttgttatagataacagtagatttgagtgactttatttacttttcctcttcagtataaaaaataatattagtataatctcattacatcaatatattgaatagttaagttttttcctcttttaatatttaatatttgccctactgggcatgagttggccattattgaagccaggtggtgagtacctaagaattcattctactatttttctattttcatatacctttggaatttactatcataaaattatttttaaggtatatattttaaaatcttctctgttagctagtccttctcttgaaccacattcttcaaaagttctcccacagctaagttataaagagcggaccacttttggcagaaaaaaaaaaaaaaaacttgccttaattctaccaacaccttgcttttcatacaaactctaacccgtgatcttgatccctgtaacaacacaaatagttaacaactatccctatttattcttttt

SEQ ID NO: 7344 - DNA, 1244 bp, Homo sapiens; identical to SEQ ID NO: 7343

SEQ ID NO: 7345 - DNA, 192 bp, Homo sapiens
ctcaaatatgagaattcaaatcaggagttttcagcaatttgcttatttgcctgatgatatattaaatatcagtatgcttttccctcaagttttagtgactcagtgccttcctctttgcctcaaaatctctttaagcttatatatgccattgatgtgattaataaattaattctttagatctttttttctttt

SEQ ID NO: 7346 - DNA, 192 bp, Homo sapiens; identical to SEQ ID NO: 7345

SEQ ID NO: 7347 - DNA, 1399 bp, Homo sapiens
cccaacatcctaagctgggactggggtgaactctcattcagcctgtttctccatctctctttcgtctcgaaactcattctcatgcccacagttattggggcataaagattccttaaatggcttcctccagagaaaaatacgtttaaggcacttccttagtggtttgagccctgggcgagcccctcctccactccgtttattttccactatgtatttaaatcttccccgatggtgcctgtcttctcgtcactaaggctgactttctgtttttggggtgaaacctgtgtctccttcaacctccagtcactcagtggattttttttttttagattcataacatattttattttgacttatctaactgatgtcaaaaatggaaaatgttcacatggatattcatctaactcatgggctccattctaaaaaccccctttttaaaaatcaggcttcagtgtcagattgctgaatgtttttttcattttcctgagagatgcaaatgttcattcattcatctcattatacaacacagtacataaatgtagcttcagagcgtattaagtgcttttatacacaagtgctggctgtgtggaccaggtggtagctcatttaggccccaaattcattaagggcagggtctgactcttaggcttcttaatatttggtttggtgcatggtcaagagctggacccacatgttgcatagcagcagggctgatatgtttaaagacgctgggctttttctgctctggggccctttcccgggggttccggtgagtccctccccaggtgggtctgcccccacccgtgtgggcgggattagctcccagaggctggccaggccccacctgggggaggcttgagggcagggccccaaggctgagattcaggcttgggggaacagagcaggaaagagacccggtaccgaaagtgagcggggcaggcacctagtcacatgggtaatgggcaggggtcggtcactggctttggctccagggccagagcagtctgacttagtgttgagctccaagcatggaacactggagttggttcattttgaccagcaagcctctaaatgggtgccttgattacccaccgcaaggagagggcagttgcctttttatgacatgttaattccagccaggtgagtcaccaggtagctctcatcctcctgccaggctcccctgcctgtcggtttggcattgtcagataatgtgatcattcattgaagtgacatttgagttccaaaccagttttctcctttaaccatttcaccctcaggagtgattctcctttgtttggcattgtcagggaatgtgatgatccattcaaatgacttttgagttccaaatagtgtttctactttaacttcctaaatgaaaaaaaaaaaaaaaaaaattggc

SEQ ID NO: 7348 - DNA, 1399 bp, Homo sapiens; identical to SEQ ID NO: 7347

SEQ ID NO: 7349 - DNA, 345 bp, Homo sapiens
atataagggttcctgttattctcttgtcacttagatgtgattttatttcttgggaacatcctactgccttttcttcaaaagattctcctcttctgctggccttgaactaagtccagtctacctgctggcctgaggtggcgggggtgtgtgtgtcagccccctcagttgtgttcctggggcaggcagaactcaccagcacccggtgctgattttatcccttccttctctgaaaactcggagagtatgtgccagctgctgtctgcgattgatgcacatttattttgtcacttgggctcagaacgtcctcaccagtgagcagcttctgattaatgccgccaccccatc

SEQ ID NO: 7350 - DNA, 345 bp, Homo sapiens; identical to SEQ ID NO: 7349

SEQ ID NO: 7351 - DNA, 6976 bp, Homo sapiens
  SITE (3836): n equals a,t,g, or c
tgaattaaaaggaggggtgaaagtggatgatgtttctaaatattattcacatatactgaaggtcaagattgggggataaagaaagtaggcctgggaaagtaataataaaatatgcctaagactccaagctacaacttttagtgcgaagactttaggagtgggttttagaatattctggccaagccaggatttagtttcttttctgataccaaagtaactacacgggacatggcaaccaccaagggtctttgcagcaggatgacttcgcctttatatgaaggacttggaaatcactgctttaaaaggaacattagagaggtgacttacagtaattgttttttatttcactctttttttctcctttgacactgtctcgttcttgagttttttaaatgcttgtgaattttctttgcttctagttctgaattcctacttgatatggtcaaggctaattttaggactccttgaggtaaaaaaaaaataatacatttttacattgtaaagtattaaatattttacctctattcctattgacatgcctacatgcatatttaaccatatcagaacaacttaagttttcataaagctatcttttgtgtaggacaagtatatcaaagaagcacatctcagaatttttacttgtaattatttcataattcttactgctggaatatttttctcagttttctcctttttattaaaccaagttaaaagatagttgaaatttgaaattatactattttcctgttgttgtcttctcagaggaacatcttgagggcccagtttatctgtagttcatactagatacttgctgatagtgtcattgtagatgtcttcaccttatctatccaatgttcttgtagaatatatcagctgcagctctttcctccccaaataacaaacataaacccttaaacaccgaaattttgtttcaccaaaacttttcaaaaagattataatactattctagaacttgaaatcatattctctgctcttaaaaatatataaaatacaataataaggacccaggattgttaggaaatcagttatgtgccactggattatatagcagtttttgtgccttctctcctgtgttggcagcagccattgcagttttcacaatgccttcctcctctgctcctaatataccagagactaaaataaaataatggaaatgttactaatacattaaccaatatgctttgaatatggtctagggccatgtaaattttcttgcacttaggctctaaaaccttgttttcttttttgtgtgttccagactgtcttccatgttagggaatcgtctggtttaacattaaataaaatgttaatctgttgtctgttgtcaagatttgagttgataatttgtttacctttcttcagggaagaactgctaaagctttgaggtcattacaatttacgaatccaggaaggcaaactgaatttgctccagaaactggtaaaagagaaaaaagaaggcttacaaaaaatgcaaccgctggttcagacaggtaggctaagtgttactgaagacatgttaacttgctgcttcacatctgcattgttcccctatttttctcttaaattttgaattttctgggttcatattttaaattggataatgtagaattagtaaaaacctatgaaggcctttgtttttattcatataaaattaaggtatccctttcaactacaaaaatttgtttctaagaaggtagcagtgaactgaagaaataattttggcatgagagttaaaataattacaattaaagtaattcacttatttgaaaagcattgttattatatatatacggacatacctcattttattggtgcttcactttattctttacaaggtgctatttatttttacaaattgaaaatttgtggcaactcggtggtaagcaagtctattggtgtcatttttctaacagcatgtactccctatctctgtcgcattttggtaattattgcaatatttccagctttttcattactgtatctgttatgatgatctttgatgttactattataattattttgagtcactaggaaccacactaatgcaaggtggtgaacttagtcgataaatgctgtgggtgttcttactgctccacctactggctgttctctagactctctccctctcctcaggtgtccctattccctgagaaacaaatatattgaaattggtccaactaataaccctgcaatggtctctaagtgttcaagtgaaaggaagagtcaagtttctcattttacaaaaaaagctagaaatgattaagcttgggagtaaggcacgtcaaaagctgagacaggccaaaagctgggcctcttgtgctaaacagccaagttgtgaatgcaaagaaaaagttcaggaaggacattaaaagtaccattccattgaacacaaatgataagaaagcaaaacagccttattgctaatatggagaaactttaaatggtctggatagaagatcaaaccagctacaacacattcccttaagcaaaagcctaatccaaagcaaggttctaaccctcttcaattctctgaaggatgagagaagtgaggaagcttcagaagaaaagtttgaagctagcagaggttggtttatgagggtaaggaaagaagccatctccataacataaaagtgcaaggtgaagcagcaagttattaatgaaggtagctacactacccaacagattttcaatgtagaccagccttctttttttttttttttttttttttttgagatggagtcttgctctgtcacccagcctgaggtgcagtggcgcaaactcagctcactacacccgccacctgctgcgttcaagcgattcttctgcctcaacctcttgggtagctgggactacaggcacgtgccaccacagccagctaattttttgtatttttagtagagacgggtttcaccatgttagccaggatggtctcgatctcctgccctcgtgatctgcccaccttggcctcccaaagtgctgggattacaggtgtgagccaccacgcccagccaacaaacagccttctaatggaagaagatgccgtctttcatagctagagaggggaagtctatacctggcttcaaatcttcaaaggacaggccgtttctcttggtagggacgaatgcagctggtgacttttaagttgaagccaattatttacctcttcgaaatcctagggtcctaatgatgctaaatgtactctacctgtcctgtataaatgggacaaagcctgaatggcagcatatctgtttacagcattgttcattgaatattttaagcccacttgagagacctcctgcctagataaaaggattcctttcaaaatattgctactcattgacaatgtacctgatcactcaggagctctgatagagatgtcccaggagataaatgtttcatgcctcctaacacaacattcattctgtagcccacggatcaaggagtactttgactttcaagtctgttatttaagaaatacgttttgtgaggccagagctgccatagacagtgagtgattcctctgatggatttgggcaaagtaaattgaacaccttctggaaaggattcaccattccaagagtttggaagaagattcgagtcctcatggatgactttgaggggttcaggacttcagtggaggaagtagttgcagacgtggtggaaatagcaagagaactagaattagaagcagagcctggagatgtgactgagttattgcaatcttgtgataaaacttgaatggataaggagtttcttcttagagatgagcaaagaatgtgatttattaaggtggaatctactggtgaggatgctgntaacattactgaaatgacaaaggacttagattatataaacttagtagataaagcagaggcagaatttgacaggatgactccaattttgaacattctactgtaggtaaaatgctatcaaacaccatcacatgctacagagaaatcttttgtaagaagagtccactgatgcagcaaacttcactgtagtctttaagaaattgccacagctaccctagccttcagcaacgacctccctgatcagtcagctgtcctcactggggcaagatcctccaccagcaaaaaaactacaactcattgaagtttcagatcattgttagcattttttagcaatagagcatttttaaattaaggtacatacatttttttcttagacataaggctgttgcacacttaataggctatagtgtaagcttaacttttatatgcactggaaaagcaaaaaaatatatatatatatatgtgtgtgtgtgtgtgtgtgtgtgactcactttattgggggtggtctggaaccaaacccacaatacctccgaaatgtgcctgtaattcatatatctccgttctatgggtagcagctaaaaggtaattacattttatgagaatgcaaggtttttattttttacatgtctgaaatagaaatgcagttctgtatagtcaacataatgaatgggagaactaaattgtttagaatatgactctaaaacaaatgttaatataatcattcagaattttttttctaagttcagtcaacatttctatatatgccatgtattccatctgttaaaatttaccattgagtcatttaaatatttttaggccaaatttactagagtccattaaagaacaagaaacattaattgtagtataaaaatctatagaggtggtatactataataaaaataaaactgtgttgataaaacagtgaagaggttggtagctaataaagtgaaccactattaacctgtcattcttttttgtttgtttaaagtaaagggaaaattatgcacttcaagaagcgtattcagaatttttagatttgtctcaacactctatagagttaggtctcctcttctcacatggagttcatttactgctgacgatagaataagccttgagcctgataaattatagatgattttggcatgacctcatctaaaaatattttatctccttttttttttttactgtattttcaattaaatcaaaaataacatatttatgaggtataattcattgtgttttattttacagacaagtgataccagcaaagagtaaggtctatgatagccagggtctcctgatttttagtgggatggacctctgtgactgcctggatgaagactgcttaggatgtttctatgcttgtcctgcctgtggttctaccaagtgtggagctgaatgccgctgtgaccgcaagtggctgtatgagcaaattgaaattgaaggaggagaaataattcataataaacatgctggataatctgcggtaccaaactatggagcctttaaaggtctttatttctaaaaatctgttactctaagatacattttaagcttgattatcatatgacaaagattttaaaaccatctcagtgtgccctaatttttcatcatgggtgctttaagattcactatttgatataaattcagataggctatttttcagtagtcagcgttaagcctgtctggatcaatataaacaagtagggtgtaggcagtcctctatttgcatgtttcccatgggcacaaatttcagtgacctagatttagtttaaataccagtttccttaccaggaaggaaagaaaactggtaaggaaactgttgttgttaaaatctaggttaaaattttagttagcacattgtaactgagtaattacatgaagtacaaacctctctgctagctcttcagtctacaaatcgctatgtaaataacagatatgcttcatgattgtgaccagtcatgttatttctttcaaattcttccagtggtttgtccctgtgcatctgttaattcagttcacgtacagcagagcatgtagttatgctgtctctctgtcatctacttgacattctatagaagtgaacactcgaaagaactggtcaacaaagatgaaagtgcagcaaagcaatgaaaaatgataacactggaagtgaaattttaatcaaacataaatgaatttgtagaagaagtcactgaccatgggaatgttgttcttgctgctgtgtattcataggagcttagtgaaggcaaacttaccaacacaaataagcaaagtggttgcaataaagacagatacgtcccagaggaagtgatggttaaaaaaaaaaaactttacattaaaagatatttaatgtgaatatagaaatatttcacaacattgaaagcacaagcaataaaagggtggaagctgacccaaacttagaaggagtatggcagtttgccgtgaacataaaagatgcttactcagtatggtaagttacttgccagaaaaaaaggcaagccctattcaaactactttgtttttacaatgaaataaaacactttaattctatttctaatgttttaaattacagtgtactaaatatttttaaacatttttgcatttttttctacatttataactggtcttaagagtttttaatatttgagcagaaccttaaaggtcatggaacaatcatcattttccctattgattattaagattgcaggaccatttttatggtcccacagtaccatgtgaaatgaggatcgcttgtagctgggaacagtgcttacttcagggaaaactgattttgatagaaccgactagttgagtattaaactgttttggaaataatttatatatctaagtgctgaaatatatttatcttctccccacttattcaaataaaaaagttttaatactataaacttttcattgttagcgccacgcagtccttgtcaagattgttctgggggacaaaaacttgatgtataaagcatgaatatacacacagtacttaaacagataccatatctgtggtattaaaattttgggggtggttgattaggattgtaaaaagactccttagggagtgaggatggaaaagagaaacactggttaatacagagtataaataaattttttggaaattgattgca

SEQ ID NO: 7352 - DNA, 1288 bp, Homo sapiens
ttttattttacagacaagtgataccagcaaagagtaaggtctatgatagccagggtctcctgatttttagtgggatggacctctgtgactgcctggatgaagactgcttaggatgtttctatgcttgtcctgcctgtggttctaccaagtgtggagctgaatgccgctgtgaccgcaagtggctgtatgagcaaattgaaattgaaggaggagaaataattcataataaacatgctggataatctgcggtaccaaactatggagcctttaaaggtctttatttctaaaaatctgttactctaagatacattttaagcttgattatcatatgacaaagattttaaaaccatctcagtgtgccctaatttttcatcttgggtgctttaagattcactatttgatataaattcagataggctatttttcagtagtcagcgttaagcctgtctggatcaatataaacaagtagggtgtaggcagtcctctatttgcatgtttcccatgggcacaaatttcagtgacctagatttagtttaaataccagtttccttaccaggaaggaaagaaaactggtaaggaaactgttgttgttaaaatctaggttaaaattttagttagcacattgtaactgagtaattacatgaagtacaaacctctctgctagctcttcagtctacaaatcgctatgtaaataacagatatgcttcatgattgtgaccagtcatgttatttctttcaaattcttccagtggtttgtccctgtgcatctgttaattcagttcacgtacagcagagcatgtagttatgctgtctctctgtcatctacttgacattctatagaagtgaacactcgaaagaactggtcaacaaagatgaaagtgcagcaaagcaatgaaaaatgataacactggaagtgaaattttaatcaaacataaatgaatttgtagaagaagtcactgaccatgggaatgttgttcttgctgctgtgtattcataggagcttagtgaaggcaaacttaccaacacaaataagcaaagtggttgcaataaagacagatacgtcccagaggaagtgatggttaaaaaaaaaaaactttacattaaaagatatttaatgtgaatatagaaatatttcacaacattgaaagcacaagcaataaaagggtggaagctgacccaaacttagaaggagtatggcagtttgccgtgaacataaaagatgcttactcagtatggtaagttacttgccagaaaaaaaggcaagccctattcaaactactttgttttt

SEQ ID NO: 7353 - DNA, 7573 bp, Homo sapiens
agggtgatcagcccatgacctaaacctccagacaaaataaaacagggaaaatttgctagaatcaagaatgatggatccatgttcagttggagtccagcttcgtactacaaatgagtgccataaaacctactatactcgtcacacaggttttaagactttgcaagaattgtcatcaaatgatatgcttttacttcaacttagaactggaatgacactttctgggaacaatacaatttgctttcatcatgtaaaaatttacattgacagatttgaggatttacagaagtcatgttgtgacccatttaacatacacaagaaattagccaaaaaaaatttgcatgtaattgacttagatgatgccacttttctgagtgctaaatttggaagacagcttgtacctggttggaagctttgtccaaaatgcacacagataatcaatggaagtgtggatgttgatactgaagaccgccagaaaaggaaacctgagtcagatgtatgtgtaatagtcatttttttctacattgtgaattctaccatgtaggattttgcttaactataagaaaatcatatttacattattactaaatttgttagcatacagtgaattaaaaggaggggtgaaagtggatgatgtttctaaatattattcacatatactgaaggtcaagattgggggataaagaaagtaggcctgggaaagtaataataaaatatgcctaagactccaagctacaacttttagtgcgaagactttaggagtgggttttagaatattctggccaagccaggatttagtttcttttctgataccaaagtaactacacgggacatggcaaccaccaagggtctttgcagcaggatgacttcgcctttatatgaaggacttggaaatcactgctttaaaaggaacattagagaggtgacttacagtaattgttttttatttcactctttttttctcctttgacactgtctcgttcttgagttttttaaatgcttgtgaattttctttgcttctagttctgaattcctacttgatatggtcaaggctaattttaggactccttgaggtaaaaaaaaaataatacatttttacattgtaaagtattaaatattttacctctattcctattgacatgcctacatgcatatttaaccatatcagaacaacttaagttttcataaagctatcttttgtgtaggacaagtatatcaaagaagcacatctcagaatttttacttgtaattatttcataattcttactgctggaatatttttctcagttttctccttttcattaaaccaagttaaaagatagttgaaatttgaaattatactattttcctgttgttgtcttctcagaggaacatcttgagggcccagtttatctgtagttcatactagatacttgctgatagtgtcattgtagatgtcttcaccttatctatccaatgttcttgtagaatatatcagctgcagctctttcctccccaaataacaaacataaacccttaaacaccgaaattttgtttcaccaaaacttttcaaaaagattataatactattctagaacttgaaatcatattctctgctcttaaaaatatataaaatacaataataaggacccaggattgttaggaaatcagttatgtgccactggattatatagcagtttttgtgccttctctcctgtgttggcagcagccattgcagttttcacaatgccttcctcctctgctcctaatataccagagactaaaataaaataatggaaatgttactaatacattaaccaatatgctttgaatatggtctagggccatgtaaattttcttgcacttaggctctaaaaccttgttttcttttttgtgtgttccagactgtcttccatgttagggaatcgtctggtttaacattaaataaaatgttaatctgttgtctgttgtcaagatttgagttgataatttgtttacctttcttcagggaagaactgctaaagctttgaggtcattacaatttacgaatccaggaaggcaaactgaatttgctccagaaactggtaaaagagaaaaaagaaggcttacaaaaaatgcaaccgctggttcagacaggtaggctaagtgttactgaagacatgttaacttgctgcttcacatctgcattgttcccctatttttctcttaaattttgaattttctgggttcatattttaaattggataatgtagaattagtaaaaacctatgaaggcctttgtttttattcatataaaattaaggtatccctttcaactacaaaaatttgtttctaagaaggtagcagtgaactgaagaaataattttggcatgagagttaaaataattacaattaaagtaattcacttatttgaaaagcattgttattatatatatacggacatacctcattttattggtgcttcactttattctttacaaggtgctatttatttttacaaattgaaaatttgtggcaactcggtggtaagcaagtctattggtgtcatttttctaacagcatgtactccctatctctgtcgcattttggtaattattgcaatatttccagctttttcattactgtatctgttatgatgatctttgatgttactattataattattttgagtcactaggaaccacactaatgcaaggtggtgaacttagtcgataaatgctgtgggtgttcttactgctccacctactggctgttctctagactctctccctctcctcaggtgtccctattccctgagaaacaaatatattgaaattggtccaactaataaccctgcaatggtctctaagtgttcaagtgaaaggaagagtcaagtttctcattttacaaaaaaagctagaaatgattaagcttgggagtaaggcacgtcaaaagctgagacaggccaaaagctgggcctcttgtgctaaacagccaagttgtgaatgcaaagaaaaagttcaggaaggacattaaaagtaccattccattgaacacaaatgataagaaagcaaaacagccttattgctaatatggagaaactttaaatggtctggatagaagatcaaaccagctacaacacattcccttaagcaaaagcctaatccaaagcaaggttctaaccctcttcaattctctgaaggatgagagaagtgaggaagcttcagaagaaaagtttgaagctagcagaggttggtttatgagggtaaggaaagaagccatctccataacataaaagtgcaaggtgaagcagcaagttattaatgaaggtagctacactacccaacagattttcaatgtagaccagccttctttttttttttttttttttttttttgagatggagtcttgctctgtcacccagcctgaggtgcagtggcgcaaactcagctcactacacccgccacctgctgcgttcaagcgattcttctgcctcaacctcttgggtagctgggactacaggcacgtgccaccacagccagctaattttttgtatttttagtagagacgggtttcaccatgttagccaggatggtctcgatctcctgccctcgtgatctgcccaccttggcctcccaaagtgctgggattacaggtgtgagccaccacgcccggccaacaaacagccttctaatggaagaagatgccgtctttcatagctagagaggggaagtctatacctggcttcaaatcttcaaaggacaggccgtttctcttggtagggacgaatgcagctggtgacttttaagttgaagccaattatttacctcttcgaaatcctagggtcctaatgatgctaaatgtactctacctgtcctgtataaatgggacaaagcctgaatggcagcatatctgtttacagcattgttcattgaatattttaagcccacttgagagacctcctgcctagataaaaggattcctttcaaaatattgctactcattgacaatgtacctgatcactcaggagctctgatagagatgtcccaggagataaatgtttcatgcctcctaacacaacattcattctgtagcccacggatcaaggagtactttgactttcaagtctgttatttaagaaatacgttttgtgaggccagagctgccatagacagtgagtgattcctctgatggatttgggcaaagtaaattgaacaccttctggaaaggattcaccattccaagagtttggaagaagattcgagtcctcatggatgactttgaggggttcaggacttcagtggaggaagtagttgcagacgtggtggaaatagcaagagaactagaattagaagcagagcctggagatgtgactgagttattgcaatcttgtgataaaacttgaatggataaggagtttcttcttagagatgagcaaagaatgtgatttattaaggtggaatctactggtgaggatgctgttaacattactgaaatgacaaaggacttagattatataaacttagtagataaagcagaggcagaatttgagaggatgactccaattttgaacattctactgtaggtaaaatgctatcaaacaccatcacatgctacagagaaatcttttgtaagaagagtccactgatgcagcaaacttcactgtagtctttaagaaattgccacagctaccctagccttcagcaacgacctccctgatcagtcagctgtcctcactggggcaagatcctccaccagcaaaaaaactacaactcattgaagtttcagatcattgttagcattttttagcaatagagcatttttaaattaaggtacatacatttttttcttagacataaggctgttgcacacttaataggctatagtgtaagcttaacttttatatgcactggaaaagcaaaaaaatatatatatatatgtgtgtgtgtgtgtgtgtgtgtgactcactttattgggggtggtctggaaccaaacccacaatacctccgaaatgtgcctgtaattcatatatctccgttctatgggtagcagctaaaaggtaattacattttatgagaatgcaaggtttttattttttacatgtctgaaatagaaatgcagttctgtatagtcaacataatgaatgggagaactaaattgtttagaatatgactctaaaacaaatgttaatataatcattcagaattttttttctaagttcagtcaacatttctatatatgccatgtattccatctgttaaaatttaccattgagtcatttaaatatttttaggccaaatttactagagtccattaaagaacaagaaacattaattgtagtataaaaatctatagaggtggtatactataataaaaataaaactgtgttgataaaacagtgaagaggttggtagctaataaagtgaaccactattaacctgtcattcttttttgtttgtttaaagtaaagggaaaattatgcacttcaagaagcgtattcagaatttttagatttgtctcaacactctatagagttaggtctcctcttctcacatggagttcatttactgctgacgatagaataagccttgagcctgataaattatagatgattttggcatgacctcatctaaaaatattttatctccttttttttttttactgtattttcaattaaatcaaaaataacatatttatgaggtataattcattgtgttttattttacagacaagtgataccagcaaagagtaaggtctatgatagccagggtctcctgatttttagtgggatggacctctgtgactgcctggatgaaactgcttagatgtttctatgcttgtcctgcctgtggttctaccaagtgtggagctgaatgccgctgtgaccgcaagtggctgtatgagcaaattgaaattgaaggaggagaaataattcataataaacatgctggataatctgcggtaccaaactatggagcctttaaaggtctttatttctaaaaatctgttactctaagatacattttaagcttgattatcatatgacaaagattttaaaaccatctcagtgtgccctaatttttcatcttgggtgctttaagattcactatttgatataaattcagataggctatttttcagtagtcagcgttaagcctgtctggatcaatataaacaagtagggtgtaggcagtcctctatttgcatgtttcccatgggcacaaatttcagtgacctagatttagtttaaataccagtttccttaccaggaaggaaagaaaactggtaaggaaactgttgttgttaaaatctaggttaaaattttagttagcacattgtaactgagtaattacatgaagtacaaacctctctgctagctcttcagtctacaaatcgctatgtaaataacagatatgcttcatgattgtgaccagtcatgttatttctttcaaattcttccagtggtttgtccctgtgcatctgttaattcagttcacgtacagcagagcatgtagttatgctgtctctctgtcatctacttgacattctatagaagtgaacactcgaaagaactggtcaacaaagatgaaagtgcagcaaagcaatgaaaaatgataacactggaagtgaaattttaatcaaacataaatgaatttgtagaagaagtcactgaccatgggaatgttgttcttgctgctgtgtattcataggagcttagtgaaggcaaacttaccaacacaaataagcaaagtggttgcaataaagacagatacgtcccagaggaagtgatggttaaaaaaaaaaaactttacattaaaagatatttaatgtgaatatagaaatatttcacaacattgaaagcacaagcaataaaagggtggaagctgacccaaacttagaaggagtatggcagtttgccgtgaacataaaagatgcttactcagtatggtaagttacttgccagaaaaaaaggcaagccctattcaaactactttgtttttacaatgaaataaaacactttaattctatttctaatgttttaaattacagtgtactaaatatttttaaacatttttgcatttttttctacatttataactggtcttaagagtttttaatatttgagcagaaccttaaaggtcatggaacaatcatcattttccctattgattattaagattgcaggaccatttttatggtcccacagtaccatgtgaaatgaggatcgcttgtagctgggaacagtgcttacttcagggaaaactgattttgatagaaccgactagttgagtattaaactgttttggaaataatttatatatctaagtgctgaaatatatttctcttctccccacttattcaaataaaaaagttttaatactataaacttttcattgttagcgccacgcagtccttgtcaagattgttctgggggacaaaaacttgatgtataaagcatgaatatacacacagtacttaaacagataccatatctgtggtattaaaattttgggggtggttgattaggattgtaaaaagactccttagggagtgaggatggaaaagagaaacactggttaatacagagtataaataaattttttggaaattgattgca

SEQ ID NO: 7354 - DNA, 2468 bp, Homo sapiens
caggctgcttcaggccgctttggacctcaccatcggtagcatctgcgtcttcttgaggtgactggagcccgtctatggtttcagccattgacttctggacatggaagtgtcgaggccatttttggcccctctcatatccgggaagggctccgtgcccagtagaggtgcagtgcagcagccagctcgcagcagtgctcccgtagagctgatggcattggcaggagtggcggctcagcacagggaagttctccagtgcccaggcccaggcttgctctcggtttaggtcccatggcacgtggggctctggacctgcctgcctccaagacagctcttccaaggttgagggttggaactccacagcctcagcctcccaaagcttgaccaggcccagccatagctagtctaggaaaagagcaaatggccgtgtttttatattttgacttttgcatttcaatattaatttttttggtaatgtaatgcattcaaaacatggtccccccccccccaaaaaaaaaagaaaagaaaaagaaaaaagcatgtttctaaccaggggtccttcatcttctgcagatgccaagggtgtccctggcacagtaaaagtttggaagccctgccctaaagcctcacctcacctggcagctgggtgtttcattcatagcaaatgttctgtatattcaccatgtaccaaacacacatgtcactaatgatacaaacacatgtgcactgacattgacctcctcactgtcttactatagtcccatccacagccaccttatcagagtccatgggactctgacaacttgtaatgggaaaattaaccgtgcctgtaggggccgcctgggtagcgggaggtggttcatgagtaccaggaaagctggccctggggcagacctgggcagggcagagcacagcttgcaggacctagtacacagtgttgggaattgaatttgggttttgacctttgaagctgtgcataaagtctaaaacaagaagaggagtggaggctgaggttgtatttgtattttaaaatgagcatttgccacacaaagccaggagcttcagaccagcgtggttaacacagcgagaccctcctctctgtgagaaattaaaaaaaaaacaataataaaagccaggcatgttggcatgtacctgtagtcctagctgctcagggggtgaggcgggaggatcacttgactcctgggttacagtgagctctaattgccactgcacttcagcctgggccacagagtgagaccttttctcaaaataaaataaaatataaccttttgggcaggcatggaaaggggctggagagaataagaggaaacagagataagccccctccctgggagcacaagggactcatccccagacatggcaccacaggcaaacagacactgtcacaaaactagcatattatctttcctagaagtcctttgttttccccaagtgccctttcccccaaccttttgttggtttacgagctctcaattctaacctcctagtacacgaataaaaatgtctatcggggtggtggcgtgagcctgtagtcccaggtacttgagaggcagaggtgggaggatcctctgaccataagagttcctgaccagcctgtgcaatactgactccatctcaaacaaaaaacagaaagctatacaactccgtttctcttgctaatttgtcttttgtcagtttaatttgcaggccccagatgctgaatctaagagggcagaggaaaagcttttcctccctgacataaccatccaggagaaagtctggaatggagggtcagaggggtagggaatggagttaggagaagtagatagattcaggacagtctttggagaatgtacatcactgaggtcaagatgtcctagggaatggcccttctgggttcacaattctgcttccgtcggttaacagcaacttagtcccttctatgcctgtggggataatcagtcaggataggctggattatgctgctctaacaaccccaaatttctctgatctaataaaagtatactcaaagctgtatacccttcaagggtcccctggggtctctgctcattgtagttcctgccctggctacaggcataaccatgtggaaatcaaaggctttcttggcaaagagaaagagagctctagaagctttagcactggcaaataaataaatgcttggcgtataggtgatatatggctcttctggctcaggtccttggccagaattaatcacatggtctcacctcaagggaacaggtgagttaaatgcagaaaaatattcaagctgggtgaggtggctcacgcctctaatcccagcactttaggaggccgaggcgggaggatcgcttgagcccaagaagatcatggttgccgtgatccatgatcataccacggcactccagactggggaccaaagtgagaccttgtctctaaaaattaaaatatttagaatgtttcctagcataaaa

SEQ ID NO: 7355 - DNA, 15212 bp, Homo sapiens
gatgatgagagtaatgttgcagttaccagacccgattcagaaagttcctgtgtgctgagtgaactacatcctttggtgttaccgcgagtgccacagtctaaggtgctgtacattacctcaaatccggtaagccccagagggatcagttggagaccccagggctactctcaccagaggaaatttgctcagagttgtttgccttacttgtatgatttctgactcaatatgttttagtacagttatgtgtttatcataataatccagtgactcttcgcattggtttgtttaaaatattaatagcaaattagagttgataaatatttctcagtcagctcttctaaggaggcatctgtaagttgtgcaacctagaatcaaccatgtggtcagcctaagtctgttttgggaagaatggaggatacccttatgataaaaatgactcatcttagattctctatggccttgacattgtcctttgaacgcctccttccttttgagtttttccttcctttttctctcaacttggcccaccctgtttattttttattttttcattttttttgagacagtctcgctctgtcacccaggctggagcgcagtggcatgatctcggctcactgcaacctccgcctcccaggttcaaccagttcttgtgcctcagccccctgagtacctgggattacagatgtgcaccaccactcggctgatttctgtatttttggtagagacagagtttcaccatgttggccaggcccgtctcgaactcctggcctcatgtgatccacctgcctcaggctcccaaagtgctggaattacaggcatgagccaccaccgcacctggtccctgtttgttttttagagagaggagtctcactatgttgcccaggctggtctcaaactcctgggctcaagccaccttcccacctcagcctcctgagtcgccaccatacccaggctgtttttgttttttaatatttaaatctgttaacttttttgccttttggatgtttagtactcataaaccaggtataaaaatcaaacaaaaacaaagagaaaagctatttcaagtgagtctgaacaagcacaaagatggtatttcttgcaggaggcagatgagattggtcttatccctgtgtaatgatttatgtagtctcagttcctacacaatagtttcctggtgttacttttaaggtggaaaaaaaaaaccagagaaaggtgttggcatattggccagatgttatacagctggatttacaaaacaggtatttaaaaagaaaattaggccaaggtgggtgggtcatttgaggccaggagttcaagaccagcctggccaatttggtgaaacctcatctatactaaaaatacaaaaactagctgggcatggtggcaggcacctgtagtgccagctactctggaggctgaggcaggagaatcacttgaacctgggaggcagaggtagcagtgggctgagattacgccactgcactccaacctgggtgacagagcaagactccgtctcagaaaaaataagagaaaattatgaaggctcgtaagtcaccacaccagggatgaaccaggtaaattaatgttccttttgtggtagtaaagcactgctgcatgttgaactggtgtggccgtggtttagtgacctaagccctgaatagttagacgttctggtcgctgatgacctaagaaaggagaagagttaattcaaacattctgaagagaaagaggaaggaaaatacattctgtggcagcggagactgccagaaaagccaatgagctgatgacctgagaaaacaagcagggctctaggggggcaatgccagtccaagaaacattacatcctgctaaaattagaacagataagcttacctcctagtacagagtcttcaggatttaggttatcattgagggctgacctgctccacaggtagtgaaagagaaggattagtttgtacagagtgcaggattgtgtgatgatgaaagagattaagttacagtttccccttactattttctattattgttccatattttgtctgtgagttttctcttctattttaatgtaaacaataataataaaggtcctcactccctgtaagagggctgttaattgttttcatccagattgatcaggcttcccctacctgctgtcatttaggaatggagaggaaaggagggaccctatcacatggacagttgacttggggccccagctacgggccccaagatgttataaaaattaaagcatggggaaaaagtataaataaccaaattggaaatattaacttttggcaaagttggaaaaccaaacaggtatcttctccaaccgatcaagagtactgtcttctttcaacacgtagatgagtctctgtcaagcaagcagacatcagccaaatgtgaatgatctcttggttcatggaatgcctctacagccaagaaatctctccctaatggacaagctcctgtaagaagttcaacattttcagactatacagtgtaaaagggaaacagagggaaagcaaaatcagtttatcagtatgcatgtattgagtgccaaccaagcaaccacaaaaactcctggggagtaaaacatccaagggacatggtctccaccatcagggggctgataatgtaactggaaagagaagacatacgtgggtaaaaaaagacctaaccatatgtggcatttttgtaactgagtgccatgtgcgtgctgtccagaatgagtgctatgacagccccaaagcattctggtgggtaagtgtaggttttgaacttgtccttgaaagatggggctttggataagcaaaggagagcagcaagggcattctaggtaggaggaatgatatggggaaaggtttggggataagaaaatacaaaatatttaggaaagatagcagatcacttttgacatagaagaacggaaaataggtcagaactttaatgcttctgatcaaagataattgacaatcttctagaattaaaatagaccatggtgtgattagcgggaaagaagtgactatggaactaatgaatgttaggaccagattgtggagagttttgagtgtcaggtttttgggattcatccacgttgttgtgtatgacctcctcccttgctgaggagtattctattgtaatacacacaatttatccatctgctctcctgttaattaattaacaagggtcatttccaggttagaggtattacacataataaagttactctaaatattcttgtataggtcttttttgtggttttacggtctcatttctcttgagttgatacctagaaatgaaagggtcatagcacaggtatatgtttagtttcataggaaactgccatacgatttcccaaaggagttgtaccattttacactccttccagcaatgtatgaattttggtttgggagcacatatatttaaatcaggaatctgaaagatcgatttcaccatagtgtaaatggatggagtggaaggaactgaaggtaaggggtcaatgcaggagtccacgcatgagctactaagggtctgcactcaagcggccacacagggtgagaaacgaatgagctattttgggagtgaaatttaagtgaaattctatagaaatagaggaatcaaagttatctcgatttcaagcttgagggaagcctctgttggcggaaaagatgggtttcttctggggtgtgtttacagtgaggggccatctcactggcaatgtggaagaggtcggatctagagaccaatctaaaagtcacctggctagagaagacaatcaaatccagaagttcatagaacaaaataaaggtgaacatagggcagctaaagcctaaacattttgtaattagaaagcagttagggtgtgttaaaaaaaaaaaaaaggcataagtgaattgctagagaggcaggaagaccagaacagtctccaggtttagccctgttccttgatgggcagcatcccttcaaagtcctccaagcacggtgccatgttttgcactagaggacaccaaagtggcctgaaaggttgaggaacttgctgaaagctataggagcaaatggcagagcttagctgcgttattctttcacttctcttccatttaattgtgcggatactcttagatgtcttaaaatagtcaaatgtcctctcacttgctttaaaagaaaaaaaaatacacacctgaatctgtagggcagtatttaagctactgaactgtttaggtgtggtattattttatttattggacgacttacagaaaagggttgtatttcagttatttatgcaaatagggctactgtggtcccaacagctctggctctgggcagcacaagaccctttgcccactcccagctttccaaagaacccaaacccaaatccctgccagctccaacttgctcagcactttaattgctacagtgggagccacactggtgccacaactgctcccaagcagcaatatttgtctttcagttgtctttctggtgacaatctttcagcacaaaagaatgcctcaaacagagtaggaatcagcccctgtggcaaatttttgggaagcactttggagtaggtgtccttcaggcttgccttcactggtgactaaaaaagtgactgtgatggcaggtggataatggacttgctttgccaaatgtccattctagtaaattatgtttatgattgaaataatgtcccacttttaagaacagattctcatgcctgagctagagtaccatctggaaactagtgttacttattgaaaggtttttatttttgctttatttccccctaaatgtagtttctagtctaaggctttttaccccgttagtcttgtcttccttgacatactgatctttacttcattgtgggtttctgatttggctactagagatcttgatgacaagctacttatgaggcctgggtccagtaccatcctttcaactcgaaattggccaaatcgagctgtggagtttagtacatcatctctgtcatacacagtgcagtccaccaggagacgcaatccaccaccacgaactcttcatccgatcagcacgagccattcatgtgctgaaacaccaagatctgtggaagaaatcctcagaggagcccgagtgtaggtttcaaaagcagaacttctggaaaccgtggtaaaactaacacattttacatacagaattaatttaaatataagactgaaatctatgcctagaaactaatcattaagtagtcttatgacagattgcccatgggtttagatccaacacaaaattttttaatgtggttaaattttattttattttatttttttagatacagtctcactcctgtcgcccaggctggagtgcagtggatgatcatggctcactgcagcctcaacttctgggctcaagtggttctcccaccccagcctctcaagtagccgggaccacaggcgggtggtgccaccatgccaggttaactttttgtgtttttagtagagacaggggtcttgtcatgttgcccaggctggtttcaaattcctgagctcaagcaatctgcctgcctcagtctcctaaagtgctgagattacaggtgtgaaccaccgcacccagcaggggttaaataattttaatgaaatagatattgaatctttctgttgatctagctaaagagttctatttgtaaaaataaaatgttggctagaatactatattggggttacaaaaggaataaagaacctatttatttaatcaaacattttccgtgctgggaacatattcagtgaaattcactccaaaataatagttaattcccctttaaggttcttctgtaccattgggatctgcttattccattgacaatgaaaacttcataaacctcagataagtagttgcttacataccagcaaaaatatcccttagcacttcctaggaagtgacactaaaagtaatcgcctttcccacccttcattcactacacactctgagcctcatcatgcaaaaatacctaggagccaattttaaacatagaattcttttagctgttgattcacaaaatgtcttaggatgattaatttctaaaaatatcctcaaaggtatgagataataaggccacagcagtgttttcaatgcggcttccaagttaagcattattatgtggatgtagctatatctataccaacagagctataaatgcattcatttggggatgagtagtcttgatgtataattaatctctcattccttctgacagtactttttttcaaagttgaaaagtaagttgctttgttacttctgggacatgaaagtatcattcagtttcaattactgtcttaaggataaggaatactgcaagctgctccagatcctactgaagggaatgaaggtttaggaactttacccgagaactatagttattagggaaaacgataaccagaaggtccagaactgtcaagaattccatcatcagctgggaatttacaaatccaaatcagcagagaagtgcaataccagatagggacaaatgttttattccagttctgtgggagagaaaaggccagcttctgttgtgtacccagagtatagagcttcaaaacaaaatcagaaaacactattttaaaaactaattttccaaaaatcctgagatctctacttgaaaacataggtagcctaaagctttctgtgcacattaaactcatctgcttcatttatctgatttctaatcaatttgctggtattgttataacttcatgctttcataccttcgtgtttgttggtgggatctgcagcccagtggcacccgactcgctctcctctccctcaccgacgcccctgagtcgaaataatctgctaccacctattggcacagctgaagtggaacatgtgagcactgtggggccacaaagacagatggtatgtttctttcatattgcctctccatgtacttaccatacaacctaatgggcagtaattctgcaggatctgtgccctgatcttgatttatactgtgttttgtcaaaagtacaaacacagtgctaatttatgacgtggaattggagctgtttggcctgcacttaccatatctgccatggtcgatagggttttaactacataccacattacagatagttttcactgtttctgtaacttttgtctcctctgcagaaaccccatggcgactctagtcgagctcaaagtgcggtggtggatgaacctaactatcagcagccacaagaaaggctccttttgcccgactttttccccaggcccaacacaactcaatcatttttggtagagtgacgtacttcctagaatggtcttgatagttggggaaagaaaaggtggggggaataatagtttggcagacttaagattttatctagaggcttaacccagaataaaagttgagtttccaacaataaaaagtgttataaatacattttgttcaaattctaactagtccctgatgcctattctttaatgccttatacagaaatcacaaatattctaagcaatttaacacttaagatatgtctgaccacaagcaagaatattaaatcccagtacacatcagataagcataactttattatgtaatcctgttcttctggaattacatcaaaagtggtctcagattatgatgagtcctggtggatgagtgagttgggactttaataaaaaatttttttcagaagcaggctcttgccatgttgcccagactagacctggaactcctgggctcaagcaatcctgccttagcctcccgagtagctgggactacaggtgcacaccactgtacccagcttaggactttttctttctactggtgttttaaatgctgacactgcctaccatttattaggcatttactagcccttttaagtaatagaaaaaacctgatcagcaatggggtcatgcactgaccctccccatttgtaggctgggagctcgaccccacataatctgctttgtggcaagagcacttggagagcctggggaagtaaccagggaccccacatcctgacagttttcaggatggtagtgtttgcagcacacttgtcccaactcatgacccttgaaccacagcaggctaaagcactgcaaagtttttcttctatgagaagagtggtaaggataatcaatatcagacctctgtattagtttcctagggcttaagaaatgaccaaacaactgggtgccttaaaacagcagaaattttttcctcacagttccagaggcgagaagttcaaaatcaaggtgtcaacagagctatgctccctttgcaaggtctagggaagaatctttttgtctcttcctggattctggtggccacctgtgatccctggtgttccttggcttgcagctgcatcactcccaatttctgccttttttttttttttttttgagacggagtctcgctctgtcacctagggtggagtgtaatggcgcaatctcagctcactgcaacctctgcctactgggttcatgtgattctcctgcctcagcctcccgaatagctgggactacaggtgcctgccaccacgcccagctaatttttgtaattttactagagatggggttttgccatcttggccaggctggtctcgaactcctgacctcattatctgcccacctcagcctcccaaagtgctgtgattataggtgtgagccactgtacccggccttttttttcttttctttttttttttttttaagacagggtctcactctgttgcccaggctggagtgcagagcacagctcactgcagcctcaacctcctgggcttaagtgatcatctcacctcagcctcctgagtagctgggactacaggcacatgccaccatgccctgctaatttttttattttgtagagatagggtgtcactatgttggccagactggtctcaaactccgaggttcaagtgatcctcccacctcagcctcccaaagtgctgggactacaggcatgagccacatgcccagcctgcctctgtctttacatggctttcctccctgtgtgtctgtgtccagggttccctcttcttataagataccagtcgctgaatttagggcccaccctaatctagtgcgactttaccttaacttgatttatctgcaaagaccctatttccaaacttggtcacattcacaagttccaggtggacataaattttgagggaacactgttcattctagtagaccccacgaggctgacttagggagaaactcaccaaaaacaagaaaaggaaacatgagcatttctgattcttggggttcagtgtgaaccccagaaagtttgagaacttctactgaatttgccttcttataatctgacacaggacatttattaagtagtacttgatgattatattacacagctagattctctgaaactttttttttttttgagacggagtcttactctgtcgcccaggctagagtgctgtggtgcaatctcagctcactgcagcctccacctcctcctgggttcaatcgattctcctgcctcagcctcctgagtagctgggactacaggcacctgccaccatgcccagctaatttttgtattcttttagtaaagacagtgtttctccaagttgcccaggctggtcttgaacttctgaccccaagtgatccacctaccttggcctcccaaagtgctgggattacaggcgtgagccaccgctctcagccaaacatttcattttttttaagagacaaagtatctcgctacatcacccaggctggagtgtagtggtgcaatcagcacactgcagcctcaaactcctgggctcaagtgatcctcccaccgcagcctcccaagtagctgggattacaggtgtgcacctctgcacctggctaaaaacatttaatttttgattgccttaggaataaaactgaacagatgaaaatgtttcagtcttctctttaagtttattaaaaaaaaagtaaaaattacttaccatttctctccccatttgctgtcataaaaagggagatagctagttgtttagtttattaggaatgctagctgtgagccggctgcagtggcttacacctgtaatcccagcattttgggaggctgaggtgggcagatcacctgaagtcaggagtttgagaccagcctggttaacatggtgaaacccgtttctattaaaaatacaagaaaattagccaggcatggtggtgcatgcctgtaatcccagctactcgggaggctaaggcaggagaattgcttgagcccaggaggcagaggttgcagtgagccgagatcgtgccattgcactccaacctgggcgacagagcgagaagactctgtccccccacaaaaaaaagaatgctagctgtcctgggcctggcactacagactagcactttgctccttgctgttttcatctagaataggggccagtaaactacagttcctgggctactcacttggcctaccgccttgttttgtaaataaacttttattggagcagtgccaccaagctcatttatgtgctatctatggctgccttcataccataacagcgaagctgagtaattgcaacaaccaccctatggtccacaaagcctaatataataactatctggccctttgcaaaaaataagtttgctgacccctgatctctaaaatataggggcttcaccagaaaaagcttcctgaaatctcttgatttcagtgctctctcaagggaactactgggggatgtttttattccagaagccccagcaggatgtcatatatagctttatttgatatttgcattttaatattgtagtcgtatctctacattttttaattccttgaggtaactgtgaaatatttgcatttcataatgctaaaaagtaaatgtaaagttaaatttcgatatggtggtaaagtcataagtatttcaatgttgctgaaaaggctggttgttttaaatgaaagcattcatttaaaatatatgcagcagccaacaaaaagaaatgagacgaacccccttagaactaactgaaatattaaaccatatggattatttataactcctgatttccttaacggcatagtaataatattgaagaatctgcaatttttacaataaatggctttgtgggcatctggcttgggattttctacttgaaattcaacccagtgcactcagctgacttttccctcaagttggtagtctatgccttttaccactgttgatttcaaggtgttcctgtgaacctgctaaaatattatcctttgtgagaagatgcatcataagaagtgtctcctcttttgtcttgtagctggatacacagtatcgtcgctcatgtgcagttgagtatcctcatcaggcccgacctggcaggggatctgcaggtaaaggtggggccatggcccttatttactactgtgtggttgtgttaagacccagcctttgtcttttttcctacacctatttccccttctttcagattttcttggatttaatgttttcccacatctttgtaaatcacctaaaattcattttggaacatggggtataataaaaagctaggagagttctattgctcagagccaaaaagtttcagattcctattttcttcataccatgtaaattaacttctcactactttggtaaactgccttttttttttttttaaatctaaaaagttcaacccaaattagtccttgttgtaatgttcaaaatattctttaagaacatagcatggattttattatgcaggcaaaatccatattcctatggattaaactgctttgatcagttaatctgttaggccaaggtaagaaaagaaattctaaaccatcaggatatgctgagtctgattctatcgcattaactctttttatctttaaattatactctgtagatgtactaacaaagaagtgatgggagaaaattgagggatgtcttttttgagacagtctcactctgctgatcaggccagaatgcagtggcatgatcatggctcactgtagcctcgaactccggggctcaagggatcctcccacctaagcctcccacatagctagggctacaagcagtgccaccatgcccaggtaatttattttttgtagagacagggtcttgctatgttgcccaggctgcaggatgtcttaattcttcctgtgacagtcttctcaccaccatcagggtcattcttattatgctgaaggtaaatttagaagtaatggacagctgagatgtttcctgttaatgatcaaaataatcagcaactatggtaaaaaactagtctgcctcaaaccatctttgtagtccaagtgatttctcagctcagttccccgcagcattgtctggtagtctttgaatgcttttgtcagattatgctttcagatctgcatttgagctacaatttcagccacattgaaagtcaggtataactggctgggcgtggtggctcatgcctgtaatcccagcactttcggaggccaaggcgggcggatcacgaggtcagcatattgagaccatcctggctaacatggtgaaaccccatctctactaaaaatacaaaaaattagccgggtgtggtggcagatgcctgtagtcccagctactcgggggactgaggcaggagaatgaggtgaacctggaaggcagagcttgcagtgagccgagatcatgccactgcacctccagcctggggggacagagtgagactccacctccaaaaaaaaaaaaaaacctcaggtataacttatgtaacactgaagtggaagtgagtaaatcagacatcttgcttctttttaattagtgggctcttctacaaaactagtttactgctttcataccttaagaaagtccaattcataattggagcaaaaaagcccttagctataaacttgagagtgattatcaaacctagactgtctactaatgttactctatgtcatctgacaggtcctcagttacatgggtctacaaaatctcaaagcggaggcagaccagtctctcgaaccaggcagggaccataaggcaaatgagaagaatctatcaggctgcaggaaacacgagatttcatgaagcagtattcagtcatcaagtgatgcagagcttgtatagaagatcgactagaaatcatcttcatgaagagtgattttggcacaagtgaccgaagaacaaaacaccatagcagccaaaaatgacatgagtgttgtttctatctccagttactgtctctttcagcagaaattaacctatcccattggaaaggcaagtttgtacccaaagatgcaacagtgaataatacccaaatcactgctcatgttatctcttaacaatgatcagttcaatcatataggatttgatgagctcacacatacacaaaaagcagcaaatcatcagtgacaatatcactggcttcagaatacttcagcctgtgttcatttctggagagttgtactcagttttaagtcattttgctgttgaaaatctgacctcatcaaatagatgtcattcctaaaactctctttagatgtcctaccctatcagcagattaaaatggaaggggtgtgtaactaaaaacataaatgttaagcattagtataaagtaacttctgtaataaattatatcgcatattttttcagataggacagctcaaccttacgatgcctacctgatgccaggtgatgcttattttcttcctaaagtaggttactggtcatatcttttttccaaatattaaatgcaccttgccagatattctcctgcagctctaaggaaaggaaatcaatttaaaaataatttgtagaatctactattgagccaccaaagtataattccctaaaagtttaagaaaccctggcaattaattcagcataaacatatcctataaacagcaggagaggttcagctttctgattttactgtggaccttttcctaagggcattcatgaatgcagcaacagttttaactatggcttacatttattttaaatttcactaaatacaaatcttgattgtcatgccagttttagatcttattaattttcagaatggataaattcaaataatcataaattacggtaactttttattataccaaggtgttctaatgccatcatatgaagacagatgcttcaaacaacctgcattaaattatatttttaataaaattaaaatctatttttaacctatttgtagtcacaaaccgaaaacgtgtcgtctttaccttagagctaaaggcttactttatgcatacggtatatttaatagtctacaaatcaaagatttaaacagtcccttaaaaattccatatattctcataccaactcatctacatagaaatgaaaatctctattgttctcacaaaccattaccatgagttcactataacaactggatcaatatggcttgcctttcaaagttaaagaatcagaaaggggcctgtaagaagtcatttagcccaattccctcaccctgtgtgttttccctcaaagccagtgcaatttttttttaaccaaaaaactggacatgtttaatacatacagtttgacaaatttggatttcactctttgttttgatgtagtaactcttttataaaagggaacagattcagacaagctcagtggcccaactgaagacattcagcaattaatggcaggacttcagtaatcagtggcaggactacaacatacatctcttcatgctagggaaaccaggctctctattataaagctgaccagggctattgttttccccttttctctcatcctaaacaccattcatatttttcctaggtcacattttagtgggatcatttacaaagcccccagaacttaatcatcatgttttaccttttttattgaattatatacacctcttacaaaaatgcttgaagtaatttaacacctgtacatcagtacaaaacctggctgagtaaaataaagagaggatctattcaagatcattaagcccaaatgtaatctgggaagtatgtggaagatagctgtccagcaagtgtctgaaaggtgttctagctgggtagagagcatattctaacagtcatgcacatcgcagaaagcagcatgaacagatcctcatcttagataagagttgtgtgtacaaaagatccatgaaggcaagtcttgtcaggaaggatagtgcctccttccaccttcgtaaatgtcaccacaaggttctgtcaggtgagacctcacacaatgtcaagtgctttgtaggaaatgctaagatcaggttgagagattctggttggtttagcaaat

SEQ ID NO: 7356 - DNA, 5188 bp, Homo sapiens
aaaaattaaagcatggggaaaaagtataaataaccaaattggaaatattaacttttggcaaagttggaaaaccaaacaggtatcttctccaaccgatcaagagtactgtcttctttcaacacgtagatgagtctctgtcaagcaagcagacatcagccaaatgtgaatgatctcttggttcatggaatgcctctacagccaagaaatctctccctaatggacaagctcctgtaagaagttcaacattttcagactatacagtgtaaaagggaaacagagggaaagcaaaatcagtttatcagtatgcatgtattgagtgccaaccaagcaaccacaaaaactcctggggagtaaaacatccaagggacatggtctccaccatcagggggctgataatgtaactggaaagagaagacatacgtgggtaaaaaaagacctaaccatatgtggcatttttgtaactgagtgccatgtgcgtgctgtccagaatgagtgctatgacagccccaaagcattctggtgggtaagtgtaggttttgaacttgtccttgaaagatggggctttggataagcaaaggagagcagcaagggcattctaggtaggaggaatgatatggggaaaggtttggggataagaaaatacaaaatatttaggaaagatagcagatcacttttgacatagaagaacggaaaataggtcagaactttaatgcttctgatcaaagataattgacaatcttctagaattaaaatagaccatggtgtgattagcgggaaagaagtgactatggaactaatgaatgttaggaccagattgtggagagttttgagtgtcaggtttttgggattcatccacgttgttgtgtatgacctcctcccttgctgaggagtattctattgtaatacacacaatttatccatctgctctcctgttaattaattaacaagggtcatttccaggttagaggtattacacataataaagttactctaaatattcttgtataggtcttttttgtggttttacggtctcatttctcttgagttgatacctagaaatgaaagggtcatagcacaggtatatgtttagtttcataggaaactgccatacgatttcccaaaggagttgtaccattttacactccttccagcaatgtatgaattttggtttgggagcacatatatttaaatcaggaatctgaaagatcgatttcaccatagtgtaaatggatggagtggaaggaactgaaggtaaggggtcaatgcaggagtccacgcatgagctactaagggtctgcactcaagcggccacacagggtgagaaacgaatgagctattttgggagtgaaatttaagtgaaattctatagaaatagaggaatcaaagttatctcgatttcaagcttgagggaagcctctgttggcggaaaagatgggtttcttctggggtgtgtttacagtgaggggccatctcactggcaatgtggaagaggtcggatctagagaccaatctaaaagtcacctggctagagaagacaatcaaatccagaagttcatagaacaaaataaaggtgaacatagggcagctaaagcctaaacattttgtaattagaaagcagttagggtgtgttaaaaaaaaaaaaaaggcataagtgaattgctagagaggcaggaagaccagaacagtctccaggtttagccctgttccttgatgggcagcatcccttcaaagtcctccaagcacggtgccatgttttgcactagaggacaccaaagtggcctgaaaggttgaggaacttgctgaaagctataggagcaaatggcagagcttagctgcgttattctttcacttctcttccatttaattgtgcggatactcttagatgtcttaaaatagtcaaatgtcctctcacttgctttaaaagaaaaaaaaatacacacctgaatctgtagggcagtatttaagctactgaactgtttaggtgtggtattattttatttattggacgacttacagaaaagggttgtatttcagttatttatgcaaatagggctactgtggtcccaacagctctggctctgggcagcacaagaccctttgcccactcccagctttccaaagaacccaaacccaaatccctgccagctccaacttgctcagcactttaattgctacagtgggagccacactggtgccacaactgctcccaagcagcaatatttgtctttcagttgtctttctggtgacaatctttcagcacaaaagaatgcctcaaacagagtaggaatcagcccctgtggcaaatttttgggaagcactttggagtaggtgtccttcaggcttgccttcactggtgactaaaaaagtgactgtgatggcaggtggataatggacttgctttgccaaatgtccattctagtaaattatgtttatgattgaaataatgtcccacttttaagaacagattctcatgcctgagctagagtaccatctggaaactagtgttacttattgaaaggtttttatttttgctttatttccccctaaatgtagtttctagtctaaggctttttaccccgttagtcttgtcttccttgacatactgatctttacttcattgtgggtttctgatttggctactagagatcttgatgacaagctacttatgaggcctgggtccagtaccatcctttcaactcgaaattggccaaatcgagctgtggagtttagtacatcatctctgtcatacacagtgcagtccaccaggagacgcaatccaccaccacgaactcttcatccgatcagcacgagccattcatgtgctgaaacaccaagatctgtggaagaaatcctcagaggagcccgagtgtaggtttcaaaagcagaacttctggaaaccgtggtaaaactaacacattttacatacagaattaatttaaatataagactgaaatctatgcctagaaactaatcattaagtagtcttatgacagattgcccatgggtttagatccaacacaaaattttttaatgtggttaaattttattttattttatttttttagatacagtctcactcctgtcgcccaggctggagtgcagtggatgatcatggctcactgcagcctcaacttctgggctcaagtggttctcccaccccagcctctcaagtagccgggaccacaggcgggtggtgccaccatgccaggttaactttttgtgtttttagtagagacaggggtcttgtcatgttgcccaggctggtttcaaattcctgagctcaagcaatctgcctgcctcagtctcctaaagtgctgagattacaggtgtgaaccaccgcacccagcaggggttaaataattttaatgaaatagatattgaatctttctgttgatctagctaaagagttctatttgtaaaaataaaatgttggctagaatactatattggggttacaaaaggaataaagaacctatttatttaatcaaacattttccgtgctgggaacatattcagtgaaattcactccaaaataatagttaattcccctttaaggttcttctgtaccattgggatctgcttattccattgacaatgaaaacttcataaacctcagataagtagttgcttacataccagcaaaaatatcccttagcacttcctaggaagtgacactaaaagtaatcgcctttcccacccttcattcactacacactctgagcctcatcatgcaaaaatacctaggagccaattttaaacatagaattcttttagctgttgattcacaaaatgtcttaggatgattaatttctaaaaatatcctcaaaggtatgagataataaggccacagcagtgttttcaatgcggcttccaagttaagcattattatgtggatgtagctatatctataccaacagagctataaatgcattcatttggggatgagtagtcttgatgtataattaatctctcattccttctgacagtactttttttcaaagttgaaaagtaagttgctttgttacttctgggacatgaaagtatcattcagtttcaattactgtcttaaggataaggaatactgcaagctgctccagatcctactgaagggaatgaaggtttaggaactttacccgagaactatagttattagggaaaacgataaccagaaggtccagaactgtcaagaattccatcatcagctgggaatttacaaatccaaatcagcagagaagtgcaataccagatagggacaaatgttttattccagttctgtgggagagaaaaggccagcttctgttgtgtacccagagtatagagcttcaaaacaaaatcagaaaacactattttaaaaactaattttccaaaaatcctgagatctctacttgaaaacataggtagcctaaagctttctgtgcacattaaactcatctgcttcatttatctgatttctaatcaatttgctggtattgttataacttcatgctttcataccttcgtgtttgttggtgggatctgcagcccagtggcacccgactcgctctcctctccctcaccgacgcccctgagtcgaaataatctgctaccacctattggcacagctgaagtggaacatgtgagcactgtggggccacaaagacagatggtatgtttctttcatattgcctctccatgtacttaccatacaacctaatgggcagtaattctgcaggatctgtgccctgatcttgatttatactgtgttttgtcaaaagtacaaacacagtgctaatttatgacgtggaattggagctgtttggcctgcacttaccatatctgccatggtcgatagggttttaactacataccacattacagatagttttcactgtttctgtaacttttgtctcctctgcagaaaccccatggcgactctagtcgagctcaaagtgcggtggtggatgaacctaactatcagcagccacaagaaaggctccttttgcccgactttttccccaggcccaacacaactcaatcatttttggtagagtgacgtacttcctagaatggtcttgatagttggggaaagaaaaggtggggggaataatagtttggcagacttaagattttatctagaggcttaacccagaataaaagttgagtttccaacaataaaaagtgttataaatacattttgttcaaattctaa

SEQ ID NO: 7357 - DNA, 349 bp, Homo sapiens
atctgcctcagcctcccacagtgccgggattacagatgtcagccaccatgcccagcctgcttggtcatttgtatggtgtcttgctcttagtcatattttctatttctgcttttgttttacattctacatctgtcaattccaatttctgaagtccttgctgatccgactatgctgtttctgcctgctctttttcaagatgccttgtttcttcgtggatgtgattcttaaaagtgatttctaatctcataactttacctgtgggaattgaggtctggattaatgaaggtttccctagagctatactgtccaatagagtaggcaccagccacgtttggccataagttaaaat

SEQ ID NO: 7358 - DNA, 119 bp, Homo sapiens
aaacaagcagggctctaggggggcaatgccagtccaagaaacattacatcctgctaaaattagaacagataagcttacctcctagtacagagtcttcaggatttaggttatcattgagg

SEQ ID NO: 7359 - DNA, 556 bp, Homo sapiens
gaactcctgggctcaagcaatcctgccttagcctcccgagtagctgggactacaggtgcacaccactgtacccagcttaggactttttctttctactggtgttttaaatgctgacactgcctaccatttattaggcatttactagcccttttaagtaatagaaaaaacctgatcagcaatggggtcatgcactgaccctccccatttgtaggctgggagctcgaccccacataatctgctttgtggcaagagcacttggagagcctggggaagtaaccagggaccccacatcctgacagttttcaggatggtagtgtttgcagcacacttgtcccaactcatgacccttgaaccacagcaggctaaagcactgcaaagtttttcttctatgagaagagtggtaaggataatcaatatcagacctctgtattagtttcctagggcttaagaaatgaccaaacaactgggtgccttaaaacagcagaaattttttcctcacagttccagaggcgagaagttcaaaatcaaggtgtcaacagagctatgctccctttgc

SEQ ID NO: 7360 - DNA, 3371 bp, Homo sapiens
cttgttactattattgctgcagatctgcctccaaggttgaaaaggagactaagactgtataaacatcttcattgtcagttctcaaaatgactgaaattgttttcatggtaaaagttaatatactaaagggttcctttttttttaatgtttacatttatctctatgtttacctttttagtcacattgacctgctggctgaatacctcaaatagtccagtagagggcagtccaccaggcagaaaaggttaggcgttttggtttcacatctttgctggggaataataggggaaatggctgtttttgctaatttttagctaatatctagccaggagagcaagcacataggacagactgaaagactgtaattttacacaatacacatggcttaattattttattgggatacagaaaaatataaattctggacaaataagtcatatacctgttttcagtcctaacatttaaggattcttgagtcccaatcacataactgtggtgttactctgtcatttatatggtgtcaaaagcacttgatgagtaaacccagtagcatctttttgagtgtttcataatgcattttccaacttgaaaacaataattgaaaaatagccttattgtatattttatgccatgactaaaagtgccatttttactgatgctattagactgataatttcttgaagtgaaatttaacctttttttctctttagtattatgtttataatgccatatttttagaaagcattccagatcaggcatggtggcttacacctgtaatcccagcactttggaaggctgaggtgtggggattgcgtgaagccacaagtttgagaccagcctggttagcaaggcaagatccccaactctacaaaaaaataaaaattaaaaaaaaattattaggctgcagaggcaagaggatcccctgagcccagaagttcaagggtatagtgagtcgtgattgtaccactgcattcctgctgagcaacagagtgagaccccatctcaaaaaagaaaaaaaaaggcattctagtaaatcgaatgtaatgtgaatggaatttcaaaacaggatctaagatggtatgtagtagaattcaaagtaatatcattttaaagttaaatgagtatggaaaaggtctgttctctagttttgtccagttcagtttactgaaggaatatatttaattatattcatatatttaacaaataaaaatatgttgaattttcgtattgtttgccactgagggttcagatgatagacctcaaaaaatcgaaaatactggttgaaatttgtagcatccatttagttattctttttgacctaaataacttaatagtttattaaatctaaggttagctaaatatgtagctaaccttatttgttttctttcctaacaactctgaagaatacataggactttgcactttttttttttttttttttttttaaagagacagcgtttcggtcttgttgcccaggctggactgtaatggcacaatcttggctcattgcaacctctacctcccgggttcaagtgattctcctgcctcagcctcctgagtagctgggattacaggcacctgccaccacacccgcctaattttttgttatttttagtggagacagggttttaccattttggccaggctggtctcaaactcctgactgacctcaggtgatccacccgccttggcctcccaaagtgctgggattataggtgtgagccaccgtgccgggcctggactttgtactttttcaaatcatatttaattatttcttgatctttactcaaagaattattctgcgctaaatttgcaacattaaacaataattaagcctggatccgataagttattgggtgactagaacctacaacacaatttatttttaatttaaactctcaagtctgattaaacttgggggaaaaactgaacattcaggtgatattttaaattttctttgtgactaaatagatgtcattaatatcatgcttcatcttactgtgcatagatgacccatggcacacaaagtatatgtataatattgcaatattgtacttccatctttaaaagtatgccaaagacttcataatgaattcaccatatttaaggaataaggcaaattaatgtttatccgaaatcaaaatgagattggataattcctggaatctgatttctgtaagtttcagtcctaaagggaccttaaatatctactagaacgaagtacagtgtatttctcagattacatgacattagtcaaccaatttagttgtaacacaaagtgagaaagccttaggtgttgaaggagtgtgaaaataaaaatctcttttcatgcagtttctgcttcattttccaaggattataatatgctgagtaaacttttggcactaaggaagccagctacaggccacgtaatgaaaactattcagaaaacagttcagcaaatactactatttgaatacagttcaaatcgtatttatataaatactctgcctacattatttaacccaaactggattattcaccattctttgaagatgccttgtgttttctgttatctacttctgctcgtgcagtttacttacaccttcaccctttcaaatcctaactcttcttcaaggcctgattcagattttaactttttaaaggctatctgaatcattcaaggagaagataccctttctctcataaaaacacttagagcaaactaccactattaaatcacttattgcatactgcctcagagccatgtgtccagttattctggtttttatctggtacccacacacacataatacttagtacatttccttatatgtaaataattagtaatgtaacacatcgagtgaatgaaattgtgattagcaaagtatgacagctaaaaacaaaggaaattttgtatagtttaagtttttgtacagcagaaggtaatggaaaatatttgcaacatatgacagtgtttttaatgtcttaagtatatgaagaatttgtttcaattggtaagaaaagaccaactgaaaaataggcaaaacataccaaatttcgattcacaaaaagatacaaatggccaacaaaacatgaaacaccttgaacccccattggttacaaaaaatacaaataaaaacaatgctgactgacaataaaaataatgtacatcttgctattagcagagttgtggggaaatcctgtcatattttggtgaatagaatatgagttggtatatcacttttagggggccatttggcaatatcaaaaaccttgaaacgtaagtataaacttcagtttgttcgtataacctgtcattcacatattgagtgcctactatgtcctaaatattggaataacactaataaagctcataagagactaataaa

SEQ ID NO: 7361 - DNA, 3370 bp, Homo sapiens
cttgttactattattgctgcagatctgcctccaaggttgaaaaggagactaagactgtataaacatcttcattgtcagttctcaaaatgactgaaattgttttcatggtaaaagttaatatactaaagggttcctttttttttaatgtttacatttatctctatgtttacctttttagtcacattgacctgctggctgaatacctcaaatagtccagtagagggcagtccaccaggcagaaaaggttaggcgttttggtttcacatctttgctggggaataataggggaaatggctgtttttgctaatttttagctaatatctagccaggagagcaagcacataggacagactgaaagactgtaattttacacaatacacatggcttaattattttattgggatacagaaaaatataaattctggacaaataagtcatatacctgttttcagtcctaacatttaaggattcttgagtcccaatcacataactgtggtgttactctgtcatttatatggtgtcaaaagcacttgatgagtaaacccagtagcatctttttgagtgtttcataatgcattttccaacttgaaaacaataattgaaaaatagccttattgtatattttatgccatgactaaaagtgccatttttactgatgctattagactgataatttcttgaagtgaaatttaacctttttttctctttagtattatgtttataatgccatatttttagaaagcattccagatcaggcatggtggcttacacctgtaatcccagcactttggaaggctgaggtgtggggattgcgtgaagccacaagtttgagaccagcctggttagcaaggcaagatccccaactctacaaaaaaataaaaattaaaaaaaaattattaggctgcagaggcaagaggatcccctgagcccagaagttcaagggtatagtgagtcgtgattgtaccactgcattcctgctgagcaacagagtgagaccccatctcaaaaaagaaaaaaaaaggcattctagtaaatcgaatgtaatgtgaatggaatttcaaaacaggatctaagatggtatgtagtagaattcaaagtaatatcattttaaagttaaatgagtatggaaaaggtctgttctctagttttgtccagttcagtttactgaaggaatatatttaattatattcatatatttaacaaataaaaatatgttgaattttcgtattgtttgccactgagggttcagatgatagacctcaaaaaatcgaaaatactggttgaaatttgtagcatccatttagttattctttttgacctaaataacttaatagtttattaaatctaaggttagctaaatatgtagctaaccttatttgttttctttcctaacaactctgaagaatacataggactttgcacttttttttttttttttttttttaaagagacagcgtttcggtcttgttgcccaggctggactgtaatggcacaatcttggctcattgcaacctctacctcccgggttcaagtgattctcctgcctcagcctcctgagtagctgggattacaggcacctgccaccacacccgcctaattttttgttatttttagtggagacagggttttaccattttggaccaggctggtctcaaactcctgactgacctcaggtgatccacccgccttggcctcccaaagtgctgggattataggtgtgagccaccgtgccgggcttggactttgtactttttcaaatcatatttaattatttcttgatctttactcaaagaattattctgcgctaaatttgcaacattaaacaataattaagcctggatccgataagttattgggtgactagaacctacaacacaatttatttttaatttaaactctcaagtctgattaaacttgggggaaaaactgaacattcaggtgatattttaaattttctttgtgactaaatagatgtcattaatatcatgcttcatcttactgtgcatagatgacccatggcacacaaagtatatgtataatattgcaatattgtacttccatctttaaaagtatgccaaagacttcataatgaattcaccatatttaaggaataaggcaaattaatgtttatccgaaatcaaaatgagattggataattcctggaatctgatttctgtaagtttcagtcctaaagggaccttaaatatctactagaacgaagtacagtgtatttctcagattacatgacattagtcaaccaatttagttgtaacacaaagtgagaaagccttaggtgttgaaggagtgtgaaaataaaaatctcttttcatgcagtttctgcttcattttccaaggattataatatgctgagtaaacttttggcactaaggaagccagctacaggccacgtaatgaaaactattcagaaaacagttcagcaaatactactatttgaatacagttcaaatcgtatttatataaatactctgcctacattatttaacccaaactggattattcaccattctttgaagatgccttgtgttttctgttatctacttctgctcgtgcagtttacttacaccttcaccctttcaaatcctaactcttcttcaaggcctgattcagattttaactttttaaaggctatctgaatcattcaaggagaagataccctttctctcataaaaacacttagagcaaactaccactattaaatcacttattgcatactgcctcagagccatgtgtccagttattctggtttttatctggtacccacacacacataatacttagtacatttccttatatgtaaataattagtaatgtaacacatcgagtgaatgaaattgtgattagcaaagtatgacagctaaaaacaaaggaaattttgtatagtttaagtttttgtacagcagaaggtaatggaaaatatttgcaacatatgacagtgtttttaatgtcttaagtatatgaagaatttgtttcaattggtaagaaaagaccaactgaaaaataggcaaaacataccaaatttcgattcacaaaaagatacaaatggccaacaaaacatgaaacaccttgaaccccattggttacaaaaaatacaaataaaaacaatgctgactgacaataaaaataatgtacatcttgctattagcagagttgtggggaaatcctgtcatattttggtgaatagaatatgagttggtatatcacttttagggggccatttggcaatatcaaaaaccttgaaacgtaagtataaacttcagtttgttcgtataacctgtcattcacatattgagtgcctactatgtcctaaatattggaataacactaataaagctcataagagactaataaa

SEQ ID NO: 7362 - DNA, 11842 bp, Homo sapiens
tggatactcacgtagggctggtagaacttggagagccgcggcttcccgtggttgttgaagattaggatcgccttgatcatggctgtgccgggccgaccgggtgggcactgggggccagggcgggggcgggcgcgcgagcctcgcctcgtaatctcgcctgcgatccttccccacccgccccctcccgcacgcgaccgcgcgcgctcccgagccgtcgggcggggcccaaggggcggggcctgggcggggcaggcactaaggaaagcggaaacatttctaggtccgagccagcggcctaactggagtgtgcgcattcgaccgagcacagacacgtggcccaccgctcctctcccgaggtctgtagtcgcggagaaacacatgttgcgttactaacgttcagaggtctgcgacagcttcgatttgaatgactagccgggaacaccaagtttcactgtgtaattgcgtccccctactccggcgcctcctttgcgacgctccctggagaaaagcacgcccactgcacgcgctcagtcgctacttccgctctcgagtgtctccaagcaagatggcggaggagccgcagtctgtgttgcagcttcctacttcaattgctgctggaggggaaggacttacggatgtctccccagaaacaaccaccccggagcccccgtcttccgctgcagtttccccgggaacagaggaacctgctggcgacaccaagaaaaaaagtaactgaatttatttccgggcagagaggcgggaggttcagattgcatccgagtaggggtggcggccagtaaagaagcaaaatttagaggagcgcctgtcctagacctgcattttgaccagtcatcagaagaaaagaagtgtactttttgatttttaaggcctttaagttgagtgttaaaataccatctctgtctatcggtgtagggcctgatacttggctgccacacttatttttatactgtatttttttgagttggccagactgcgagctctttgaaggagggagggagctgagtggggcggggggaggggggtctcggtaattccaggtacttaacacaggagctaattatttgagtaatgttttatggtggtaggggtggtcattggcaaagcctggattagaattcatgccttccaacttaactcgcttttgcttttttccccctcccagttggttgtgaattcactccttaaaccaaaaaccaaattcttatgcagaatgaagactgctaagggaaagctaaaggcatagatgttacctttttaagaaacacattttggaacctttgtgagttatttcattgcttgagtcagctatcctcaaccctttattgcttgagaatgtttccctttgtaaaagagattgctaaaattacgtgttctaaagcactctgtttagagttagagttgcctatgggaaaagcagcatataagcatcctcgattcagagaggctgatttcgtccttagacgttttccccgttctgtcttaagatgacagtggtctctggccgggcgcggtggctcactcctgtaatcccagcactttggtaggctgaggcgggtggatcacctgaggtcaagagttcgagaccagcctggccaacatggtaagactccatctctactaaaaatataaaagttagatgggtgtggtggcgcgcgcctgtaatcccagctactcgggaggctgaggcaggagaatcgcttgaacccgcgaggcggaggtggcagtgggcggaggtctcgccattgcactccagcctggacaacaagagcgaaactccgcctcaaaaaaaaaaaaaaaaaagacattggtctcattgctttttcttcaacttctgctactgtggaggataattctctcccaagactgccccccttcccactttaaatcagactcccatttccacctgatgcactataagtatttccatggatagccactggaatctttcttcaaaagaattccgcaggttttacagtgttttgttgcattttttcttccaatttactataggcaagagcggacgttcggagattcgttttaaggtctaacagtcttagtcaaaacttgttacttgactctgatgatagctgtgcaaaacaaaagctaaaaaaaatggcttacaatctaaatattgcccgagggcatattttcttggtctggacagtatttttttgcaaattgaactgtcatttaaggatgagatttttattttctggctcttgttagcatttgagtttgcctctccaatataaaacttagtttctaactattcctaccttgtgcttgtcattatttgttgaggataatatgatgaaagcagcttaactgttttgtatcctcagcctttgttaatctacagaagaaagattgttgaaacagaccaaggttttggcactggaggtatgttaggtttcctggggagtaagtgtttccctagttgattctaatgtgtatccgggttcagaactacaagcaaatcacctttaaaattaaaaagagagggcagctataattaaattattttccttctctggtttctcactgtcttacacttcatccttggtagcataactcatgatatttcctgcttcactttctggaaatgtttaattgaattaatcgatttattgatagccccaggggatttgagggagcagtgaaaggaggtatgaaagataggctaactaaaatcccacgttatctccaaattcattcctattcctaagataactggacctaggataattaagtagttctttagtaggaagataaagatcatgtgttctagatgcgttcattccaggagtaaacttgaataaaatgacctctgatcttttggccccaatatttaatacctaaagaatggagcaagaagggtgtaatagaatagagttaactttagggggcagcaatacactgttttgctttcaatgtgtcttgctttttgactgtagatttttttttttttttttttgagaggatgtctcagtctgtcacccaggctggagtgcagtggcttaatctcggttcactgcaacctccgcgtcccgggttcaagctattcccctgtctcagcctcccaagtagctgagattacgggcatgcaccaccacgcctggctaagtttttgtatttttagtagagatggggtttcaccatgttggccaggctggtcgtgaacaagaagttggaaggggactgggccctcttgaactcctgacctcaagtgatcctcctgcctcagcctcccaaagtgtggagattactggcgtgagccaccgcgcccagccagatgtatgtttgttttgttttagcaaataactttatgtctgagagacagattcatagggtttgggtttgcatatctgtgttttggatcgttgaaaccttaagatttctctttctgcaacttctttttggctttggttgttctattgttaataacttattgctttcctttattaaaaagtttattacagaaaatttggtagttacaaacagcataagtaaatccaagtaatcattgcctacaatgtcactactgagaaatatcattttgttgcatattcttccatatttatgtgaatgtgtttgtgatggtttttaatgaatttaagatattatacatgctgttggagagattaaatatccacatatatacccagcaagtggcagagccaggattcgaaccccaggcagttaaaagtgtatgcggtttactacattctatttaatcagtcacctccaaatatcctttttgggtatttaggtttaccagtgtttcatataaaaataaatgcttaaatggaggtgaaatctttttaagtgaattttcacacatctcatattttcttacactggattcctagaagtattattgaatcaaagtatacctttattaggatctgtattaccatactgcattccacaaagggtataccattttacattctcaaaagtagtatcatctacactggtaattactctaattttaactagtttggtgggtgaaaagggacatgacattattttactttgctttttgtgaacttaaatattgtttgtgtattgatcatttgtatttcctctctttggaactgcctgttaagataaaaggcattttaaaaattagtcctgttgggagaactttgtaggatcaagaaaaaaatgatggaaaagaatctaacatttttacatctctcacatatcttcagtatcataaatacgtaagatggatgtagattaaatatttctgatttctaagtcttttatattccattctctttagatgtttcagtgtaattgtcagtaaattttattcttcttttacagttgacattttgctaaaggctgtgggagacactcctattatgaaaacaaagaagtgggcagtagagcgaacacgaaccatccaaggactcattgacttcatcaaaaagtttcttaaacttgtggcctcagaacagttggtatgaaaccaatggtgatgttttcctacaaaaatttgcagtagttcctaggcaacagtgaattaactgttgtttatagaaatgcatatggagccacatatgtcgcttttgttatgcccttttatccctttatttttatttattcattttttttttttgagacagtctcgctctgttgcccaggctggagtgcagtgacacactgcaaccttctcctcctggttcaagcgattctcctgcctcagccaccctagtagccaggattattacaggagtgcaccaccaagcctggctaatttttgtgtttttagtagagacgggccgcctcagaagtgctagaattacatgagtgtgccactgtgccctgccttatctcttgttagtggagtttatgtactttatcaaaggattctctggggaattctgaaatgaaatgttttagatttgttttacaatgtgaaccagtttatgtatttattttttgcctcctgtattgttttcctcagaaagtcacatgaaagtatgcatgaatacccatgcataaaaatctatcatagagcattgcaatatctgtacattactacagaagttttggattttttcagtttgttttgatagcagttacttttttcctatttttcttgaggtaagcaatgtatctttgccatatattgtgaaagaactaggaaatacttcatgttaacagtacacgttaagcacttcacagtggcagttgtagtaaaggttaattctttaaatgccactgcattttaatttggcatttgactacagaaatttaaatgtctacatgtatttggcacattaagtgttttttatatatacataattatatgtatgagacacctttatctgcaaatagatcacaatcttggatagtattaactcagatagcatgagtggataaggtaattgaagaattgctaagtattttttaaataaaatcaggaatttttgggggcactgggggaaatatttgcttctgaacacaggcgtgtgcatgggtaaaacaagtgaactatcattaaagcaggaacatgttggaatttctttttgtccagggaggagcaaaaaactgactctgatctaagagtttggctgcaagtgctctcacaaaagtgaagctaaatggaaaagtcaggggaatgaggacatacacttgagagaaatgagcagaggctgcatctttgctaaagatgcaacatgaagagttggtaaaataagagtactgagtaatttaatgcattagtttagaaatacatggagatttaagaaaaatgaaatgatactgtgttctgtgttaagagtcttgaaattttgtattgcctgtattcattcagtaacctgaaaggacttgattgataccaatacatagtaggttgaaccatataaaattgccatcattcagccattttaccctatgaaaacaatttcataagggttaaattaaatcctctgtagtgaatatgattatcctttcccatttaagcaataggaaacataagaattattttgtcattttcctagattaaactaaaactgatacctcctgaattttatctagcaaaatggatgttaaaggaaaaaaagtaatgctaggaattctgggaagatggtggaatcagaaggtacacgtgaatctctctgaaattctcacaaaacttagtcaactagatagcaaaaccaaaaacccctgattagtatttgtaacaaaactaggtgataaggtatccccatgagccccaaaacacatgttggtggggacaaaccaccagcaaccacaggacctgcatggtatcagcatctgtgctgaaagaagcagtaagaaacagggttggcatctgacggcactgagaaaagtagaacctcaaaaacgctaatagatcctgaccgggaagtaaagtgagccaatttaagaatagaagctgactaaggagttttgccctcttctgtagcacgtgatgacaatacatttgcactaaggacttgaagggctcaaacaatctcaaaatggacccaggagggctctgggaccccatactgaggagaaatttcaggaagtgaaatgaaaattgaaaagggtagggacatgagaaaggaaggaaagagaaagaccagatcaaaatggtggggaacagagcctggaaagctcaaagcaggcctccatcgttttgaatagtatacaaaaaacaacaaggggagctctgtgaagttagaaaaactaccctaattcacctcattctaaaagttgaggaaaactaatttcacataaaaacaataacaggaataacaaggtcaaatcccgtacagtgttacaagaaaaacgagatgcggaaaagaacagcatccctagagacgatgaaatcaagccagaaatatacacctataagacaagtcgaaaattgtaaccttgtatttcaaaatgagctaaaaacaataagatggtataagacatgaaagaaaaacgatcagcattagtaaaactaagaaatgaagctcaggaaaagaattagaaataaaagaaaattatttcagaaatggagactaaagtaggaggaacataaacaacggataatatgttaagaaaaatagaagatgaaaaaaatttaaaaagtgagtcaacctttggacaagagtctgtgaagaaaaccagagcaagggaacagaaaaaatactgtaaaaatgtcatttaaggtaagagatttgaaactacatattgaaaaaacatctgaagtacctgagagtatcaacccagaataatgaacatcaggatgcattctgttaaaattactggacttgaaatcatttggaaatgtaggggacgggaaagagggcatgacttagaaagttaggctgtcgtcaaactttgacagcaaagatgcttaaggaaaaagtgtgaaataaggctttcatatcctggcataactgacttaatcggggcacagactattagcagaaaatgctattccagtgaaccatgaggaatccactagacagagagctttataacctagaataactagagactatcaatttaaagactgctgatttaaaagcagaaagaaaaataaagctgatttaaaggcaaagtaattaataaaactaactaattttgtctgcccaagttcttgcagtttggaaataatacttccatggaattttactttcacaaacctggagtaactacatgtactttaaagtaacaaattatacgccacttagcgattctgcagtggaattgatgatgttaacctgttacttatatagagctttatagtatgcaaacagatttatgtctttctgtcttttgaactaactgaattgcttttttaaaatttccagttaacacctgttacaaaatcacattgaatgcctttggttggttctctgctccatcgagtctgctgttttctgtgaacacaacaccatcttactctttgtctcctttgcctgtgaagtcctgattactgctttcttcacctggttaaatcctgcttatttcttatttcccacaaagccatcactgacccttttgctaggctagagtagtgtacatttctgtacgctacatacttcattagatgtacttttctcacccgtatttattcatgtgtgtctctgcctctcctacagattataagctcattgagggaagagatcacattaatcttcatagttccatgtacaattctcagcacatcatagacactgataaactaagctgttattgagagcccttcccctcatttataatgtacaagagtaaaatctggatttgctcataaattgtcaggcactgaacacaaattatatctgtattacaaaaaattcacattataatgcacattgttttctgttacagttctgaaatttttgtgccagaactctactcagccataaccacaaattgatatttcagcatgaactatttaaagataatttaacaataacgtctattgagtacatataccaggcactgaaagttagtgtattatctcattttgtctttcctaacagacccaagaggtataggtcctattattttccatatcttacaaataaagaggatgagagattatttgtaaagccaggattcaaacccaggtgtgtctcagagcctatacacttaatcaccacactatattggctaagagagatgcaagcaatattgatggttcatggttggtgatcaaaatagtatctgtcaaccaactattctgatacttttttttttaaatactaagtttaatccaggacattttagtcccaaatttggatattaaaggaaaactaaatatgttacctgcaaataaagttttgttttccaaaaagaaaattattaaagggcacttcaacactgtgactttaagtactagaaatattttagtaaaaacagactaaactgaaacattgagcagtgaatcctttaaagagcaaggttataaggttttaattgttactttttttcctgcttcatttgcctgtaagtgactttattaaaaaacctaagtatatatgtcatacatttacccaaggaaagtgtacaaactaccttgaatattagacatattgatttttggctgtgtgcctgtgtaattatcttaggagaaattctttgtgggtaagtggggacatttttacgataatgtaatttcttgaatagccagctcttcaaaagctatttgtaaaaaatatttaaaagtttcttagttatacaaagttaggaaccactgttctaggaactggaattgtgttatttttattcctctggaggaaaaatgagatcttcgtaatgatctctttaaattgactatttagaaaagttaggagttcagagaagctttcttcaattgtgaaaacaatacaaaatagctagctgattggaatgcagaaaaatgcagattaatcaggataccattaaacatctctgtttttccttcctttcttgtagtttatttatgtgaatcagtcctttgctccttccccagaccaagaagttggaactctctatgaggtaaaaaaaaaaaaaaaaaaaaaaaaaaaagaaagaaattactgcttttttttcttaatcgagtatgcacatctgtataatatgtatattgtgtagtattgttaattcacatttttatttcaagagatggcatgccattcttaattttctggggtagaaaagatgactttcttgttctgttatctaacatcttgatcatagaaagatattaataaattatacaatgattgaagaaccaaggaataaattacatttcaaagtcatcttcatgattctcataaagtaaggctttttctttatctacatttgatttcttctacattgttcttataatctgttatccaaatctgcctacaagaaattgagaaaacagcataagaatgactgtttaacatcttacagagtcattgtaatagttattagagtacacatactagcaccactactagaaaacagctaaaattacatatattgtggttggacatgtagagaaaggacaagattaaaatacataagctcattcatgcctaagatgcttaaaggacagattttattaaacacttaggattattaatatgtgtctgatagaaacaggcatcctttgaaagagatagcctgtaacataggtaacttaatatacgtgtgtggatatttatgaatacatgtggcatttatcttcttagtttatctaagaataataaaagattgagtttgatttattgccttttttttttgtagtgttttggcagtgatggtaaactggttttacattactgcaagtctcaggcgtggggatgaaccacaaagaaaatgcaacttgctactacatgaaatggattttcacggaagagacagctctgaaaagtttgatgctttgtggcaagagacttatacagatgtgatctatttagtatgttctactctatgtttatgcataagaaaacatgccatagcatgaatggactcagagaaaatgtgatttgtattaatgcaccagtcatcataaaagatggtcatgatagtacacccattgctcctacttgttactattattgctgcagatctgcctccaaggttgaaaaggagactaagactgtataaacatcttcattgtcagttctcaaaatgactgaaattgttttcatggtaaaagttaatatactaaagggttcctttttttttaatgtttacatttatctctatgtttacctttttagtcacattgacctgctggctgaatacctcaaatagtccagtagagggcagtccaccaggcagaaaaggttaggcgttttggtttcacatctttgctggggaataataggggaaatggctgtttttgctaatttttagctaatatctagccaggagagcaagcacataggacagactgaaagactgtaattttacacaatacacatggcttaattattttattgggatacagaaaaatataaattctggacaaataagtcatatacctgttttcagtcctaacatttaaggattcttgagtcccaatcacataactgtggtgttactctgtcatttatatggtgtcaaaagcacttgatgagtaaacccagtagcatctttttgagtgtttcataatgcattttccaacttgaaaacaataattgaaaaatagccttattgtatattttatgccatgactaaaagtgccatttttactgatgctattagactgataatttcttgaagtgaaatttaacctttttttctctttagtattatgtttataatgccatatttttagaaagcattccagatcaggcatggtggcttacacctgtaatcccagcactttggaaggctgaggtgtggggattgcgtgaagccacaagtttgagaccagcctggttagcaaggcaagatccccaactctacaaaaaaataaaaattaaaaaaaaattattaggctgcagaggcaagaggatcccctgagcccagaagttcaagggtatagtgagtcgtgattgtaccactgcattcctgctgagcaacagagtgagaccccatctcaaaaaagaaaaaaaaaggcattctagtaaatcgaatgtaatgtgaatggaatttcaaaacaggatctaagatggtatgtagtagaattcaaagtaatatcattttaaagttaaatgagtatggaaaaggtctgttctctagttttgtccagttcagtttactgaaggaatatatttaatatattatatatttaacaaataaaaatatgttgaattttcgtattgtttgccactgagggttcagatgatagacctcaaaaaatcgaaaatactggttg

SEQ ID NO: 7363 - DNA, 3883 bp, Homo sapiens
attctttcccatgtatttcttttgcctaaaagaatattggtatgattctcatttgctactttgagtatataactccatcagactttccagagttcttcagggatggagctcaaagtttacatttttccatatatgtctttttttttcttgacctttttccaccctgtaatttccccttgacttacccactgccctccccaatctgcaacagtgacagtttgctgcctcaaaacagagcattcaaatgaattcgcttagccaataacttctgtgaagttgccttttctaatggtgttattactcagtgatgcacaaatgtggtatttgccctactggtaggcaaacaaaggtctggttaagaatggtaacctgctgttttctttaaaggagagccaaagacttgtgctttactctgttttggttttgggggaagtagtagccattttgatcatgaaaccttttagtatttgtgagttgattgtactgtgtaagtagatttatctaaagttaactgttaaagttagctagccttataaaatgtaaaagtaatgaaaattcatcagtttctctaagccagtgaatgtcgtcttttgtaatattgtgtataagcatttgtgcccaccccagcttctgctatcactgtggtcaagtcatgggtctgagtaaaagaattcttgagtatgtgactggtgagaaataactaactatagtcagtacatgtacagattgttaaaattcaagacaaaatactttcactaaaaaaaaggattcgtctcagtaaagaagtattcagttgctgtcacttacatacaaatggtggtgggtagcagtctcaccatttttctactctctttttgctcgttttaaataattgagtaaaggttttatttgtaaaatctatctgtaaaaagcacctgtaacgatttatatgtcattgaaaggaatggcccagttactttttaggagagattaataacctacctggaaattaactgcagtgtttacttagattttttccccctaataagagtctaagtgtgttaaatttttaactgatgatatggttacagtgttgcaaggtgatctcttcccctgaaaaatctgcctatccttttaagaaaaattagacctactaaactaaagcaaattttactttcatcattagcacctaaacaagcaagcagtctactactgtcatcattttacctgagtgcccattttgctgatccacattcatacctttctaccttggacagctatgatttttatatttatttgttgcttcagctcaggtttatgaaattttcctgctgaaatgacttattgggagttgtaggttgattatagttactattaaacattttctcaatttagcttttctgagccacttcaagaagaaagctgtttttgtcaaaaggtactattaattgtagcaagtaaatcttaagatttgaatttttaagattttatttctgtgttcactaaagatctttccacaagtaatagattataattgataagtaatactagctatagtgttaataaagagtaagactatcaccaccaggaataagtaacaccttttaataataaatctattcctaataggtatgttttcaatactgcactgaacaaagtgggtaaagagccctttgaaatcttattgtaataaagggacttacctcaccactggaatccttgttttcagagcctctggattttcagccaaacactgaatttctcctaaactttatccctgaaacatccctagagaacgaactttattttcacaagaaaataaggcacaataagggggaagaacttaaacctcaacataatatcgtgtccaaaaatgtgtatttagaaaaataaaatcctgtggagtttgttatcctaatgtttattttatactagataaggtgacttgttttcttgtattgaggtcttactgtttcagatttgtttttgtttctgttctaactctaagcagacagagctcacaagtctttggcatccattttaggttgtacactcagagtcatcttataactggaaactgtcaggtggtcccccaccccagtgagtgtatgaaagagtcaagaaaaagattggaaacaaactattgggtgaataattggttgctctattattattattattattatttgcctttttttaatcaccatttatttgtgtaatctttctccattgattggctgtcattcttataatatctgaactaccccataaaataattctctgacttaaaggcatttagcttttgcttatcgtttttacatcctctattcaactaagacactgtcttgagagttattttttccagatggatcgttggcctaaattttcacacttctcccctgttcatcctttttcctcttccctgcttcctgggaataaaaggaacttttttaaaaaaattaattagtccacaggtctcattatctttctttatgattaatctatgactttttggtacaagaacaatggaaaaagtgaattaaggtaatgaacaaaacctttcacccacttaaacattttccagttttgagattcctcttcgtgtttgtggtgtcttccccttgttaccccttctgccctttttctctgactatggtaatttggtctttaggctcatatcagtctccccgagacattctgcagtcattatcacctttttgggtggattttattttgttttattttgttttttttaaaaaaataactttttaacattggtgcatatttgcttgggatagagcttgtgtaatttaccaatcgtattgattgtaagtgattgtgccctgcagaggtatatttaacaagacaaaaataatcttggttaataaaggagcccatgagatttgagtcaggttgtaagtgaaatcacttacacttttggatagaatttatactcctgctcttataaatcagtggtagacttaccattttttaaagttttcttgcatttttttgtttttttattgccacagctccctattctttcttgcctgcctccacccccctgttcaggaaaaaaaaaaattgagccttaaagtgacagctgattttttaattgctgaattttgtgaaattttactttttccaagtgtttccaactttaaaaagagaagtgaagacaaataggttggaatggtgaagacaaatggattggaatttcacaggctgtgaataattccttaggatctggcaaaccgtgaagtcttatttgaagaccttatctcctgagagttcttttggagtaggaaaaagaaccctatttgaaatagaccgtttttctcttgtttttaatctgtttaatatttctgatttttaagcagctttcaaaacaagtgtggtggaaaaaaagaaatagtagtaggaagatgtttagggcagcagaactctgggtctaaataagtacatgttcccacttgttgccgatttttgagagtactagggccatctttctcaattttgtattatttgtgtgcatgtttatatcaaagatgcccattttgttaaaatgctatttcctttattaccttggaaactgactcagcctcatgttgctcctaattagtgtttaaggctcccatgagttgcagataaaatgatttattttaacaagtagaaggaggtgattcaccttttggattgtaaatatatgaaaatgtctacaaggtctttatctgctttctgtcagcatttatattaaatgataaattaatgaggaacgtgtgtattttgtaaatgagtgtgtgccatcttattctaatcttgagattactttcttacacgtttttaatggagggggcttttttaggtgaaaaataaagaaatggctaatctgcatgagcaaaca

SEQ ID NO: 7364 - DNA, 1068 bp, Homo sapiens
cagttcaagcaattctcttgcctcagcctcccaagtagctgagaatataggcctgcgccaccatgcccagctaatttttacatttttagtagagatggggtttcaccatgttggccaggctggtctcaaactcctgatgtcaagcgatctgcccgcctcagcctcccaaagtgctgggattacaggcatgagccactatgcccagccttgtcttcccattcttgctgacttctgattgtcctgaaatccccacccattagtcattcctcgaagttagtggatataagtaagtttgtctaatagagaccatacgttagtcaacacctcaatggcatgaagaagaaaagggaggaggttgggtgtggtggctcgtgtgtgtagtcccagctactcaggaggctgaggcgggaggattgctaaagtccaggagatcaaagctacaatgagctatgatgcttgatcgcaccactacaccagcctgggcaatggaatgagactctattattctagattaaaagaaatgtaagaagtacaaaaatcaaatgcagcataggtgattttagcaaaccaaatacacaaaagacttttgtatacaggaaaatttgattaagtattgggcattagatgataccaaggaatggcattttcgttcattgtgaaacatgattatgtaaaaaatccatttttttaataaagatggataacacaatagctgcaatttcctttaaagtaggaactaaatatttttaaaaagtaaataatgcagccacgcacggtggctcacaccttgtaatcccagcactttgggaggccgaggcaggcagatcacctgaggccaggagtttgagaccagcctggccaacatgatgaaaccccatctctactaaaaaaaaaaaaaaaaaaaaaaaaaaattagccgggcatggtggtggccacctgtaatcccagctgctcgggaggctgaggcaggaaaatcgcttgaactcgggaggtagaagttgcggtgagctaacaccactgcaccccagcctgggcaacaaagagtgaaactccgtctccaaaaaaaaa

SEQ ID NO: 7365 - DNA, 580 bp, Homo sapiens
ctgatcttctcctttgggtatgtcagatcatcctaaattttagaagcagttgattcactttggaattcagaatgattcttgtattagaagataatttgtgggtattaatttttgtttaagtttaaaataaaagtaaagattcattttggatatcagttgaaaccccttagtaactcagtttctgttattcttgttctcatttcctttaaatacacttgttcttggcttttgccattttgattctgtgaagtaggcaggagcagggattaatttatacagtattcctgttctgaacaaaaccagaaaagtcactgtataaacttgacttaaaatagtatctttctcttttcatgtattttcatttgggggaaaaaaaatctctttaattgtaacctgaattcaagctgtacccctccatggtcctacactctagagctaatctggttgggcagaaaggcagaaggatggtatattgtcccattgtgcctataatgtattttaaattggtcattccaccttacctaatggaaattcttgcagctttcctagtgctcatcagcggttttaggaattcactaac

SEQ ID NO: 7366 - DNA, 9558 bp, Homo sapiens
gaaatgtttctcagttttagcttttgaaaacccccaggtatcgatgaccctggtaaatggtaggctggagctttcagtggcacctacatgatttaattgatgaactttttagatttaaagaatttccttaatcattgttgtttgttttatttctagttttggttgatggagaattgttaccacagatttttgtgaagatgttacagagggataagcctattgagatgcagctcacatcagcaaaatggtaaaagtcaggacaatgtgggaagaaagacagtgctttatcaatatcttagagtatttttggacaaccaaatttgcttgcttccaatccccattttattttgagattttgaaatttgaaagtcaggagtccatcccacattttcttaaatggatgtgagttttttatactcagcttattactagtaatatgcagaacaggaactctcgtataacatctgagactgtcttcagaaaattactttattacatcctcaaactactgtccttctacttcagttgaaataatactgaattagattagatttaaccaacatatactatgctaagtattagccagggaaatacaaagatatagaaatatggaatgagaattagttgaagttgataaccaagggatgatttcagagaacgtggcttcctcatcttttaaggaaaaaaaaaaaacacaaaatcttcaaaagttgtgatggtttagaagatacttatgcaaaggttttttttttttttttctagacggagtctcactctgtcacccaggctggagtgcagtggcaactatctcggctcactgcaacctccgcctcccaggttcaagcaattctcctgcctcagcctcctgagtaactggcattacaggcacatgccaccacgcctggctaatttttgtatttttagtagagacgggtttcaccatgttggtcaggctggtctcaaactcctgacctcgtgatccacctgcctcggcctcccaaagtgctgggattacaggcatgagctactgtgcccagctgcagagtttttattagcacaatttctggctcatgtaagcattcagtgcatgttctgtaattatcaatacatgaatgggtgtgttgagcacttgtgtagggttctgtgctaagtttaatcttagtatttaagctgtggttctaacattttggtgagaatttggcattttcaatgaattactcatgtatcgtgaattgtttggtttttatttgtttgtatcattttttgctttttgtctttaaaactgagcatttgcctctgtcagtaaggtaatgttctaaagtaaatggtttcagaaaaacaatatggtaacaagcctcaagataataacaactacaaatatttcagccgtctacaatataagtaaaatgattttacctgtttataactttcggtagaagccaacgtgagatgttttaatttttttcccccatcttgctaaaggaatgtaatcaaaaaggaaattcattaatttaaatttctgaagcgcttaatgttcagcgcctgcctggggaataaaaattaattatattcttattcaaaggcagcttataattgtttttcagtagaaccaaattattgactcgttcccaaagcccctgctgttaacctctgaatagttcatttctgatggatagctgtgttacaagttaaatgcctcttctgtgatacttctactgcatttggagttagaatattccaacttcatttaaactgagataatgtgttcatcttatgtttcattttgaacatttttccctttttattatggaaaattctgaagtataaagaatacaacatgtgcccagcacctagcctcaaaatgtgtccatcattaggttatttatttttaaaactatttggtaggtttttgtttcattttgtttttttaaatatctggcttaccatctgtatttgtcagttagttttctttgactattaaattgactgaacctccgaaaagcgaattgtcaaaatcttcactctcaagataagtgatattatttggttttcgattttttaataaaatcttaaaggcaaataatttttcatttaaagctttaaactccaagcaaaaacttattttctgctgtcttattccagtttaacttacatgtgtagagctggagcaattcggacagatgataactgtattgtattaaaggtaagctaattaattatctttaaaatgtgaaaattatccagttatgtgttaaatatcagtattgatactcatatttcattttacacatttatcattatgatatatgtgcatggcgtagaataatattgaaagaccatgctttcttttcagtggatgtcatatagtttttaaaaattgattttagatgtgtttcgaaagtcagcgtgaaataattatttcattgtcacagcctttcattttatggtaattaggaggatgtggaaattgtaaaagtgtacaattcaggtgaaacagaaaatatatttcgttcttgattgtcattaaatttgtactacagttttagaggcagacgatttgccacttttgcagaaaaagactttatatcattctcatagctgataatcaaaaggcataatgaaagagaataagtagataacacatgaaaacaagcattgtcattgtgatatgtcatatacaacttgaatttagaaaaacctggagaaaagaccagccctaaaagtcctaaaacctggattctggttttagcactcccacctctgactgtacatcctttattcttttgatgcctcggactccagattatgaaaattgaagcaataattcctgctcatctatgcacagggttattgtgaggataacaatatattaaatacattaaaatgtcttattagctataaaaaattaagtataagtaaattgatgatgtgtcattttataaatatgagatctcacattatcattgttcaaaaggtgatcccaaggataaaagagcacaaagaagactaatatttgctttagtctttggggaagagaattaatttaatgagatctgaacactccctaagtaaacaactcttcatagagtgccacggacttccatagcatttatcttgatttatttacttctctaaccttcctctttttctgcattggtaaaatgttagtagtatattcttcacatagtagtcatgagcattagattacataattcatgaatttatggtatcaataaatattagtaactagtaatgttagggaaaaaagaatagggccttccccttggaaacctagggttgaattataaagcttctactagcctaataggaaattagtagtgaacgatgaagtgctaagctctgtggtaaaagatataataggaacttattatatataaaagagcaaagcacagttgcctgcagtatttgaggaagactttctataatgataacatttcaatttatacttccacattgtcctttcaagtggatccgtcaggcttagaaatagtaaatgtcgttcgagaccagcctggccaacctggtgaatccccatctctactaaaaataaaaaattagccaggagtggtggtgggtgcctgtaattccagctactcagaaggctgaggcaggagaattgcttgaatccaggaggcagaggttgcagtgagccgagatcgtgccattgcactccagcctgggcgacagagcgagactccgtctcaaaaaaaaaagaaaaagaaatagtaaatgtctgtaatatttttattgagaacctaatgtagataagttaccaaaccattgccaagatttttgagggacctcagaagtaaaattggactcatggataccactgctaattccagcaagttactgggaaaacctagcaactgtgatacatttcagttgcattatagtagaactggtggaatctgagtaatggtaagatcactgcagttttaaagctgtattttgttttggcaactgtaggtatgactccccaaaccaaaaaataaacgatattactcactaaggaagagatagcatacttttcctaaggcaaaatcattcctgattaaactgctgggtcttttttaggtaaataaatagatagatagggcagaaccatcagacatgatttgttagggattcttaaatgtcttttacaaagttgtacaataaaacttgtcttatcggtcccaaaagcctaattagaatttgtattaatatactttgacgtacgaatagagtttaatgtgccagtacaaattattaatgtgtactgaattttgcttgtttttgcattttaaaaaaatcttttattctctagaagtcagtaaaggaaatatatgatcataaacattactcctgataaaagctattgagttgattcagtcactatatgcttaagcttttacctttaccaaaaagcaaataattaatctcactacctttcagacattaccttgtttggttcgaatgtgcagtaaggagagattactagaggagagagttgaaggagctgagacacttgcctatctgattgaaccagatgttgagctacagagaatcgctagcataactgatcacctcattgccatgcttgctgattatttcaagtatcccagctcagtgagtgccatcactgatattaaaagggtatgttattttccttttttagcagctcaagggagatttttctaaagtttttcttactgttcacagttttgaaccaattgataactacagcttaaagcccttttaaataaaggttcttttatctttggtaacatagataatattgctttgtgaatttttgaatccaagttgtttaatgtttattgtcagaaagtttttactgagcagataagcaataaagaaaattgcatcctaactccccaactaaacctcaaaagtagtggattctccaagctgggtattgacataaccgtataatcttattcttggtcatggaatcatctctgttgttacattctcattctttaggtcaggagtaatctttttgttacaggagactaagttgtcccatgttactttccaccacagtctattttgttacctttccctatcttctctttttcccagtttcatactgtgctttgggcctgctagtgacagctaaagcatcatttaatcttgaatttgggaccaaaaaggccaaattgtgctttttctgaaaacctaagttccttagaatagatcggtatttattttgacttgttgcatctcagcctgtttgccctatccatttctttaagcataggagatgaacattctgtaagagaaagtttattcaaggaggtcatggtagagagaacattgcctcttaattagtagccagtactgtttcatgaatgtaactgtatttttcatgccagtggttccaatggtaactattctccttttgacctctccctcatgcttttgagtttcaaaaaacctcatttggtaggcagttgttcatttggcttttaactttgaaaataaagcaaactattaagggtatatctttactctgtcttaagaagggcctaaaataaccttcactggtatttgtattagtaatgtactctactctttttgtattaaacttatgtgtctgctcttctttcagtagtggtgtttttccagtagaagtgatgggttacatacatttaaccagttgccttgtctgttttccttctggtcattttttcacactgacactgtatcttaccaatacaaagatacatgagcaacccttagctactgcctcatgaacgccctgagttgaccaccccaggaaggcaaataaaatgttttgatggccatgagagtaaggaaacaattttaagaacatgtagcctatgcatatgcaaatcatttaactagtacgtagattatcccttctgttagtttttccatttcatttccatcagagtaaaactgtaacaacaataatccttaaaaatgacatcgtaataccaaacttgagtaatagtttgttttgtcatctttatttttgatgatggattatccaaaggtttctgacccgaaaagtatagacactagacccgtaaagagaaatcttcacatgttaataaatttgtgattttcatgatatgttagttcaagtcagtattatatcttaatttatgactagaatgtagttaagactttaagagtagatacttttagaacttatcaaagtgagtattctgtattgggaagttcttcctataatccatcagtgtctgctttgaacagaagttttggaactattaagaattgccttcagagccaccccaaattatatatatatgtaaaatatatatattgtcttttgctttctgtggaattttttgttacctacgttatattacccaactgaatttctccatcttcacacacagtcagtgacaactaaaagtctcatcattgatcaagctataccactgtcagtgttttctagctaataataccagttagctctttaggaagtttcaaaagagggtctcagaatgttatgaacaacacctacatcattggatgagtgaacctttccaaagtaacttctttgggaaaagtggtattcatttggatgattacattaaggcttttagttacgaggttatttatattattggtagactttgtatagttacttggtcatagtcagtcattgaaagtatcctgaaaatatgcttctgttttatctttacagtagtttggtgatcaagtttatagaagagttgataattagttatgcatgtttaaagataccattaattgcttcatgctgataattttgataatgttcttgaaaaaacccatacccaacataaatctcagataactgtaatagataataatggttaccatagtatacggtttgttaagcattttcacaatgggttctctgtttctaaaagctttttattttatttatttttatttatttatttatttttgagatgtagtctcgctctgttgcccaggctagagtgcagtggcgcgatctcggctcactacaacctctgcctcctgggttcacaccattctcccgcctcagcctcccaagtagctgggactacaggcgcctgccaccacgcccagctcatttttttgtatttttagtagagacagggttttatcgtgttagccaggatggtctagatctcctgacctcatgatccatctgcctcggcctcccaaagtgctgggattacaggcgtgagccaccgcgcccggcctctaaaagctttttaaatgccaaaattaggccagcactactcttaatgtttcagaaaattaagggaaccctcctaaagacattgttgcgatttcattcaggttatcagctgtagtctggggctagagaagtccaggtgtgccttcttttgaaggagaacatttcaaagagctgctgcaagcaagcattagtgccagtaaagctaccatttaggaacactgaatttttcggagtcagagattcacaatggtttttcatatatcagtgtcaaatatagtgttcacttttaaatggaagcatattgtgtgcattttaggtcacattgatacgaacactgcaaagtctcagtgctatgtgaacagaatccaaaaataactgggaaatgtagttaatgactgggaaattcactaaaatctaaaagttgtaaactttttttttcttcaactcagttaatgttattgaaagttgaatttatggactgagttggaacatatcctttttttccccatagcttgatcatgatttaaaacatgctcacgaactccgccaggctgcattcaagctctatgcctctcttggagcaaatgatgaagacatccggaagaaggtgagtctgggagaggggcgtcccccagtcctgacagccagcaggcagggagtgacgtcaacctgaaagtcgtggtgaagagcactaacagtgactgtttgaatataataaagcagagtgactaaaggcataattgaagaatgaatgggacccggatttggggggttgtttgtttgtttttagaacatagagtggcatggccgtgctggaatgacaaataactggcgtgctttttttttgtgtcattaatatgaattattatgttgcacatttttgcatgtgttctgataaaaatcaattctagcactgtgaagcttcagacaccttgaaagtcctaacattagaattgtaaatgttatttatggaaataccttccaatgctattgagaaattcaaatctctattgtatattgttctttgatatgtggcttagttttatgttttgattttttttgctactgtgcaagtttaatgtgaataaaatctttgtggaatgatgattttatgtttagtgagtggtcatctgaattttccagctccccagaaaatgtatgcactggtatagcacccttatgttactaaagcctagtctaacactgaactcatgttcttgatgagaatacttctagatgaggagtatagtggtaagtaagctctgacttggctccttccacaaaccaaaaagctggaacttaccactcaaaaacatgtataacctaataaattctacacaaggctttcaagaccatcagagagcaaaaccacatgttctgtcttgaggagccatagcagaaagagcaaattagtcattatttactgaacatgatgatttactaaatctctccatctgcattagtattttaaggagcactgtgagagaaatcacaaagtattagagtttaccatgattcagagaagttcttcaggcctgtagaaagaggagtatggaccagccttacatttgttgaaataacttgaaaaggacccatttcttgaagaaactgaagtaatagcaataagatttgatgtgtgagtagctttgatttaaaatcaatgcaaaaagcacaactaataaattgaatgtttccatgtacctcactttatttcagttaacaagatactttgacttgaagtgtttttagtgtatccctatgaaaatcatttttggtacatctaagttttcacttataaactgttatttcaaagcaaacatactagtgatatatatatgatttatggatgttgacgccaatgttcagtttgggtacgttggtgtattgcaaggggagaggcttttataacaatagatttgaacatttttaaaaaattggactgtgtaacttaaatacacaattatttggtttaggatggttattagggcccattagaaacaggagaagtattttacccattcttaaagctctaaaaaaccatctcatggactgaaaggtagatagacagatggaccacaatgggaaataggatgtccatttgtacttctttgtacttttttgttaataaactgttttggaattaatggcttaatttgtgatatcatgttctagaaatacctgcaacatgacagtctaatcagtagtctattaaaacttgtattcataatgtgtataatttcctggtaaggctaactcctgatcgtttctgtagaaagatgacaaataaagaaaaagttataattatt

SEQ ID NO: 7367 - DNA, 160 bp, Homo sapiens
ggggcttatatagcattttaaggaagatatttaatttctgggaaattaagtgtttgaataatttacagttcatagtaactactgaagagataaattgtaaaatggaaactataaagtaattttgtgataaaatctacttgaagactggccataggcgtgg

SEQ ID NO: 7368 - DNA, 567 bp, Homo sapiens
cagctatctagtttagtcttggtaaagagctcataaggataggaatggagagtggaactaacttcaaactagccagaggcaggggaaataaatatatactgaaaggtacctcctctttcctgtgccatgcaaaggctaaaccagtcagcacttgcacatcaagaaacaattgtttgggtggctgtttattgttcctttacttcatctcctctagcttcattaattcccccagctcttcctccatttctcctatcttttctgcactagacttccttatttactataatgatttgaaaaacctacaggttgtggaaaggggactagtctggtaacattactcttctgccagggtttgctgtattaccaaagtgccattaatgtattctaggttcctcctgtgggcacatgctagtgctgcagagcattgcccaagtgaggggcagggcttcttcataccccagctacctatcctgtgagtgcttgtcaacctcaggttccacattaaaacatcatgtgtagactcagacttagaagtgaggattagattggattagaatggaaagaatt

SEQ ID NO: 7369 - DNA, 4683 bp, Homo sapiens
tgttcctctcgtctgattgttccaaaggctgctattttccaaacgcagacatatttggctagtggaaaaacaaagaccattcgacacatggtcgccaatgtgcgaggaaaccacatcgcttctgggagcacagacacatggaatgggaaaacgctaaaaatcccacctgttactccatccatcctggattgctgcattatcagagtggactattccttagctgtaagcaaagctcttttttaaaaaaaaatgtgtatgatggacaataactgatgtcatgttactgtgggtatgtagagttgcctataaaaatgtcattttatttcagcattaacaccaattggggactgtatgaagattggcccttgtttttaataaaacctattccccacaggggatttaatagaatgccataaaagaattgaggtgcattaaggggtgtttgttatattgaagacatagccttaattttctataattattatataagccatgcaaacctacaatgatgcatgttaaggacacagttctctgtcacagagcattcactatgttttgtgtactcttcattttgtttaatcaagacaattgagaattgtgatgggggtggtggcagccgacaaaagcatttgtttctatgaaaaaaagaaattaattgggctacctactggaggtgtagcttacatttgttcctttctcttttttttttttttttggcttattaggtatacattcacattcctggtgctaaaaaattgatgctcgaactgccattagtgatcggtacaattccatataatggttttggcagcagaaactccagcattgccagccagttcagtatggatatgagctggttgacactgaccctgccagagcagcctgaaggtaaaatatgttggcgttctttcataacgaagctttacctagaaaatacctaggaacagaatatatacactattaagtgctcagatgttgatgagtactgctactataggtatctttattcctactactaaaaaatcagaaagcattagtcctgggagggactttgaaagtttagctttatctaggacgcaaagctgctgatagcagattcaggaataagatgtacatttcctaattcctatttgtaataggaaaacaatgaaaaacagtcaaatgtatggtgtgttatgtcttttctatagtcatatttcagtgatatttgtttacctatatctcaagagactagaatagaagctattagtagtagtttaataaaaggagaatctattttttattgtaatatgcataaaaccttgctgattagagggaaagaatgccatattttttatcttcaagtttagctgtttcttgtttttgtagcagttaagaatcgagattaatttttgagtggatttcttaactccaacttcatttctatttcagcaccaccaaattatgcagatgtggtatcagaggaagaattctctagacacattcctccttaccctcaaccccctaactgtgagggagaagtgtgctgtcctgtgtttgcctgtatacaagaattccggtttcaacccccacctctttattcagaggtaagcaaagcaaaagaaaattagacttttactgtattattttcaaataatcattttttgtcatccgttcattagagtgtctgttgctgactcataattagtaagggatacatttaaatttgtttatacagtggtaatagattatcgctgattcatttgccagatttttttactattgtccttgtgatctatggcatcagatacagtattgtggattgcctttaaggtgtgttatttggccatggaatatagagaacttaagcaccttctgggacttacacaggctctgaccagcttggcatataaccatcatataattacaaataggtactagaatcgttttaaataatgctacaacactaatctcagtccgctctttttttgcaggttgacccacatcctagcgacgtagaagagagccagcctgtttccttcattctctgaacgtatttcagaaatcactgtgttcatcatcaaattagaatgttggttcttttccttctgcctttttgggaaagagacaggaaagattcacttgaaaacataaatgaacgtcaagactgaaggcaatagaaattaaagaatgtgagaaagttctggtgggccggcaggattgccgcacaagtttatatgatggtcgtatatatatccctgttaaaaactgggatgaagatgtgcaaagtcacagaatgtaatggaagtcctgatggttacagagtaagtgaaagggtgcctgcgctgacgtgagagaaaggaatctgtaaacagtggaaacactgtgggagtttcccatggtgaagagtggaacgaaggcgatatgaactgaaggggtgaagacttgattttggagagggcaacaaaacaagggtgtgtgtgcataggagaatggcccactccaaatacgaagtgagatcctgagtctttgggtgcttcatgatttcctaccatattcaggcctaaagacattgaaaaagcatcttttcttgagatcatggtcatatgaggtcctaatgaagtactacagttttcattctttcaagggtagactaaaatatagtttataaatcggcagtacggtattatgaaaccaagaaagggtttcttgaaaagcttgtcggttcaaagaggaaagatgaatttcaatgtgaaaacacgttttgttgagggctgtactttttaccccctttaagtgctttaacaggatatacgtttgattttcctcatatcttatttacctaggagcatgtaagagaaagaagggagagaaaaggttgcatctgcaggatgccttgataactacacagtcccaaataaaaggcctttttctaacctacctctaatggggttatcagatatgtttttaaatctctcgccctgagtactcttcttgggagttgctgctgtttacagccacagtctcatctatcactaaatatgaaactgggccaaggggaaaattcagtaagttagcgttaaatggaagtaaatatatgtatacctaagagaatgtcaaaataaacaccaaaccaaaagaaggtaggagtgccatttttagaaaagacacaactttaattcctgtcaagagacctaggtctactgatggcagtcactgcattgtacattattccagttcttcagtaattctgtttaaactgtgattttctttattgtgttggtgcaatattttattatcatttaacctcaggatattcagaccaacaggattgtgttgctgctgaaagtctgagcagtgttttaccgtccccagcccccctcccacatggtcacatgttcacttgcttttccttccatctgttggttttgtgagctgagagcatctctggacacatggaagggagccagggattcctgtgatacagattttgaaccagcagagtactttggttttcttcatgtcctaagggtttgatccagaaaccctggtgcttcccctgcagaatactgtacttcatttaacagaatgattgatttttctttcaatcagcatgttcaccaaaaatagaaaagttcttctaaggttaaattttgtatttaaaagttagttggccatttgatcagggaattttctacacacattaggcaaatgtatgcttttcatcctctgggcttacctctctcctctgcaatcctggaagcatcgtgcatagttctttcattgtaagccgctatttaaattcccacaatgcaaaactgttagaccagtaattgtgctactgaaattgtcacaaaacgttattccttgatttggtttttaaattttgctttcgtgtgtgtgtctttaaacaggtaatgtgtatttaagtgttgtctaaacagttgatttttactttagaaaagatcatcttcaactgtttattgacttctgagttatatagttcatgccctgccaaggcattgttcgactccatgatactaaaacataatgaaagaaacaaactccagtatggagaagagaaagtttaattatttggttccatctagaaaagcaacaacttaaaggaatccttcactaggattgtcttatcacctttattagataaatcatgaagtgtccctgtgaaattgaagtgaaactatctctgtaggacttaagagaatagctaaaaggtgtgacttgccttattgaaatgatactggcatatctgactgtaagcagtaggttgaagatatcattttatgaatgtggagaattctacattgaaacagaaaatacctgggaatgaagattaaaaatgtagctgctgttatttgcttggttattcccctcttgctcttctttagtttgaaaaaacaaaaacgtggccttggaattttcattttgatgcagaaattttgaaattgaaaatgtgcatgttttggtgcacaaaatccttctgtgggcaaaactttgtttttgttttgcacagtaagaaacaataggcaagcgttatgtttttggtaagttaactatgaaagctttcttatttttattattaaaaatgtaacaatttaacccacaggaaaaaaaattactttgtatgcttgtttgaaccctatgggttcgttttattaataaaattattacactaatgctatg

SEQ ID NO: 7370 - DNA, 2446 bp, Homo sapiens
aagcttgttaattttaataacaaatctttatgaatctgaagagaattgatgttcatgataatgatatagatgtttaatatactttctgaaataacactgtttactgttcaagttatattgactataatttacattattcttgtttgagaattgtatggcatagacactcattagtcagagtgtctagacatccagaccatgcctgataacacaagaatcatatatcattctctagaaaacaggctgtttggttatagagtatttatcttaaatatattaacagacactacataaacattgaaaagccatgcaagttatagctcacaggagccagatctactgcaactggggcctacatacaaaattttatggcagtggtttcagtatgacaatcttttgaattgatgccgtatggtaaaactataaagattttttaaaagctctgtctcagctagaatttttaagattataactgaacagtatagcccttttagttgtttgaaaattacataatgattcaaaagcttgtttcactgcctttcccagcactaagaaaattaacaatcatttcttttaatttccttgaatcagagccattctaaagtgactctggaccagcaattctgagctatgatttcatgatacatgtattaatatctaaatgagttgtgagttgacataagaaccatagttccataataattatcttcaaatcaatggatatcttaaatgtgtttttttcttccttagagattattattaaactgatgtatttgataataaagaattttaggactgagaaagttaagtttttcttaccaataataagatattgaaatatataaattataaaacagaaataaaatgaaataaaggaggttatccctaaagtcatttaccttagtcacttgcaattaaatatggttacttcggaagaagaagtgtggccctaaagctactgtaacatgaatcatgccctaatgtgcactatatatgaactactttggtcagaaggcagcggcgggtaaggatggcttcctctcacagtgcttcttaggctatccatttaccaaggaattctaatctctttctctcacttcaccaggaaaggagggagtttaagatatagaactgggcatgctagcctcttttttcccttttgtggatttgtcataactgcagagaaccgatgttgtggtctcttgccagctacattgtgaaccttgcagtgaaagttctttgcctctgcaaagggagatttgtgcttgtgcagaactgcccatgccttagtaagcaggtctgtctaattctaagttcaatatctggtggctattgttggcataaacttaaagtacatcctctaacctagcctttttcagcagtaaacttaaaatattgaatctccatctgtctgtgtctcaagtggttcagaggtcaggagaggagagggacattattttatgactccctcaaactttaacaaagactagtgcagattatatttcgaagtaagcatgagatatattaaaaaccacatgtgggaattctttcctaattttagaggttttttttaaataatggaaattctattgaaattgagtagtgttaattacaaggcaacaggtaaacatttgttcaggatatttaaaaggtctgctgagttggaattgtgacagaccacattgttgactctagattgaattggaagggaagaatgtgaaatgaattaggatatcctctgttcacctctattaactttcttaaatgagtataacttagaaataataaaatgcaagtattttaacgttatagttgggagagttttgacaaatgtaaaccacccacttcacccaccactaccatcctgatatagtgtgtgtcccatcacccaaaaagttctctaaagcccttttgcagttggttcccctccacctgaacagccatccctagtcaactacttttctgctttctgtggctatacgttagatttgacttcagaattctagagtttgaaataaataggccatataatatgcactctttttgtgtctgactttttttttgcttaacatgatgcttttgaaacccatccatgttgagattcatccatgttatcatgtgtatcaataataagttcctttttattgctgaatagtattctagtatatagatataccacaatttgtttagctgttcacctattgatggacatttaggttgtttcaagttttgatctattatgaataaagctgctatatatataaatcacaattctatgtgtggacatatgtgttcatttctcttatgtaaatacctagggatggaattgctgagtcttatgaccagtttatgcacaactttaaaggaaactgccaaacttttccaaattatctgtaccatttgggatttctgctagcaatgtattaaattaatttcagtttctcca

SEQ ID NO: 7371 - DNA, 2444 bp, Homo sapiens
cttttcaccaaagtcaattccagactatgactttgaaagtgatgagattgttgctgtttgtgcagctattgctgagaaagagaagacagtttcagcaaataaaacaatggttattgtgtctgcttctggggccatagagactgtaactgaaaaggaggatggtgctacaccaccagatggctctgtttttatcaaagcccgatgaagcagtatgcataggattatttgaatctgtctttttgattgcctcttgaagttttgacatagagacatttactctggagatagataggagaactcctggttgtaaaatatgtttttcagatgaggcatataaaaactaaaatggcaggattattgtatagtgtttggaatatgctttgataagttatgatttatatttctcaaggttaaaattctgagtaaaatggtctttgattaataaacttagtttaatctgaatatgtaaatgaatacattttaaagacaaacttgaaaaatgtattcttgaatagtgaataatttgatcaatgttactgaaatgctgtctcaacttttgttttatgataaaggaagtgtgtgatttccctccctctgagaaatatactgcgcttaatatttgctgtctttttcttgcttcattagagtaagtctgtcagaaagcttgaatatttttgacattcattttgattcaaagttgtcatttggttatatgtggaatctttgaaagtttggctgaaaatgcacacaatgtgtacattctgaacattttctgaagtttctcttaattctgatttgtgtttctgttttgactttgaagttgtaacatgatagttgtctccttcagtatttggtaaaagtgtaaagtattgataaatatgagaatgatggttttattttttaattgttacagtaagtaatccttaccacaaatgagtcatttttaaaatatgcatttttaaatgaatggcttttacagataggttaatgacattgtactgctatattatcccagtcaaaaccatactttcttttctttattttacaagctttaaaaaccctggaaacacttacttcttgcttgtgtctttccatttgatgactgggaattacttttctagataactttttttgaaactactcagtgaaatgaaaaataattacattttaaatagctaattatatctttctaaaaataaaaaagtagggctgttattagagtgccatgaataaataacttaagcacaaatacatagaaattggaatgtgatttatagtacaatctcatgagtatgaaaaggctatattaaaaaaaattttattgaaagtccacagtcatattcacaaccaatactgtcattgctaatctgaactattatttttatactatatattgtagtacaataatatagaactgttgggttctgttacttctgacactcaggaagatactattggtgtattaattttatctttgttagagatgaaagtagcccactttatgttaaagatcttactactgttggagcttataagtaatgatctacattttttatgaagatggtttttaaaacttttgttttattggaatgcatatctcttttcagggttggagaaattagcacttgccttgaaaagaatattctttccttaagttatatcatcagaaaattagctctggttagagaggttagtttcagagtgctccaaaaaatatgttaattattttattttgtttaataaagaacattctcaaaacgtaaataggtatctagagaagtgagtactcaacatttggtatattgttttgagtaatggatgtttgttttttgtgtaatttgtgaataaatagtttttttctgcattttgaagattttcctattattttatgttgttagcttttgaaaaattagattgatctacttagtgtctttcttatatgaacttaatatatttaaagtaccttgcatggtgcctcacacatgaagtaatgccagctatttcagtaaatgctagctatttctatgaagaacttgagttagtttggagatatttaacctcaatttcctctgattttaaaaaaggagaactttttttgtaatcctttccttatctgaaagtaagaagtctctgattccagtattataggagagatagtgggatttttcttgacagggtctatagctcaagtcccaaagaggcaagactcaggatggaatgcatgtggccactaggccctgttataagaacctagtgtttcctctgtactggcatggtaggccaagttagtctctttcttacccagatataagacataaaatagtttagacataagacagaggagaaaaagaaacagtaagttatggagaaggaaggcagctcatttctgcaggcccctcaaaatgcttattttagctcatactcttctatgcgtgaagagaaaa

SEQ ID NO: 7372 - DNA, 638 bp, Homo sapiens
acacgtgccatggtggtttgctgcacccatcaacccatcatctacattaggtatttcgcctaatgctatccctcccctttccccccaccacacaacaggccccagtgtgtgatgttccccttcctgtgtccaagtgttctcattgctcaattcccacctatgagtgagaacatgtgatgtttggttttttggcattgtgatagtttgctgagaatgatggtttccagcttcatccatgtccctacaaaggacatgaactcatccttttttatggctgcatagtattccatggtgtatatgtgccacattttcttaatccagtctatcattgttggatatttgggttggttgcaagtcttttctattgtgaatagtgccacaataaacatatatgtgcatgtgtctttatagcagcatgatttatattcctttggttatatacccagtaatgggatggctgggtcaaatggtatttctagttctagatccccgaggaattgccacactgtcttccacaatggttgaactagttaacagtcccaccaacagtgtaaaagtgttcctatttctccacatcctctccagcacctgttgtttcctgactttttaatgattgccattctaactggtgttagatg

SEQ ID NO: 7373 - DNA, 45774 bp, Homo sapiens
tttgtttatttatttatttattttattattattattattattatactttaagttttatggtacatgtgcacaatgtgcaggttagttacatatgtatacatgtgccatgctggtgtgctgcacccattaactcgtcatttagcattaggtatatctcctaatgctatccctcccccttccccccaccccacaacagtccccagagtgtgatgttccctttcctgtgtccatgtgttctcattgttcaattcccatctacgagtgagaacattcggtgtttggttttttgtccttgtgatagtttactgagaatgatgatttccagtttcatccatgtccctacaaaggacatgaactcatcattttttatggctgcatagtattccatggtgtatatgtgccacattttcttaatccagtctatcattgttggacatttgggttggttccaagtctttgctattgtgaatagtgccgcagtaaacatacatgtgcatgtgtctttatagcagcatgatttatagtcctttgggtatatacccagtaatgggatggctgggtcaaatggtatttctagttctagatccctgaggaatcgccacactgacttccacaatggttgaactagtttacagtcccaccagcagtgtaaaagtattcctatttctccacatcctctccagcaccttttgtttcctgactttttttttttttttttttttttttgagacgcagtcttgctctttggcccaggtgggagtgcagtggcgcaatctcggctcactgcaagctccgcctcccgggttcacgccattctcctgcctcagcctcccgagtagctgggactacaggcgcccgccatcacgcccggctaatttttctgtatttttttagtagagacggggtttcaccgtgttagccaggatggtctcgatctcctgacctcatgatccacccgcctcggcctcccaaagtgctgggattacaagcgtgagccaccgcgcccggcctgtttcctgactttttaatgatcgccattctaactggtgtgagatggtatctcattgtggttttgatttgcatttctctgatggccagtgatgatgagcattttttcatgtgtcttttggctgcataaatgtcttcttttgagaagtgtctgttcataccctttgcccactttttgatggggttgtttgtttttttcttgtaaatttgtttgagttcattgtagattctggatattagccctttgtcagatgagtacgttgcggaaattttctcccattttataggttgcctgttcactctgatggtagtttcttttgctgtgcagaagctctttggtttaattagatcccatttgtcaatttttggcttttgttgccattgcttttggtgttttagacatgaagtccttgcccatgcctgtgtcctgaatggtaatgcctaggttttcttctagggtttttatggttttaggtctaacgtttaagtctttaatccaccttgaattaatttttgtatacagtgtaaggaagggatccagtttcagctttctacatatggctagccagttttcctagcaccatttattaaatagggaatcctttccctattgcttgtttttctcaggtttgtcaaagatcaaatagttgtagatatgcggcgttatttctgagggtcaaactaccatcagagaatactacaaacacctctacacaaataaactagaaaatctagaagaaatggataaattcctcgacacatacactctcccaaggctaaaccaggaagaagttgaatctgaatagaccaataacagtatctgaaattgtagcaataatcaatagcttaccaaccaaaaagagtccaggaccagatggattcacagccaaattctaccagaggtacaaggaggaactggtaccattccttctgaaactattccaatcaatagaaaaagagggaatcctccctaactcattttatgaggccagcatcatcctgataccaaagccgggcagagacacaacaaaaaaagagaattttagaccagtatccttggtgaacattgatgcaaaaatcctcaataaaatactggcaaaccgaatccagcagcacatcaaaaagcttatccaccatgaccaagtgggcttcatccctgggatgcaaggctggttcaagatacgcaaatcaataaatgtaatccaacatatacacagaaccaaagacaaaaaccacatgattatctcaatagatgccgaaaaggcctttgacaaaattcaacaacccttcatgctaaaaactctcaataaattaggtattgatgggatgtatctcaaaataataagagctatctatgacaaacccacagccaatatcatactgaatgggcaaaaactggaagcattccctttgaaaacgggcacaagacagggatgccctctctcaccactcctattcaacatagtgttggaagttctggccagggcaattaggcaggagaagtaaataaagggtattcaattaggaaaagaggaagtcaaattgtccctgtttgcagccgacatgattgtatatctagaaaaccccattgtctcagcccaaaatctccttaagctaataagcaacttcagcaaagtctcaggatacaaaatcaatgtacaaaaatcacaggcattcttatacaccaataacagacaaacagagagccaaatcatgagtgaactcccattcacaattgcttcaaagagaataaaatacttaggaatccaacttacgagggacgtgaaggacctcttcaagtagaactacaaaccactgctcaatgaaataaaagaggatacaaacaaatggaaaaatattccatgctcgtgggtaggaagaatcaatattgtgaaaatggccatactgcccaaggtaatttatagattcaatgccatccccatcaagctaccaatgcctttcttcacagaattggaaaaaactactttaaagttcatatggaaccaaaaaagagcctgcatcgccaagtcaatcctaagccaaaagaacaaagctggaggcatcatgctacgtgacttcaaagtatactacaaggctacagtaaccaaaacagcatgctactgctatcaactctaattttttcatattgaaatagttatgacagattgtgaggaaagatagtttatattccccatgaatcaaaagctaaattgttacatccactttataccttttaaacttgtttttttaaaatacagacaccatcttgaggtgctgcatgataattttgatcagttggatataatttacagatttgataaattattgatttggtagcgattatattggataccatctctgatgttagactacatttaaatcctgcctctgctacatacttgtcttgtgatcttgagcaagttacataacctcttcgtgccttaattttctcatctataaatgggaataatgatagtatttacctcagaaggttgttaggattaaatgagttaatgctgtgctggaacagtgcttggcacttgaaagccagacaactgttattcaagggcttaatgaatgtttcttcttcccctctgtattttagcttatcattggtttgttctcattttcagtatttcttatgtacttccttataaaccaaagttcattgttcatataagataaacagtatacattgaagaatcaaaacagttcaaaattgtataatgattcacaccatgatggaaaatcatagtgatgaaccagataagtcagtcacgtgactcaggtcatctccactcactgctgcacatgctctgtcagtagtcactaggtagctttcaaactgctctattttaaagaataaaagtacttaaataattacttaatatattgattttaatatcagaattaaaacagacaatatttacttgtgcctttaatggaatgagccctctcaatttctctgttggacatactgctgtaaatgttttgcatctcatatccctgtgtacacagatgagattaggtgagctgtttgtagcacatttgcaggtgattgattggttaagatgtgagaatgtctctggtacagaagcctcacactagtgacctgggcttgagggatagaattcagcctctgtctgagaattatgaagaaatagtttgtcacagaccttactacccattatcgtatatgttgatgtttgccctttagtgctgccagccacatgctaagcctttaagcatgaatttctaacccataccaaggggtcagtcccctgtagtctaatcttgatccatgttgaatgtattgttttaaaaaatccataatttgaaggaaaacaccacagcaataacaacagcaataataatgcctttaacaatgaaaatgaaaacaagttactagctatcagacactattctaagggccttacatataactcatttattcctcataacaacaatgtgaagtagctactgttatttgcatcttacagctcagaaaacaagcatggtgagataaggaaactttactaaggtcacataactagtaagtggtggagccagcgttgaaactcaggaagtctgtacacaactgggagggaaggctaatatttgaaatgatagactcaacattcaatatttcagtatcgatgagctctaagttgatagagctatgtgtaaaaaccctgcatttaatattaagaaatcattggcagaagagtaagagagggctttggtcaagtaagctgagtgcataagaaaactctggcatttgaggtgtccttagctccagatgctttggtagggcagagtgtatccatggaggtaccatgagctaccatggaggtagctcagagaggaaagggaacagtaacagaggcctgcttggtttttaaacagttttgcaaagagtattatttacgtatttatactaagtctacaccagttttgagtatttgcctactacagtgtaagcaaatgcttacaggaaattagcacacctctgaaagatctctgcaccaaaggaatagaaaaggttgaagaaattatcttaaattcatatagagattttaatgactttaaatggaattataatcaactgtattttatcttctgttatatattcaagttgtatggttgtatatcacttgtccttgtccattgtatttgggtttcatgcttcatggtgtcacttttttaaatagaaaaaaatgtgaatagttaaaaataaattttatttgatatttagataatggtaaaaattgaaatgatgataaatgctgtttattgcctacttgtgaaggtgtcaatgttacgttggtagagtatatatggaatcatttatatgatttacagtaaatgaaacagaaggtgaggtaccactttcagatgtagtacagttgtctgactcagattttagaaatctattgatatttttaaagcaaaactttttttaatgctttacatttgaatgatgttctttgtacttggatattgatcctatttctgattcagttttgaaaggaattaacatcaagtggacttcatgtcacttaacagtgcttttttgtatacatttttaaagaaaattagtcattttactttgatttttgagttagcaattcacaagcaggtaattaaacacttttagaagaaaaatattggtctaataataatcttaactcatctttttgacatagtaaagaaaaaggaactctgcagaagcaaaattttttagtatgtggcaaacaactaagcaactagatttttcttggctttcttagtattcttccatagcttgtaattcattaaacattcctattcagctttctatactaatttcatatatatatatatgtattttgcttcatgaaagcattgctgcttttcttcttcatcagtaattagtaaacttagcttcctaaccccttataacttatgccttattaacgatagtgaacataccagtaagcattgaaattagtgttactctgatatgtcaaactcattctagaagttatgcttttccttaccattactgtattagtggacgtcctgcagcctatcattctattgttcattaaatacagctaatgaaccttatttagagtaattgaaagggaataatagaagattttaagggaatgacattttcttccaggagtgaacttataaaatattgttatttgaaggttttctagggacttctttttagtaagtaaattagaattagccctttctttataaattaatgctgctgaaatgcttaaaatatacttaacttttaaaaacattatctttgattttatttaagtgtttaattggcattatctgtggaagaaatgctttattaactgagacaccactgtgtttctgatatacttataaaaaaactcatgaggttttattttatttttcaggttttgtaaatagatatacagggaaataattaaatataaagaagtagactatatttaacattaactggaatagttaaccagttctatctatacattagaatgttcatcttttcagactaagtttactgaaaagattcttgcattaggtaaattttagtagattggactaagttgagggagttaatcccttctgagcttttagaattctaaagccattgcatagaaactctctgggaaagacaaatggttaagatatgtagccacaggctcctgtttggatttgtattgacatcaaaaagaagatgataatgatggatcttacatgtttatttgaaggctctcagaaagaggatacattctagatttatcctttatttcagaaggtagcattagcaagtgggaagaggagaatggtgaaggaaggcataagtgggagaaagtggagaaggtgacaggtggaaggcagaggcaaactgtcttggaagcagcttttagctcaaattaagatatcttaaggggagaattacccaacaaaagaacaaactacttaatgcagtcatggggttttacttctctacagttacttcttttttaaatataggttgaagaaggaagtaaaaatatacggctaggttcactaattggtttgatagtagaagaaggagaagattggaaacatgttgaaattcccaaagacgtaggtcctccaccaccagtttcaaaaccttcagagcctcgcccctcaccagaaccacagatttccatccctgtcaagaaggaacacatacccgggacactacggtgagtatatatttattcaaaggatgatgtaaaaaaaaaaagttatggcagttcttatggaattgtaatcattatcatattcgcacatcgttgtacatcacgtaggaagttgctgttctcagcacactcagaccttagagtgtgtgtttttttttttaaccatcattgttcattcagtaaataaatagttactgaatatctgctatgttccaggtactctaaaagccctgcttgcacaatggaaaaccaaacagtatgtgtccatgttgaggttgaattaggttttagaagtctaaaatggtattcaatataccaaacttgatactctgttcccatttatggagttctaattactgttacaggaattccaagctcaaatgtctatctgatataaaatagaattcatgttttaacatgcattcgttttcaaactagtctgcattatgactttccggcacagactagagctcaattttgtctgttctgtaacaaaacagataacttaatacacatcatttcactttagttttacattgctttaatagaagaactctgtaaattctaacatttcatttatttagtattctatataattatacaacattactttttctttacgagaaaaagatcttcataaagtagacctcttcattcttaaacattttttcctttagtttatcattgtcagaaaagaatccacagtgctttttttaggggggggcgtgcggaggtgggtgacggagttttgatctcattgtccaggctggagtgcaatggtgcaatctcagcttaccgcaacctcggtcttctgggttcaagcgattctcctgcctcagcctcctgagtagctggaattacaggcatgtgccaccatgcctggctaatttttttgtatttttggtagagatggagtttctccatgttggccaggctggtctcgaactcctgacttcatgatccgcctgcctcggcctcccaaagtgctgggattacaggcgtgagccactgcgcctggcctgctttttgaagtactgattttaaattcctagtgcagtgtttctgactctgttgccttgactcccatttactgtctcctctttcatttaccctaaaaattggaagacagtctcactgatgctttctaactaatggtcttctgcccttgcaaagataataatagtatgtaccctaattaagatcagtcatcatcagagactcgcatgaatcaggccccactgtgtaggttaaaaacctactgacctgtgaactctgcatactgttgggcacacagtgaatgaaaaaaaaatttttttttggttggttggttactaatcctatataaaaatctaaaatttcagattctcttgaaaaatctaaagatttagtaacattgggcccatatcagagttatttaatacttccctgaaatgcagcaagttccacagttgtttctgtctcttagctttaatttctagatccagcctgttttaatctgtactaatcaggcttattttctttatctgaccatgtagtaatttgtttactactttgcatacaagagatataccattagtcatgtaatctgaggtatcctatatatataataaatatatataattgtgtatacatacaattcaacctcagcaaaacaacccaattaaaaaacaggtgaagaactttaatagcatttctcccaagaagatacatagatggccagcaggcacatgaaaaatatgttcaccgtcactaaccattagggaaatgaaaatcaaaaccacaatgagacaccccttcatacccttcaggatggctagtatcaaaacaaacaaacaaacaaaaaccaaaccagacccagattataacaagtgttggcaaggacatggataatttggaacccttgttgttgcctagtggaagtgtaaaatgctgcagctactgtggaaaacagtatggcagtttcttagaaaattaaaattaccatatcatctagtaggtccacttccagatatatatgcaaaataactgaaagcaaagactggaaagagatatttgtacatctatgttcatagcaacattattcacagtagcaaaatggtagaaacaactcataagtccaaaatgctatgaaatgtgattcagctttttaggaaggaaattctgataaatgctgcatggataaaccttgagaatattatgctcagtaaaataagccagtcacaaaacaaataactgtatgattctacttatgtgagttacctagagtagtcaaattgacagagacaaagagaatggttaccaggggttgggaggaaggaggaatggagagttactgtttaatagatacagagtttcaatttggaaagatgaacatttctggagatagatggtggtgatggttgcacaatagtgtgattgtactaaatgccactcagttgtacacctaaaaatgcttaaaatgataaattttaggtatcatttgccacaatacaaaatatatgaagaaatgatagaacaaaatatacgaaggaaacaattggtagttgtgatgagcacccatgtgaaagtaattagttgaaatagcagctctttcccctaattaatatttattcttattaaaatcatatttagaaatagtaactaaatttttacgaaagtgtttaaagaataaaataaaccaaattggtacagattatttgactgtgaccatctgtgggagtcattttagctttattataagatttttttttaattatttgcgaaactgttgacatttagatctatttgaatcaaatgtaagtgttaattggttctattaaccttcatatttttttcttaggttccgtttaagtccagctgcccgcaatattctggaaaaacactcactggatgctagccagggcacagccactggccctcgggggatattcactaaagagtatgtgtttgctttttgtaataaccagttccattatttattatgatcatgtttttttgaaagaaaataaaaagagcttattcagtcttaagatttaaaaggaggtacactgttcttcttttgtacttttaattgcttttatcattgtaaattgtattctatgcaagagttgttttctgaataattatagcattactgaagaacagctctaatttggtaactaagcaagatccttagaagtggtaataaatgcagaaaattagagcgtagaacagtgaaactttatacagtattaaatatgtgaaatcatgcaataacatttacatttctaaaacaaggaaatatatttttaaaaaattattttcattatccctttgaattttattcacttgtgctgttataaagcaatttccatatacagtttggtctctttttagattttcttttctatttcactgatccatctgtccatgagttagtaccatacttttttagtaccacacttttaattagaaatgttttattgtatgctttaaaatctgataacaatagctttgctctttttttaaatcagttttcttagttcattcttattttattattcttccaaatgaattttaagcagttcgtctagctccatgggtaggagtgaggggtatttttatgggattgtatcacattttaaattaactttgtgagaactgacatctttatcatgatgggtctttctgttctgcaacactggtttaaatgtttgtgtctttccattagtttaaatgtttgtgtctttcaaaacagatggcccctgttctgttgaaacttagtctagtagggtagacaaagattaatcaaataggcttatgaactaatgtaagatttcagtagtgttatgtgctacatttttattggcagtaatagtaaatgtttcaaattgagtttatgttttaaagcaatgtactcattccatatttatctaatattgataggaaataaaaaataatattggccagaatttttgtaagtcgagagagagcaatggttgttaaattataagtggcagtgttgggccaggcaatgttttcttttttccactgggttattttactcttcatgaaagctttggcttactgttgggtgtttattttattgaaagcagtatatagatttaattcttagatatcctcatttatgtgtattacactcttactaatttgttaactgaatgtatgtggttctatcacacacatactgtgaagttcgtgccacactgcatgagttggaaatcagctgtcctgagagctgactgaaaggcaacatcccagaccatgggatttttagttaaaggatttaaaagttacacttagctgtaaaaaattaaaattaagaaccttggttgccagttaatcccagttttttccccacaccaatcctgatttgtgtctactgttggtatcttaatcttgttagtctctaccagtctgtgccttagtagcactctctgtaaaaatgggagaaagcaactatttttataacaaagtagatttgccttgctcataattctgaggattaggaataagagtctgtatttaattcattaatctttgaggatttggtgaaatgtaaaataatgattgctgcaccttagggggatcagttctgcaaatttgtgtaagataaactggagcagaaaaagatgagataaggagataaattaataggctcctaaagtaatccatgtaagaggtaatgaatacttgaatgtggttagaagaactaaaagggagatccctgatacagacaacattgtaaggataaagtccagaagcctttgcagattaaatgtggagtgtaggccagagtagcaacaagtaagggaatgaatttggatctggtctaggtgatgatagtttggtctccataaatagaaataatggatttgggaagcatttgttttggtggagttagtaatgtttgaagcttattgtcaggacttagaagccatgtaggtattgggatcaatgagatgaagatgtatctcaggagatagttggggattagagaggtagatttggtagataataaagcaatagttataattgagatcatcaatagggaaactagaggttaaaatccttgagttggaggatacctgggaaatgtgggaaaagtcaaggatggtaggatctaagaaaagcctcttaaatttggtaatatggtgttcagtagtgtgacagcagtaaaataaagaaataaaggtttcttccttccttttctttccatgtgtgcttaatacatatatgatgcgcaaatatctttttttaaacctgagttgaaagttataatattaatgaaacatttcttaagaacaaaatggtattatctcctgaataccataaggaagcagtattaaagagttaggcttttagtattattgccatcttttctaccctgttacccttttctcttccctgcctttattccttaactctccacgagaaaggcatcagcctttggtcttcaaaataagaactagtacaaaagatttcatgagaaaaatggatcctgaaagcatatattattgaggatttttgcttttctatactgctaaaaatgcctgcattttaagtttatcattaaggtgagctttggaaaaaattttagcctaatgtcgtcttctgctatggttgaaaaattgcaggctttggcatagctgtccccaaaatatcttagcacacttttttattttttaacgttttgaatttttttttctttaagagagagacaggctctcactctgtcacccaggttggggtgctgtggtgtattcatagctcactgcagctttgaactcctaggctgaagtggtcctatcacctcaacctcccaaatagttgggactacaggtgtgccaccatgcctggctaaatttttaaaacagttttgtagagacggtttctcactaggttgcccaggctggtctcaagctcttggcctcaggtgaccctcccacctcagcctctcgaagtgctgggaatgcagacgtgagccactgtgcccagccaacacacgttcttgacacggtgaggacatgctccataccatgtccactaaaagtctgggtagaaaaatcagttccaaatgctgaaggaaatgcctccagcccactgtatttgtgaagaaaatcttgggtatcagggctgctattttaattttgccttaaaacaagcattgctcagaatacatgttgtaccaaagaatatagacttgactttgcttgtacatgtgactgttttaagaaagcagtgtcgaggccacaattagaagcagaacacatttagtttctttgcctgcagccccaatgtctttggtacatctgtgtcctaaatcatagttgtagtaatgtttgtattcatcacacagcatcaaaaattaggtaagtatgacaggcaagtgcctagtgtgttttagtggtattttcaaaatgaattcatgtcacacccaaatgaattgctctctcagggaacccagtagagaaggttgtacctgagttaacttccagagcatcctctgcctatctgcctatttctgccagtggccagaatgaatttgtgtggtatatttttctcctaatttttatagcttttaatgtctacctaatgctccaagtttagtctgattatttaatgtgcagaaatcattaaaaccattttctgcctcacaaaaaactaaatcattggctgttactaaacaataattaagatttatacttcataggtatgtaagtataaaatcagcaataaaaagaccaggtgcagtgactcacacctgtaatcccagtgctttgggagaccaaggctggcgaatcacttgaggccaggagtttgagaccagtctggccaacatggtaaaaccccatctctactaaaaatataaaaattagccaggcgtggtgatgcacacctgtaatctcagctactaaagaggctgaggcatgagaatctcttgaaccctggaggcggtggttgcagtgagctgagatcgcgccactgcactccagcctgggtgacagagtgagactctttaaaaaataaaaaaaaaataaaatcagcaatacaagtttttgtgagcaagaagaagcaattttgttcttgcttctttatgattaacctacccaagaaccttaattactacagagataaaactaaactgctttttaaaaaataaagtagcagtaatagttatgctaaatatgtaatattagcataactaatattagctattagcataactaatattagctattagcataactaatattagctagctattagcatattattagcataactaaatattacatattactaaatatgctaataagtaatagttatgctaaaaatgtgtcaatttagtgtcagcaaccttttttttaaatagatgtattcgggcattaacgatacagatttttgcaccccagttagactgttcctgcttgtgttgatattctattattgcataacaagttacagtaaacttaccagcttaaaataatacctgtttgttttctaacagttcaataggttagaagtcctggcatagcatggccaggttctgaactcatggtctcacaaggctgaaatcaaagtgttggccaaggctggggactcatgtgaagcttggggtcctcttccaagctcatgtggttgttgacagaatgcagttccttgggactgtaggactgtggcccttgttttctttctagctctcagccaagaaccactgacagctcccagaggccacgtgcagggccttgccatgcgtggtctccataggcggttcacaacatgcatgtttgcttctcccgggccagcagttttatctctttacttcaagtctcttcttccaggaaggcctaatttcttttaagagattacctgatatatctgccctctccagggtagtttgccttttggttaactcaaatgcaactgatttggagcctcatatatctataaaatgccaccaattttgtcacataataggacctaataatgggagtgacatccatcatattcacaggccagatacagtcaagagggatgatatggggcatgtacaccaggggcaggaatattggggccatctcagaattcttcctaccatgttgccataagtaaaggggtcttctcaaatatgctcaacaggtgctagcttttatctttcatcaaatttttggaaaaataataccaaaatattaactgagaaataatttttccttagattttgtgtcatcctgaagttctttttagattatataaaacaattttttttcttaaattggaaaaaatactttccaaaatacttattggatattaaaatgttccaaaaattattttaagaaaatatattgcctaataccactgtaacttagcatagtgagttgagggcttagcatatttagtaatctaattatatcctcttacaagacaaaaatacctttgttttacagagtaatacaaaggcaagtctgtaactagttatttttcattctaaaagatatcataggttagatttgttatattagattgtactgatggcatattagcaaaattaaaaatggtttgatttcctggtcataaataagctgatttgcactataataaacaatgaataaacaataagtgaacaatgatgtaggaagtatcctggtgaaagccatatttacaataaacttgacactttttgaatgccatgtgaatattatttcatgagtataaaggatgagagtggtttaattaattgttcatctaccaaataacgtccactgcacagaaaaaaagactaatttcctttttaaaaatcactacttatgcccaattttaataacattttaattgtttggcttttgaaaatatgcaaatattagaacgtgacaaataatggtcagcagaccaggtaagagacaggatttaattttctagctcaaattactggtttttaattataaccttgacatctgtatatttctgtatcttttctccacatctcacctgcgttttctgaaagttctgttatattccttattgctaattatggttatctactttgctcttatttccagggatgctctcaaacttgtccagttgaaacaaacgggcaagattaccgagtccagaccaactccagcccccacagccactcccacagcaccttcgcccctacaggccacagctggaccatcttatccccggcctgtgatcccaccagtatcaactcctggacaacccaatgcagtggtagtgttctctaagtggatttttatttctttttcttgtttttctttttttttttgagacagagtcttgcactgtcacccaggctggagtgcaatggcacaatcttggctcactgcagcctctgcctcccaagttcaagtgattctcctgccttagcttcctgagtagctgggattataggcacgcaccaccacacccacctaatttttgtatttttagtagagacggggtttcaccatgttggctaggctggtctcaaactcctgacttcaggtgatccacccgccttggcctcccaaagtgctgggattacaggtgtgaatcaccgcacctggcctagatttttatttttcagattcaagtgtgagagagaaaataagaacaattactatgtgttttaagagtagatttaaaacagattagttttattaatccgtttcaatagtagctaagtgataaggataaaacactccaaatgctttgttttacagatttcctatcagaaaccaaaatttgtttgtgtgttaacttccaaataaacattagaactataattcaatttaaagttaccacaagttccacaacttcagtaacatatatattctctacaatctcatgtttcatgtcttaagtgtgatactaataattagtagctgacactagctcccttttgtggatatgttctactttttaactagggaattgataatctcactatgaagaactatgtagctagtcattctttccttctcagatgcatgcagtataacagcccctttttgttttcaaattactccattttgcctctctgtgcctttcctattcaggttattttcttcctatcagaagaaatgtaggatagcccagtttatttaaaatcgaatgggcacttaaaaaaataaatagataaatgtgtactcctagtggagaactatataccatatgatattttaaaagagttgaaaacagtacaactttcatgggaaacagatttttaaatatccattaatgattaatatactgcatacttgaataacctgctctttaaggacatgcagttggataagatactatgtatattgagtgtatagtccactctttgactatataatgtatatggactatgaaatatgtataattcaatcatatgtcttttaaaagtaggttattcaaggctgggtgtggtggcttacacctgtaatcctagcactttgggaggctgaggtgggaggattgcctgcacctaggcattcaaagaccagcctgggcaacatagtgagacctcatctctacaaaaaaattttaaaatcagctggatgtggtagtgtgtgcctgtagtccaactactcaggcggtggagattggggaatcacttgagactgggaggttgaggctgtagtgagctatgtgcactccagcctgggtaatagaggaagaccctatctcaaaaaaaaaaaaaaaaagttattcaaattaaggaggtaaaccttactttcaaattcttatggtatgtagagagcatttattctacttgaccaagtactttgctaacataaaatgtttaatttcttaatgatatttgtaaaaatgaaatcagccgcactttcatttgctttgtattatcttgaagtgattgtaatgaaatcccaaaatagagtgaaggacaagaaaggaattagatataatttaaaatctgtcatgcttttttgagagatccaaggaacagaatggaaaaactacagtgaagttataggaatattttattatctcattcatactttctattatgaatctgtaagaaataagatactcatgttatttttaaaaattacaaatccaaatagaaataattgaattgcctgtatagaaggtccctaatcttctaatgtcccttgtgatttctttgatccatgagttgtttataagtgtgaatttaatttcaaaatattggaagacccttcagttacctttcatgatttctagtttaactccactgtgtttagagaatacactttgagacacacttcattttaaaacaatcttctcaaatttattgagatttattttatatttataacatggcctgtcttggtggatgttccatgtgtacttgaaaagatggttcgacttataattttttgacttcacgatggtgtaaaagtgatacacattcagtagaaagcagtgcagtatttccttgcaatgctgggcagtagcggctagccacagctccaagttagccatgtgatcatcagggcaaacaaccactgctctgcagtgtactgtgtagccaggtgattttgcccaactataggctaatgtaaatgttttgagcacatttatggtaggctatgctaaggcttacctgtgatgttcagtatgttaggtgtattaaatgcactttgacttatgatattttaaacttacgatgggttcatcagagtgtcacttcatcataagtcaaagggcaactatatattaatagttggtttgttgatttattggctgttttatttcaggtggttttttttcttttttttttttttcccgaaacaatcttgctctgtcgcccaggctggagtgcagtggcgcgatcttggctcagtgcaacctctgtctccccggttcaagtgattctgctgcctcagcctcctgagtagctgggattacaggcacgcgccaccacactcagctaatttttgtattcttagtagagatggggtttcaccatgttggccaagctggtcttgaactcttgacctcatgatccacctgcctcagcctcccaaagtaatcctgagattacaggtgtgagccaccgtgcccagcccatttcagttttattaagtgatatttgtaacaaaagctgcttacagatggtgtatgtctatgtctgtcttctctctcctctctctctctgtgtatgtatgtacacacacatatattgctccttgtgtgtgtgtggtatgtgtgtgtgtacgtatatatacacacacaaacacacctgtgaaggaattgttcattatttggtaggtttctttcttatcatcttaaatatagtaacataagatatcccattcacaattgaaacatgaattttattacttttttctgtagttatatgctataaaaccaaagcgtctcagattttttatattcttcccttatactaagaattttaatagtgcttttcttgtgttaatctttaattaataagttaggtcattgagaatgaatttcttttcatttataaagttgcttgttttttgttttatttttctattccacttgtggtttaacggacaggttgctgtctttttgcagggcacattcactgaaatccccgccagcaatattcgaagagttattgccaagagattaactgaatctaaaagtactgtacctcatgcatatgctactgctgactgtgaccttggagctgttttaaaagttaggcaagatctggtcaaaggttagtaaaattgaatttacttaatacaaaacacatgctaacttaactttcatgaaatcctttataaaattataaaattaaaagctacattgtgtagcttttaatttcaatttcataatgtacttgcactctactctgggtatatttgtgctagaggaaaaaaattagcaatggtttccttgaaaaagtgaattggttccacagtattaaataaatcacagatgcctttatgcagaaaaaagcattctgttctaccttgcttttatttcctctttgtcatatttgaataatgtacagttagttaacatttatttagcaggcaattactgagttcaattctctgttacatactgagctttaaaaatacaggttgagcaacccaaaaccaaaacttcaaagtgcttcaagatgtgaaactttttgagtgccaacatgaagctcaaaggaagtcctcattggagcttttcagattttggatttttggactagagatgccaaaacagtaaatgtaatattacaaaatctgaataaattttgaaatctgaaacacttctggttccaagtattttggataagggatactgaaatctgaagtactataatttggttggttagtttttttaaaagcaaaagtgggcttaatgttttggtgtgctttagcatttacataggtcaatttttttgtaagaacacatgaatgagttgtgtagaccaaatggttattttttgttttgaatattttttggtatggtatttaaacaaagcagtcaatatttcattaagtttaaaatccaaaacttttaaggatgttttagattataaatatcttatatattcttctttatacaaattttgattttatatttcttgttcagaatgcatttacagattattaaatttgtaatatttcttccaaaaatcaattataaataaggttgctgagagacatacagattttttagcatgaactgatagttttatttctttatttttgacctatatggcctttatattattttcttgtcttattgcactgactaggacctctgtctggtataatgaatatagatggtaaaagcagatatttttgccttgttcttgattttgggggaaaagcattcagtcttttatgttagctataggttttttgtagaatattattttcaggttgaaagaatttccattcctaacttgcagagagttttaaacatgaatagatgttgaattttctcaaatactttttgtgcatcttttcagataacttttcctttttctgtctgttaataaggtgaattacattggttgattttcaaatgttgaatcaactttgtattcctcatataaaatccacttaatgattaaccttctcatatattgtttgattctgtatcctaaaattttgtttagaatctttacacctatgcccatgagaaatgctaacctgtagttttcttttctggagacattttttcagatttgttatcttatctagtggaatgggttggaaaacatgtcctcctcctttattttctggaagagtttggatacaattggtattatttcttttttaattgtttagtagaattcactagtgaatttctttatgggaaggtttttaactatgaattttattttaaaaatgggtgcagctttttttttcttgaatgaattttggtagtttgtgtctttcaagaaatttgtgtcatctaagtcaccagatttattggcataaagttattcaccacattaccttattatactgtcattttatctgaagtaatgtttctgtttttgacattagtaatttgtgtgttttactctctagatcactctgactaaagggttatcagttctgttgatctcgatctcttcaaagaaccagcatttggttttattaacttatctagtatttctgtgatactgatctcattgatttctgttctttattttttttttctctttgctttcagtttactttgctcttttatttctagtttcttaaggtgaaaagttggatcatttatttgagacctttattttttaatataagcatatagtactcttgaattatctttaagcactgctttagctgtatcccacaaatgttgattttttttttttttcttcttgagacagggtcttgctgtgtcacccaggctggagtgcagtggtgcgatctcggttcacttcaaccaccgcctcctgggttcaaatgattctcacgcctcagtgccctgagtagctaggattacaggcacaaaccaccatgcctggctaattgtttgtatttttactagagacggtgttttagcatgttggccacgctggtctcaaactcctggcctcaagtgatccacccacctaggcctcccaaagtgctgaaattacaagtgtgagccaccacgcctggcattatttttccttttattcaattaaaaatgttttctcatttatttattttgtgatttctttgatcgatgagttatttgtaagtgtgcacttaatttcaaaatatttgagaactattcatttctcttttatgatttctagcttaactacattgtgtttagagaacacactttatatgatttcagttttcttaaatttgttgatatttattttatgtttgtagtatggtctgtcttggtatgtgttcttgaaaagaatttttttatttttgcaaaggaatgttctataaatgtcaggccaagctggttaatagtgttgtttatgtcttttgagagcagtgttgatattcctcattataattgtttatttgtggtttctcctttcagctctgtcggtttttgcttcatgtatcctgaagatctattattggccacatacacagttaggaattttgttttcttgaacagaccagttattatgtcatgtccttatctattccttgtaatattccttatcctcaagccttctttatcacatctgtagccactgcagatttctttgactcgtgtttctatagtatatctttttgcatctttttactttttaaatgtaaatatgtttatttaagtaggtttcttgaaggcagcgtgtagttggttcttgctattttatccaattctttagtctcttaagatgtttagaccgctcacatttaatgggatagttggatttaaatctaccattttgttctttctttgcattctctttgtcccacctcttttattcttctttccttatctttttggttacttattttgttatcattctattgtatttattcattttatcttcttttttctcttcttacctgctttgcaatggttttcttagggtttacaatgtaattctttaatttatcacggcctggcttcaaattgtattacaccccactccatgtttaatataagaacctcataactatatacttgcacttcctccctctcatattttgtactgctgttgtcatgttttacttctatatatgatgtaagccccagaatacatgtttaatgttttttgctttagcaaataaactcttttggagttttaaaatgagggaaaaaatgtcttttatatttatctgtactttttttcatttctttgtatagaattaaagtgctgtctgctattatacttctacccaaagaacttcctttaatgcttcttatagtacagattgactgacaataaattttctcagtttttgtctgaaaaagtctattttgtctttcacattgttcctttttaaaacaattttttaaagtgtagttgaatatataacatgagtcttaccattttccgtgtacagttagttcgttgacattaagtacatttacattgtttgcaaccattgccaccattcatctgcagaacgtttttcatcctgcaaaatggaaactctgtatactcttcattcctctttcccaccacccctgacaatcaccattcttctttctgttcctataaatttgatgattctaagtacatcatattagtgggatcatatagtacttgtccttttgtgactggcttattccacttggcattatgtcttcagggttcatgcatgttgcagaatgtataaaaatttcctttttaaggctgaacagtgttccattgtatgtatctaccctactttgttaattcatgtgttaatggataaatacattaggttgtttttaccttttggctattgtgaataatactgctgtgaacgtggctgtacaaatatctctttgtgtctctgttttcaaatattttaggtatatccccagaagtggaattactggattatatgataattctatttttaattttttaaggagctaccatactgttttccttagtggctgtgccattttgcattcccactaatggcgcaccaatgggtcaggcatgatggctcatccctgtaatcctatcactttgggaggctgaggacaggggttcgagacctgcctgggaaacagaacgagaccctatctctacaaaaaaattgaaaaactagtcgggcagatggcatatgcctgtagtcccagctacttgggagactgaggtgggaggattgcttgagcccaggagttggaggttacagtgagctataattgcaccacttaattccagcctggctcatagagcaagacctgtctccaaaaacaaaaatgaagtgcacaaaggttgaaatttctccacatttttgccaatacttgttattttctggtttttgatagtagtcaccctaatggatatatctttatcatttttaagaattatttttgctggatatagatttttcagttaataggggttttgtttcagttctttaaataaagatactatttctttattttctgtcttagaatgtctgctgccgttcttaatatttgttccattgtatatgatgttttccacctgtctggttgctttcaagatttttgcattaccaatttggctattgtatgcctagatttttttttctattgtatttactgtttgggtttctctcagcttcttagatgtatggtttgttgtcttcctttaattgtgaaaaatttccagttatttttaatgatatcttctgttccatgtggtttctctttggggctccaattttaaatgttagactttttgaattgcccaaagctcttaaatgctctattttttttgttcattcttttttctctttatgtttcatattggataatttttgtttacctagcttcaagttcactgatttcttagctgtgtctgcaaagcttagcaaaatatatattttttatcttggttagcatggattttcccctctggatttccaattgaatgtttttttagtttccatttctctgctgctagtcgccatctgtttatgcatgttgtaccatactctgccctctttactcctgtactctgacagtgggtatttacttcctgtgtttgtctctcctctgagtggattatcactctttggcattcagttcacctgtttgctttgtaacctccgctccctaatgagctcaagaaaagttacgattttgtaatttatcctgctttttctttcaccctgtcaggatgggaacagctttcttttgcaactttctacatcccaggtgaaagcaggacttttatcagtttatatacagagtttcaagatttcatataaagacaacttgagagcttttaaaagttcaaggaactaaatggaaagctattttaaagaaagtgagaagtttctaaaaaatgaaccctggaaacactcctgtagttctcagatcatacttgcttagtcatgatatagaggttaatatgggaatcactttcctgttttcttactctaataaggcagaaaacagtaatatttcagaggagatatggattagtttattatctttgcatggtccagttttggtacaccttggtaattaggaattttcttaaaaatctttacaccccacattatctatcttcactcctctttctcatataaagttacaatacataacattctgtatgcatgcttcacactttgcttttctgtcttgacaatgtgtaaatgagaatgtttgatattaccttacaaactgttttctactcagtaaatgtaacagcatctcctttcaatatgtttggaaaatctccattataaagagttaaaaataaaggaattcaaagagaaacctactttacacatgttagatttgagatgcttgtaagcgatgcaagtagaaatttcatgtgagaagttggatatacaagtctgaagcctcagtatctcagaattagaggtagaatttggaagagtcatcattatataaatggtatcaaaaccttggaattggaactggaacttctagcctggggagatgccaacattgagaggaaaggaataaaaatgagtgagtgggcagaaagtggaagaaaaccaggagagtatagtgacataggagccagtaaaagaatatatttcattcaactcaagaatgttcctaaatgtgggagtatgctgaatacagaattttaagtgaggactgtggacttaggtggtaggtttgggggtcattagctggcagatggttttagaagtcttcactgtgaatacctgtgggtaagtagataaagtgaagagaaagctgagagagccatgaaaggtaagcagagtaagttcatgaactgttacatttgaatttgtacaaaccaaatctttctatgtggttatcattaaaagcttgtaagcactgtaagtccatttatatttctattcctaaaggggttttaagcaaaaatgtttatatatttctggaattctgaattagaggagctttgatactttgcagctgacagttatcgtgacagtttgacagtatttaggtttatggtaattcatctaatccctttctgtagtctccaggatgcctttggaatgagctgttattcacctaaaattccgtgatactttagtaataggataggttttttgccacataccactgactagatctagatcttagagtctttttctataagctcttgcaagaaagaatcaagtgttgtttacattttctaacactgttatacccagtggcaaatgcaaagacataaacaaatactttagttatgatcagctcgtaggaagtgggaggaccccagctttatcttaaaatcattatgtatactggaaagaaattgattcaaatgcattcaccataaaactatggatggagaacctcattttattaatcacactaggacctatgccagcattgcttcatctttggcttttgttatatcctgttttgttaagttaaaaagcagttaaattttttttcacctacaccccattagtaaaaagaaattttcgaacactttcccatatgtgtatatataactgtttatatataaagtacctacatgtatcactgttctagtataatcagtatgttataaagcatacagagaataagggtatttgaaaagaacgaggaagaaaatgaatcatcttgtaaacttcctgactgcacacaccacagagagatcatttgtctttttcgagacataggagttagttctttttttctgattatgcttgtaatgggtccttcaggttcttgtgtatgatatctaagcaatttaaaaaattgataaccaaggcccagaagtaaacttacattcatggttaatattattgatccaggacctcatataatgcaagtttttctaatcatgggaaccttattgactaagcaaacaaaagcttgtaattttttatcattgtttgtcagtacattccataatttacaagtttgaagttgtaatggtcaatgttaaagttatattaggaatactaattttactaaccttatttttctttcagatgacattaaagtatcagtaaatgattttatcatcaaggcagcagctgttacccttaaagtaagtagcagacttcaaatgattttgtcttcttaagtagtttcatgtcgtggaatttttacaatgacaaatagaactcttatttttaaatcacaaaaattttataattgtcttgctaaaaatatcctatcgtttgatctccctcattttacaaatgaagaaactgtaaatcaaaagggctcacaatgaattagagcaggatgaaaaccatttattctaggcattagagatagagcagtaaacaaaagcttacttgatttctgctgtccctggggcttacattctagttggaggagacaaacactattatatgtcagatggtgaaagtgctgaggagaaaaagaaaggataaggggacaaagtaactaggggtgatttttcaaaagggaagcgagggaagcccctctgacaaggcgataatttagatacggcctgagaaaacagagggagtgagccacataggtatgtggtaaaagtgcattccacacagagggaccagcaaacaccaaggctgcaagcagaggatcgcattaaccaaagatgtggtgctgagggtggaatgtgcctagtatggagaggtgggagataagatttaaataacagtgggagagcatgaaggggaacccaagtacatgaggccttgttggacatggtgaggactagggattttattatgggtgagaaggaagcctttggagggttttgaacaaataactaatgtgatctgacttatacttcagaaacgaaaaggagaggctgccctgggtgctgtgtagaatgtagcctgtggagaggcaagggaggagacgatgagctcccctgggaggctttagaagatcacagtggcttggacaaatgtggtagcaaatggagctagggtgaagtggagatttgtgttatgtttcaaaagtagagccaacaggatttgctgatggattggatatggggtgtgagaaagagaaacaagcattttggcccaagcaatgggaggaatgagttttccatgtactaagattgggaaaactgggaggggtatagctttgggttaaggaatctagagtttggttttagacatgttacatttgaggagcctaacagatattccagtggaggtggcaggaaggcaggtgaacatatgagcctgcagttcagtggaggtgatgtaaacctagctggctggagttgtaaatctagaacccaggcttcctgccttcctgcctggcactatttttcatcatgcctcctttctgtaacgaggctattttctgggatcactgcttgttaacagactgtatttaaagtacatttataattaactttttatttcttgaaaaatacattaatgagggttccatggtgtaatggttagcactctgtattctgaaaattacattaatacagaacttaaaaagcatgccctttcagcagtatctaattattcatataacttttctcttttgatgaaatattttgaattatattaatgatttaattaattgactattattgtgattgatatcattaattgtgaatcatttttgcactccttaaataaatctctaatgggcataagctattcgttaatatttcattggataatgtttgtatccagagtcataagtagtggtaatttaaattttgtgccaacattatcagaccttttttccctaatcattggcttcattaaatgaatttggattatttcttcttttctttcctctgtacacatttcaatattataaatttttttatattttctagtttcatagaattcaccagtaaaaatatctgaacctgcttctattttgaggaggggatcttggcagctttccctttttttttttctttcaccataattactgatctgttttaattttcagcttttttaaaaaatcaattttaaaagcttatattttcccagaaaatcactcatttaatttagattcccaaacttactagcctagagtcattttgtttcttataattattttaacatcctcagtgcctggggttattctgacctctatctcacttctattgcatatttatatattcttagcttgtattgttttgttatgtattttttccttcatttccttagattcattttggtcagaactttaatgtgtaattcattttaattttttttaataaggtttaagatagtttcttttttttttttttgagcagcagcaagatttattgtgaagagcaaaagaacaaagcttccacagcatggaaggggacccgagtggattgccctaagataatagatttttaatgcaactttgaccgtgtcccataagtcttctttacattttgtaattaaatttatttgccatatattcttcattcatgagggttttgtttagtttctcttttactttagtgttgtctatgaagaatttcaaatcttctgagggtttgggactttattcttttaacataatgatattgttgaatgagtgaaggaactcagccttgaaagatggaaaaatggaagagcaattgaaaagcaatgtgaaggtagccttgcaatggaaatgagcgtagcatgacagtgagccaagtggaaaattcatctcaggggagtggtcacaagtaaaatgggatagatagagtggaatcaaattgtatattgccatgcttaaatgacataccaggaggcctggatctttttctttagaaaacaaagaatttttgagaacagaaatttgttttcagtttctgtttttcagcatcattttcacctgtgatacagggcaagattattaataggcagggtttccaggcatttcatcatttgatgaaatctttttttttattattattatactttaagttttagggtacatgtgcacaatgtgcaggttagttacatatgtatacatgtgccgtgttggtgtgctgcacccagtaacaagtcatttaacattaggtatatctccaaatgctgtccttcccccctcccccaaccccacaacaggcccgggtgtgtgatgttccctttccctgtgtccatgtgttcccattgttcaattcccacctatgagtgacaacatgcggtgtttggttttttgtccttgaggtagtttgccgagaatgatggtttccagcttcatccatgtccctacaaaggacatgaactcatcattttttatggctgcatagtattccatggtgtatatgtgccacattttcttaatccagtctatcattgttggacatttgggttggttccaagtctttgctattgtgaatagtgccacaataaacatatgtgtgcatgtgtctttatagcagcatgatttataatcttttgggtatatacccagtaaagggattgctgggtcaaatggtatttctagttctagatccctgaggaatcgccacactgacttccacaatggttgaactagtttacagtcccaccagcagtgtaaaagtgttcctatttctccacatcctctccagcacctgttgtttcctgactttttaatgattgccattctaactggtgtgagatggtatctcagtgtggttttgatttgcatttctttgatgactagtgatgatgagcattttttcatgtgtcttttggctgcataaatgtcttcttttgagaagtgtctgttcatatccctcgcccacttgttgatagggttgtttgtttttttcttgtaaatttgtttgagttcattgtagattctggatattagccctttgtcagatgagtagattgcaaaaatgttttcccattctgtaggttgcctgttcactctgatggtagtttcttttgctgtgcagaagctctttagtttaatgagatcccatttgtcaattttggcttttgttgccattgcttttggtgttttagacatgaagtccttgcacatgcctgtgttctgaatggtattgcctaggttttcttctagggtttttatggttttaggtctaacatttaagtctttaatccatcttgaattaatttttgtataaggtgtaaggaagagttccagtttcagctttctacatatggctagccagttttcccagcaccatttattaaatagggaatcgtttccccatttcttgtttttgtcaggtttgtcaaagatcagatggttgtagatatgccgcattattaaaattgacaccctaacattataactaaaagaactagagaagcaagagcaaacaaattcaaaagctagcagaaggcaagaaataactaagatcagagcagaactgaagggaatagagacacaaaaaaaccttcaaaaaatccatgaatccgggagctggtttttttgaaaagatcaacaaaattgatagactgctagcaagactaataaagaagaaaagagagaagaatcaaatagacgcaataaaaaatgataaaggcgatatcaccaccgatcccacagaaatgcaaactaccgtcagagaatactataaacacctctacgtaaataaaccagaaaatctagaagaaatggataaattcctcgacacatacaccctcccaagactaaaccaggaagaacttgaatctctgaataaaccaataacaggctctgaaattgaggcaataattaatagcttaccaactaaaaaaagtccaggaccagatggattcacagccgaattctaccagaggtacaaggaggagctgttaccattccttctgaaactattccaatcaatagaaaaagagggaatcctccctaactcattttatgaggccagcatcatcctgataccaaagccgggcagagacacaacaaaaaaagagaattttagaccaatatccctgatgaacatcgatgcaaacatcctcaataacatactggcaaaccaaatccagcagcacatcaaaaagcttatccaccacgacgaagttggcttcatccctgggatgcaagggtggttcaacatacgaaaatcaataaacttaatcccgcatgtaaacagaaccaaagacaaaaaccacatggttatctcagtagatgcagaaaaggcctttgacaaaattcaacaacacttcatgctaaaaactctcaataaattaggtattgatgggacgtatctcaaaataataagacctatttttgacaaacccacagctgatatcatactgaataggcaaaaactggaagcattgcctttgaaaactggcacaaggcagagatgctctctctcaccactcctattcaacatagtgttggaagttctggcgagggcaatcaggcaggagaaagaaataaagggtattcaattaggaaaagaagaagtcaaattgtccctgtttgcagatgacatgattgtatatctagaaaaccccattgtctcagcccaaaatctccttaagctgataggcaacttcagcaaagtctcagaatacacaatcaatgtgcaaaaatcacaatcattcttatacaccaataacagacaaacagagagccaaatcatgagtgaactcccattcacaattgcttcaaagagaataaaatacctaggaatccaacttacaagggaggtgaaggacttcttcaaggagaactacaaaccactgctcgatgaaataaaagagaatacaaacaaatggaagaacattccatggtcatgggtaggaagaatcgatattgtgaaaatggctatactgcccaaggtaatttatagattcaatgccatccccatcaagctaccaatgagtttcttcaaagaattggaaaaaactattttaaagttcatatggaaccaaaaaagaacccgcattgccaagtcaatcctaagccaaaagaacaaagctggaggcatcacgctacctgacttcaaactatagtacaaggctacagtaaccaaaacagcatggtactggtaccaaaacagagatatagaccaatggaacagatatctcttttaaatagggatgtcatgtattgagggcctgctgatatatatcccagagctgggctagaaagtaaggaataatgtgatctaatattattacctgtttccactctcctcctcccctcaagatcatgttcgttatcatatgaggtaggaagtacaacagacattaaataacttcttgcaatcaggaaagaaagccctttttccccaccatgatataaaggatcaaaacatgtacctcatcagaatttcttcaaacttgcttcaaaaaggtggtatgtttaattattcttggcaaacataaaagataattgacacagaactccataccattttttcaaacgaaatttttatttattttctcttatctagctatgttcactttggaaaatgcacaatgattttatttttctgtaaccgccttggtctaaagctgcttttttagtaacatttttctttttctatttctagcaaatgccagatgttaatgtaagctgggatggagagggcccaaagcaactgccatttattgacatttcagtggctgtggcaacagataaaggcttacttactccaatcataaaagatgctgctgctaaaggtatccaggaaattgctgactctgtaaaggtatgtcttaagaaagagtgtgctttcaaaatgttagcatatacttttggataattactttctgataaagttgtgacgtaatctagtcagactgtgatttttgtgtgtgtgaaggggagagttatttcatcaagtgattgtcacatatatataggtttttaaagtttttatccaagtatgacccattgtaagaaaatttaatattcaaaaattaagagataatatataaacaaattagggaacaacttcatgctaaagacaagctttattttccaaagtccagaattcagccataaagatgctatatcaggtaggttttaaagttgaagttaagctgaaactgtatttctatggacctcaatattaataacattttattcttaaagtgtatttacttcttctctaaaattgagaccattaaaagaacttagcggccaggcgcggtgtctcacgcctgtaatgccagcgctttgggaggccgaggtgggtggatcccgaggtcaggagattgagaccaacctggccaacgtggtgtaaccccatctctactaaaaatacgaaaattagctgagtgtggtggcgcgtgcctgtaattccagctactcgggaggctgaggaacaagaatcacttgaacccaggaggcagaggttgcagtgagccgagattgcgccaccgtactccagcctggcaacagaatgagactccatctcaaaaaagaaatggacgtaatgttccagaggcaaagttactttattttttcaggatttcttgaaaagcagtttttgtaactccaatgtgtaggaatcttatttcaccaaaaaatagtacatcgaataggcaagaacacaggcagtagggcagctttgacagcctcagtaatttccaagggtattttttgacagaagtatcacaagtcttaaagtgattgcatcgaaaatttctgattcatttgggtaagtgattatctttccatttgccaaggacctgttgtatgtatagtggtagaacaatttgtatatttataagggagatatgaggtagaacgtaagacttctttggggagccgacagtacataaatgtgtagaccttcttgctcaaaagaaataagtgcaagttaatctggttttaaaagcatacccataaatactgagtttacttggaattttagaggtagatataattaaaggtgaacctactagaatcaatatttttaggtctttcttccctcctctttgaaaagatttgcagaaagtgtttgatcgataaaaatgcaattgttaattgaaaaatgaggctgcacatggtggctcatgcccgtaatcccaacactttgggaggctgaggcaggcagatcacttgaggtcaggaatttgagaccagcctggccaacatggcgaaaccccatttctactaaaaatacaaaaattagctgggcatggtggcacacacctattatctgaactattcgcgtgacggaggcatgagaattgcttgaacctgggaggcagaggttgcagtgagctgagattgtgccatttgcactgcagcctggatgacagagcaagacactgtatctcaaaaaaaaaaaaaaaaaaagaaaggtagcgtttatttggtcagttcaaaagtcaaagtaatagagattggtttactgagatatagtatgttccttgtgtttatcaagggttttcagcgacaatgagaatatttgtgtctgtgtttttgtgaaggttaaatgagattaagtgttgaaacaacctgtaaaatataaagtactattataatgttatggaactttattgtagagctagaatttccttatttttatatacattaaattttaaaaattaaccattataggaagatttccttgattctgagcaatttaccaaatttactgctataatacataagtcgtaagtagttatgttagctttctctattccttgcatcctgaagactctaagtttaagaggtaagaacgcagtctcaccagcctctcagttgggcctcacagcaatgggaagggcagtcataccactttggagtgtagtggtctctggcgggccttgggcatttcctgtaacccccaacagggactcagggtttgctgagctatggctgcccgttagcttctcattctacctgcttctctttcccaccctgctctcttcactcttgttcttacgctatgccaggcactgggctaagtgcttcatttaatcctattaacccagtacaattggaaccttaacttctccatgaaattgaggagattcagttttagcaactttgataaatttgcccaaggcaatacagctagaaagcagtggcaatgaggactagttaacccaggcagtttgattctagagccactgcttaatgagctttctattataccacctctctccttgcttttactgtttacctttcttttttcctgtctaatcattcacttctttacctcccctttgtctttttctcccgcaaagttaccagaaaggagggtttggtttggtcctcaagtagtactttcttgtatgaagtactcttgctgggcaggtctgtcatgccaggccagtgtgtcacatggtacagagcataacaacctgatgaatataatcacctttggttgtactcggaaaaaataaggggacattgaagcacactgaggcctctcatgagaaacaggcaccttgcatggcctatttaacataatagttctgtagtttacaggagagagagagagcaaaagagaaagaaagtttatgtgtgtgtgtgtatgtgtaagagagagagatctgagctcctgcaaaattagttttttgttgaagtggtttatcttgtaagcatgattatcttaaaaacttaaatgttggattgtttaaacggtggcttaaaaactaaatattttagataggctctatagagatatgttcatttagctgctgtggatgaataggcattaaaaataagtatgcaccaagtagaaaccctgagtgtgtgtgtgtgtgtgtgtatgtgtgtgtgtgttcttcacgtccaatatagattttgactcaattccaagttaagcaagattatattgaattcagctttactgtgcaaaaaacagcatctgcctgagtgtccacgtatagtagtgagtcacctttggtaataaatgcattttctgtcctgtgctttaatgtggttatattttaccgcatcccccaaaaagggtagacagtaaatgttacatttatggaatagtagtgccattttatacagtttgagtctcgtcagtatttctacatcaagctttgtactatggcttatttaaaaagtagaatgtttatgtatttaaacagataaaatttagaatgattttaattccagggtaaaatctgctccgaccagagagaaaaaactaattcatatatgaatatagtatttgtaatcctcttgtttaaagacatgcaagttctagaagtatttgtactgcttaatgttttaacaactctaacaataatagcagcgggcatactttgtaccagtttttgctgtaagccttttatatatattaatcctctttaaaaccaccctatcaagtacaagataataatttgatatggttgatgaagcaactgatgggaaaaaagagaggttaaataatttgccccaaatcttattaagtgatgtagccagcatctgaacccaatcagactgtagactagagcctcctcccaaccactcagctttgctgcttcccacatactagttacataactactgtatgactatagaggtcaggttatcagccttctagaatcagtaatgttttctgtcaaaaaaaaaaaaaaaagaaacttgagaagcagctcctggattttcagaaattaacaagaagaatagctaaggactcaacagttataccaaatgcaccataattagttgattcaccaggtagaagaaaaggagtacaatcattggttttctgtgtctgtaagaccaatcttttggtttggaatttgaaatattggagttctctcttatccaaggtttcactttgtgtggtttcagttacccgtggtcaaccacagttgaaaatagatgagtactgtacaagctattttgagagagaccacattcacatgatttttagagttataattgttctgttttattattagttattgttaatctcttaccatgcttaatttttaaattaaactttatcataattgtgtatgagtaggaaaaaatagtacagtcatgcatcacagcagggatacattctgagaaatgcatggttaggcgattttgtcattgtgtgaacaccatagagtgtgcttacacaaacctagatgggatagcctgctacacgcctaggctttgtatggtacaaacctgcagtacagcctattactgtactgaatagtataaggaaatagtgatacaatggtacgtatttgtgtgataggaatttttcagctccattttaatcttatgggaccactgtcatatatttatgtctttgtcttaagtgtccttatgcggcacatgactgcatgtatagagttcagtactatctgccatttcaggcacctactgtgggtctttgaagtatcccctgcagataaggggggactactgtatgcaactgggagaaaaaaagggttaagaaagaagagacctgagtcaaacgggagagtactctgccaaagaagcagtgaagattccccgaggaatgtgaggttgtggtcttagcaagtaggcagtggataagagaacctgcagcaaagaaaccaaggctctctacctggtgaggcaggagtagtctttttgaaaagactgtgggatcatggacaggttgagctctggattctcactaagagacatactatccagtacacacttccctctgatcgtcacttggctggctttttttcatcattggtttctcagttcagttgctaatttcttaggccttctgcagcttctgtagctgaaatagtttcctaacactctttatctcattaccctgttttattgtcttcatatggtttattagtctttgaaattaccttgtttatttatttgttcacccttctgtgttccctactgtctgatgttcactgtccattgccatttatctaattctagaagagtgcttgggatacagtagttgcttggtgaatttattttaaaacaaatttcagtaaaacttgtttcattgaaattaatttttcaagagtttgtggctctctgcagattcatccatgaaccccaagttaagaatatctgtactacgcatttacttcttgaccctctgtaatcccaaggatgccactgtgggggctgtaggcataccccagccaagttcaagttggtattccttgaataaagtaatgtagtgacacaccttggatcctgtgttattcttaattcttcattacttataacagtattaaaaggcagaggcatagtttaccttataagtacccagtaaatttttttaatgaatagcaaggcattcgatgtattgtagaaatatttagtggtcattttttattctttcagctggatgcttcaggtaacatgtactttgattttgagtccacattgccaggagatcccagtgatgattacaaatttataaaaccaacgatccttctcagattccatacctatttcagacttactagagttcactgacaggaatttcctgttgatgtatttaggatctacagagtttttgtttttagtatgtgtgcgtgcaatctacttattaaagtgagtttttttcatttgtggtaattgtgtggtagttcatcaggatatgttgagatcatctgcctttaaaaaatgccttttaaagttcatatatgtgtcttttcaaatcatgtgaacaattacattgcttaagggaggaaaaatgcttttatagattattctctctcccgttattccaagaactgtataagtcaaaattcatctcattttttaccttgaatccaaatagttttataaataaccacatccaaatagcatacacctgtaattgtttctgttggcagtacgttacagtaatgtgtttttagatttttgatatttttaaagactttcaattttaaaaaattaaatcatctatgaattaaagttagttatcaactgtgattgtaatagtgcctatgttgcctatgtaatacaaaatattaagtaaattccacatttattttatctacccaaatgacagtgacctcatttttctgtacccttcctcttaagttaattcgttattaattttttatatatgatgactcaacctctgttcccttgcttttaagcactgaaaaataaaaattaacagaaatgtggttaattccaagtacaagtgagaggaaaatttaactaatatgtcatctgtcttgtcttctgtaagatttttagaaatcgctgtggtcaagagtgatatgaatcaagtacatccttatattccttgtggcagtgtaaattggactagctcattcaggaaatgatttagctataggatcaagaaccaaaagaagtctattctctagggcactataattccacttctgaaaatttacctgaaataattcagaagaaaccgtgaaccaaattataacactgggaaataaccaagtaaattaggcaggtgcagtctttaggaacaaacattaaaaaatcatttctgaaggctgacaacacagaagatacatataatattgaacaattaaatataaaatttattttttataaccattgtgtggggttgagattgtggataaagatgaagcaaactctgaaagataaaaacggaatgttggttgtgggattgtgggtatactactttggttgccattggataatttatttaaaacacacagattggccaggcatggtggctcatacctgtaatcccaccactttgggaggccgaggtgggtggatcacttgagttcaggagttggagaccagcctgaccaacatggtgaaaccccatctctactaaaaatataaaaaattagctgggcgtggcggtgggtgcctgaaatctcagctactcaggacgctgaggcaagagaattgcttgaacctgggagatggaggttgcaataggccataatcacaccactgcactccagccagggcaacagagtgagacttctcaaaaaaaaaaaaaaaaaaaaaactaaaaaacactagattgaccagaatggattcttgtattttttttcttaccataaagttttataggcaaaatagaaaatttcattttgcatataggaaactctaaagcattttgcataataattgatggtacacagggtaattcccacatttgaaaaattgttaaaggaagtgatttttctagagttttgattaacagctttagtttcttgaattatctgtgctcttgtttgttcttataattagagaaaattatttttatataggtaacaaaatcaaatcaaggcatatcagagatgagagtatatgatgtacaaatatttcaagtgacaagatcaactgtataacattttgttggttgtcctattctgtttgtatttttctcaggctctatcaaagaaagcaagagatggaaaattgttgcctgaagaataccaaggaggatcttttaggtaaaatttaaactcttaattatccatagcatcaaacagatagatgtaagacttataaagtccctgtcagcctttcatttatctgaaatattttttaaaatttaagctaaaaatactttatttagacaatagaatatctgaaaaaattcttcagactagtcaggctttcatattaaagctagtaggaacctattagtgttgaactaaacgttcgttggacattgactaacatggaatgataaatattatgtattctttagtatctgacccacccccaatattaatgtctgtaatattatattgctatgtgaaacaaccacttatttattattgcagcatataatattctattgtataaatataccagaattcattttactgttggtgggcatttgcgttgcttccagttcggggctattacaaattatggtgctatgaacattcttattagtgtcttatagtgaatgtatgtacattttttgttgtatagacctaaaagtagaattcctaagttagaagctttagcagctactaccaaacaattttccaaatggttatacaaatttacacctccaccaacggtcctgagaattcccattgctccacattcttgccactatttaataatgttaggttttaaattttaacaattcttggggtgtgtagtggtactctttgtaggaaaatgcaaattagtgatgttgagtacttttcactcatcagccgtttgggtatctggtaattcatgagataaagtacccactgcaatctggtgtccatttaaaaaaatgatgtatagttcttatttctggatatacagacctttataggatatatattgtttcaaatagctttcacactctgtgacttgcctttgggactctctcggtgatttttttaaatgaacggaagttctgagttttaatgaattcctatttatcagtatttttctttgtagttggtactgttcattttctgttaggaatttttgcctatctcagagtcatgaagttactcttctgtgttatcttctaaaagcatttacgttacttttcacatgtagatcacaattcaactgaaattggattttgtatataatgtgaagtttcaagtgctcttttttccccatatggatactaaatttacacagcatcatgtattgaatattgatttctcctttttcatagcattgaaaaggtgattatatatgtgttggtctagttctgtgctattttttttccactggcctgtttgtctatcctttgtttactaccaccaagctataactcttgatagctggtaatgaagtcttccaattttgttcaccctcaagattgtcttctggcttttcgtatttccaaataaattgtaaaattgatttgccatttttcacacacacaccccttgctggtttcttgattgggattgcattaagtcttttgatgatttgagaattgacatccttacagtattgagtattctaacctgtgaatatggtagaaaccattgtgtattcagttatttgatttctttcagttatgttttataattttctgtgtagaggtcttgtatatgtttcattagatttattctttggtatttgttttttgatactattataaatggtattgttttaaatttttattttctaattatagcaacttgtatgtagagtcatgtgccactttatgatggggatatgagaaatgcattgttaggcagtttcatcatgcaaacatcatagagtgtacttacgcaaatcatgcaaacatcatagagtgtacttacacaaacctaaatggtacatgctgctacacaccttagctgtatgatatagccagttgctcctagactgcaaacctatacagcatgttactctactgaataccgtaagcagttgtgacacaatgatgagtatttgggtatctaaacatatctaagcatttttaaaatgtacagtaaaaatgtaaaaagtaaaacatggtacacctgtttagggcacttaccgtgaatggagcttgcaagactagaagttgctctggaagaatcagtgaatgagtgaatgcttaggacatcactatacactactgtagactttataaacactgcacacttaggctacactaaatttatttttaaaataaagtaattgcaatatgatgttatgacagctatgatgccactaggcagcagaaattcctgagctccattataatcttataagaccaccgttgtatatgtgatccttcgttatgtgggacatgactcgatataaaatggattgttatattgaccttttatctgatgacttaactaaatttacttattaattttactagttatctatagtctcatttttcctgtgtacacaattaatttatttgtaaatactaaatgtttccttttttcattactcatatatttttttcttgccttactacactgcctagtaaaatatataaaatatgtgcttcacggaaaggggactttgattaaggacatgcctccttcagagctttttcttttccccctagtatttccaacttggggatgtttggcatcgacgaatttactgcagtgattaaccctcctcaggcctgcattttggcggttgggaggttccgacctgtgctgaagctcactgaggatgaagagggaaatgccaaactgcagcagcgccagctcataacagtcacaatgtcaagtgacagtcgagtggttgatgacgaactggcaaccaggtttcttaaaagttttaaagcaaacctagagaatcctatccgacttgcctagtcctcaaagataagaagttggtgttcagcttagttgattcagtagttgttaccaagaaacatatgttataggaaaacaacttggtatttaagtatgaagtggatgaaatgtttatttatttaaggtgaaagcatttgacccagggtgtcttcatcttcaatttgggtttaatgttatagaaataaatgatgataaactctaactaataaaggaaagagaatatttggttactcagatccatttttaacctctggtgctgtataaagggaatattaaactagatgtaaatcaaagtatatgtttggctcatttgagcattttggaatatttgagaatgtatgatacatgtaaaattaaaaaaactattagaactgtaccataattatgttgaaggtagaagtgatcttcaaagagatggccattaacttagcagtgggacctcacttttacaagcactgctctagatatacttgaagaatttaataggtacagaagtttattctggataataaataaataaggatcacactgtattaggggttatggcaacattattgaattttttatgtacataaagccatatgtttagggtggtttctatctgtcttgtttttcacttatataacactgtgaacttctaaagcaagaggataaaagaagcatgaatgaaaagaatgacatttcaaaaaaatggttcaatgaaaaactatagctaaaatatgtaaacctttctaggtaaaccgcttgccttcatcttgagtcggaatatatttaaataaattgtgttatctcttgccaaacattttgttagtgtttatttaaaaacaaaatgttgtttcttaatgcatttaaatcagttttgtattgtgcagtaaaatgtgagaaaatataaacatttctattgtattttaaatgttaaaacacaaaagttcaataaaccttgaagttga

SEQ ID NO: 7374 - DNA, 18479 bp, Homo sapiens
atatataaagtacctacatgtatcactgttctagtataatcagtatgttataaagcatacagagaataagggtatttgaaaagaacgaggaagaaaatgaatcatcttgtaaacttcctgactgcacacaccacagagagatcatttgtctttttcgagacataggagttagttctttttttctgattatgcttgtaatgggtccttcaggttcttgtgtatgatatctaagcaatttaaaaaattgataaccaaggcccagaagtaaacttacattcatggttaatattattgatccaggacctcatataatgcaagtttttctaatcatgggaaccttattgactaagcaaacaaaagcttgtaattttttatcattgtttgtcagtacattccataatttacaagtttgaagttgtaatggtcaatgttaaagttatattaggaatactaattttactaaccttatttttctttcagatgacattaaagtatcagtaaatgattttatcatcaaggcagcagctgttacccttaaagtaagtagcagacttcaaatgattttgtcttcttaagtagtttcatgtcgtggaatttttacaatgacaaatagaactcttatttttaaatcacaaaaattttataattgtcttgctaaaaatatcctatcgtttgatctccctcattttacaaatgaagaaactgtaaatcaaaagggctcacaatgaattagagcaggatgaaaaccatttattctaggcattagagatagagcagtaaacaaaagcttacttgatttctgctgtccctggggcttacattctagttggaggagacaaacactattatatgtcagatggtgaaagtgctgaggagaaaaagaaaggataaggggacaaagtaactaggggtgatttttcaaaagggaagcgagggaagcccctctgacaaggcgataatttagatacggcctgagaaaacagagggagtgagccacataggtatgtggtaaaagtgcattccacacagagggaccagcaaacaccaaggctgcaagcagaggatcgcattaaccaaagatgtggtgctgagggtggaatgtgcctagtatggagaggtgggagataagatttaaataacagtgggagagcatgaaggggaacccaagtacatgaggccttgttggacatggtgaggactagggattttattatgggtgagaaggaagcctttggagggttttgaacaaataactaatgtgatctgacttatacttcagaaacgaaaaggagaggctgccctgggtgctgtgtagaatgtagcctgtggagaggcaagggaggagacgatgagctcccctgggaggctttagaagatcacagtggcttggacaaatgtggtagcaaatggagctagggtgaagtggagatttgtgttatgtttcaaaagtagagccaacaggatttgctgatggattggatatggggtgtgagaaagagaaacaagcattttggcccaagcaatgggaggaatgagttttccatgtactaagattgggaaaactgggaggggtatagctttgggttaaggaatctagagtttggttttagacatgttacatttgaggagcctaacagatattccagtggaggtggcaggaaggcaggtgaacatatgagcctgcagttcagtggaggtgatgtaaacctagctggctggagttgtaaatctagaacccaggcttcctgccttcctgcctggcactatttttcatcatgcctcctttctgtaacgaggctattttctgggatcactgcttgttaacagactgtatttaaagtacatttataattaactttttatttcttgaaaaatacattaatgagggttccatggtgtaatggttagcactctgtattctgaaaattacattaatacagaacttaaaaagcatgccctttcagcagtatctaattattcatataacttttctcttttgatgaaatattttgaattatattaatgatttaattaattgactattattgtgattgatatcattaattgtgaatcatttttgcactccttaaataaatctctaatgggcataagctattcgttaatatttcattggataatgtttgtatccagagtcataagtagtggtaatttaaattttgtgccaacattatcagaccttttttccctaatcattggcttcattaaatgaatttggattatttcttcttttctttcctctgtacacatttcaatattataaatttttttatattttctagtttcatagaattcaccagtaaaaatatctgaacctgcttctattttgaggaggggatcttggcagctttccctttttttttttctttcaccataattactgatctgttttaattttcagcttttttaaaaaatcaattttaaaagcttatattttcccagaaaatcactcatttaatttagattcccaaacttactagcctagagtcattttgtttcttataattattttaacatcctcagtgcctggggttattctgacctctatctcacttctattgcatatttatatattcttagcttgtattgttttgttatgtattttttccttcatttccttagattcattttggtcagaactttaatgtgtaattcattttaattttttttaataaggtttaagatagtttcttttttttttttttgagcagcagcaagatttattgtgaagagcaaaagaacaaagcttccacagcatggaaggggacccgagtggattgccctaagataatagatttttaatgcaactttgaccgtgtcccataagtcttctttacattttgtaattaaatttatttgccatatattcttcattcatgagggttttgtttagtttctcttttactttagtgttgtctatgaagaatttcaaatcttctgagggtttgggactttattcttttaacataatgatattgttgaatgagtgaaggaactcagccttgaaagatggaaaaatggaagagcaattgaaaagcaatgtgaaggtagccttgcaatggaaatgagcgtagcatgacagtgagccaagtggaaaattcatctcaggggagtggtcacaagtaaaatgggatagatagagtggaatcaaattgtatattgccatgcttaaatgacataccaggaggcctggatctttttctttagaaaacaaagaatttttgagaacagaaatttgttttcagtttctgtttttcagcatcattttcacctgtgatacagggcaagattattaataggcagggtttccaggcatttcatcatttgatgaaatctttttttttattattattatactttaagttttagggtacatgtgcacaatgtgcaggttagttacatatgtatacatgtgccgtgttggtgtgctgcacccagtaacaagtcatttaacattaggtatatctccaaatgctgtccttcccccctcccccaaccccacaacaggcccgggtgtgtgatgttccctttccctgtgtccatgtgttcccattgttcaattcccacctatgagtgacaacatgcggtgtttggttttttgtccttgaggtagtttgccgagaatgatggtttccagcttcatccatgtccctacaaaggacatgaactcatcattttttatggctgcatagtattccatggtgtatatgtgccacattttcttaatccagtctatcattgttggacatttgggttggttccaagtctttgctattgtgaatagtgccacaataaacatatgtgtgcatgtgtctttatagcagcatgatttataatcttttgggtatatacccagtaaagggattgctgggtcaaatggtatttctagttctagatccctgaggaatcgccacactgacttccacaatggttgaactagtttacagtcccaccagcagtgtaaaagtgttcctatttctccacatcctctccagcacctgttgtttcctgactttttaatgattgccattctaactggtgtgagatggtatctcagtgtggttttgatttgcatttctttgatgactagtgatgatgagcattttttcatgtgtcttttggctgcataaatgtcttcttttgagaagtgtctgttcatatccctcgcccacttgttgatagggttgtttgtttttttcttgtaaatttgtttgagttcattgtagattctggatattagccctttgtcagatgagtagattgcaaaaatgttttcccattctgtaggttgcctgttcactctgatggtagtttcttttgctgtgcagaagctctttagtttaatgagatcccatttgtcaattttggcttttgttgccattgcttttggtgttttagacatgaagtccttgcacatgcctgtgttctgaatggtattgcctaggttttcttctagggtttttatggttttaggtctaacatttaagtctttaatccatcttgaattaatttttgtataaggtgtaaggaagagttccagtttcagctttctacatatggctagccagttttcccagcaccatttattaaatagggaatcgtttccccatttcttgtttttgtcaggtttgtcaaagatcagatggttgtagatatgccgcattattaaaattgacaccctaacattataactaaaagaactagagaagcaagagcaaacaaattcaaaagctagcagaaggcaagaaataactaagatcagagcagaactgaagggaatagagacacaaaaaaaccttcaaaaaatccatgaatccgggagctggtttttttgaaaagatcaacaaaattgatagactgctagcaagactaataaagaagaaaagagagaagaatcaaatagacgcaataaaaaatgataaaggcgatatcaccaccgatcccacagaaatgcaaactaccgtcagagaatactataaacacctctacgtaaataaaccagaaaatctagaagaaatggataaattcctcgacacatacaccctcccaagactaaaccaggaagaacttgaatctctgaataaaccaataacaggctctgaaattgaggcaataattaatagcttaccaactaaaaaaagtccaggaccagatggattcacagccgaattctaccagaggtacaaggaggagctgttaccattccttctgaaactattccaatcaatagaaaaagagggaatcctccctaactcattttatgaggccagcatcatcctgataccaaagccgggcagagacacaacaaaaaaagagaattttagaccaatatccctgatgaacatcgatgcaaacatcctcaataacatactggcaaaccaaatccagcagcacatcaaaaagcttatccaccacgacgaagttggcttcatccctgggatgcaagggtggttcaacatacgaaaatcaataaacttaatcccgcatgtaaacagaaccaaagacaaaaaccacatggttatctcagtagatgcagaaaaggcctttgacaaaattcaacaacacttcatgctaaaaactctcaataaattaggtattgatgggacgtatctcaaaataataagacctatttttgacaaacccacagctgatatcatactgaataggcaaaaactggaagcattgcctttgaaaactggcacaaggcagagatgctctctctcaccactcctattcaacatagtgttggaagttctggcgagggcaatcaggcaggagaaagaaataaagggtattcaattaggaaaagaagaagtcaaattgtccctgtttgcagatgacatgattgtatatctagaaaaccccattgtctcagcccaaaatctccttaagctgataggcaacttcagcaaagtctcagaatacacaatcaatgtgcaaaaatcacaatcattcttatacaccaataacagacaaacagagagccaaatcatgagtgaactcccattcacaattgcttcaaagagaataaaatacctaggaatccaacttacaagggaggtgaaggacttcttcaaggagaactacaaaccactgctcgatgaaataaaagagaatacaaacaaatggaagaacattccatggtcatgggtaggaagaatcgatattgtgaaaatggctatactgcccaaggtaatttatagattcaatgccatccccatcaagctaccaatgagtttcttcaaagaattggaaaaaactattttaaagttcatatggaaccaaaaaagaacccgcattgccaagtcaatcctaagccaaaagaacaaagctggaggcatcacgctacctgacttcaaactatagtacaaggctacagtaaccaaaacagcatggtactggtaccaaaacagagatatagaccaatggaacagatatctcttttaaatagggatgtcatgtattgagggcctgctgatatatatcccagagctgggctagaaagtaaggaataatgtgatctaatattattacctgtttccactctcctcctcccctcaagatcatgttcgttatcatatgaggtaggaagtacaacagacattaaataacttcttgcaatcaggaaagaaagccctttttccccaccatgatataaaggatcaaaacatgtacctcatcagaatttcttcaaacttgcttcaaaaaggtggtatgtttaattattcttggcaaacataaaagataattgacacagaactccataccattttttcaaacgaaatttttatttattttctcttatctagctatgttcactttggaaaatgcacaatgattttatttttctgtaaccgccttggtctaaagctgcttttttagtaacatttttctttttctatttctagcaaatgccagatgttaatgtaagctgggatggagagggcccaaagcaactgccatttattgacatttcagtggctgtggcaacagataaaggcttacttactccaatcataaaagatgctgctgctaaaggtatccaggaaattgctgactctgtaaaggtatgtcttaagaaagagtgtgctttcaaaatgttagcatatacttttggataattactttctgataaagttgtgacgtaatctagtcagactgtgatttttgtgtgtgtgaaggggagagttatttcatcaagtgattgtcacatatatataggtttttaaagtttttatccaagtatgacccattgtaagaaaatttaatattcaaaaattaagagataatatataaacaaattagggaacaacttcatgctaaagacaagctttattttccaaagtccagaattcagccataaagatgctatatcaggtaggttttaaagttgaagttaagctgaaactgtatttctatggacctcaatattaataacattttattcttaaagtgtatttacttcttctctaaaattgagaccattaaaagaacttagcggccaggcgcggtgtctcacgcctgtaatgccagcgctttgggaggccgaggtgggtggatcccgaggtcaggagattgagaccaacctggccaacgtggtgtaaccccatctctactaaaaatacgaaaattagctgagtgtggtggcgcgtgcctgtaattccagctactcgggaggctgaggaacaagaatcacttgaacccaggaggcagaggttgcagtgagccgagattgcgccaccgtactccagcctggcaacagaatgagactccatctcaaaaaagaaatggacgtaatgttccagaggcaaagttactttattttttcaggatttcttgaaaagcagtttttgtaactccaatgtgtaggaatcttatttcaccaaaaaatagtacatcgaataggcaagaacacaggcagtagggcagctttgacagcctcagtaatttccaagggtattttttgacagaagtatcacaagtcttaaagtgattgcatcgaaaatttctgattcatttgggtaagtgattatctttccatttgccaaggacctgttgtatgtatagtggtagaacaatttgtatatttataagggagatatgaggtagaacgtaagacttctttggggagccgacagtacataaatgtgtagaccttcttgctcaaaagaaataagtgcaagttaatctggttttaaaagcatacccataaatactgagtttacttggaattttagaggtagatataattaaaggtgaacctactagaatcaatatttttaggtctttcttccctcctctttgaaaagatttgcagaaagtgtttgatcgataaaaatgcaattgttaattgaaaaatgaggctgcacatggtggctcatgcccgtaatcccaacactttgggaggctgaggcaggcagatcacttgaggtcaggaatttgagaccagcctggccaacatggcgaaaccccatttctactaaaaatacaaaaattagctgggcatggtggcacacacctattatctgaactattcgcgtgacggaggcatgagaattgcttgaacctgggaggcagaggttgcagtgagctgagattgtgccatttgcactgcagcctggatgacagagcaagacactgtatctcaaaaaaaaaaaaaaaaaaagaaaggtagcgtttatttggtcagttcaaaagtcaaagtaatagagattggtttactgagatatagtatgttccttgtgtttatcaagggttttcagcgacaatgagaatatttgtgtctgtgtttttgtgaaggttaaatgagattaagtgttgaaacaacctgtaaaatataaagtactattataatgttatggaactttattgtagagctagaatttccttatttttatatacattaaattttaaaaattaaccattataggaagatttccttgattctgagcaatttaccaaatttactgctataatacataagtcgtaagtagttatgttagctttctctattccttgcatcctgaagactctaagtttaagaggtaagaacgcagtctcaccagcctctcagttgggcctcacagcaatgggaagggcagtcataccactttggagtgtagtggtctctggcgggccttgggcatttcctgtaacccccaacagggactcagggtttgctgagctatggctgcccgttagcttctcattctacctgcttctctttcccaccctgctctcttcactcttgttcttacgctatgccaggcactgggctaagtgcttcatttaatcctattaacccagtacaattggaaccttaacttctccatgaaattgaggagattcagttttagcaactttgataaatttgcccaaggcaatacagctagaaagcagtggcaatgaggactagttaacccaggcagtttgattctagagccactgcttaatgagctttctattataccacctctctccttgcttttactgtttacctttcttttttcctgtctaatcattcacttctttacctcccctttgtctttttctcccgcaaagttaccagaaaggagggtttggtttggtcctcaagtagtactttcttgtatgaagtactcttgctgggcaggtctgtcatgccaggccagtgtgtcacatggtacagagcataacaacctgatgaatataatcacctttggttgtactcggaaaaaataaggggacattgaagcacactgaggcctctcatgagaaacaggcaccttgcatggcctatttaacataatagttctgtagtttacaggagagagagagagcaaaagagaaagaaagtttatgtgtgtgtgtgtatgtgtaagagagagagatctgagctcctgcaaaattagttttttgttgaagtggtttatcttgtaagcatgattatcttaaaaacttaaatgttggattgtttaaacggtggcttaaaaactaaatattttagataggctctatagagatatgttcatttagctgctgtggatgaataggcattaaaaataagtatgcaccaagtagaaaccctgagtgtgtgtgtgtgtgtgtgtatgtgtgtgtgtgttcttcacgtccaatatagattttgactcaattccaagttaagcaagattatattgaattcagctttactgtgcaaaaaacagcatctgcctgagtgtccacgtatagtagtgagtcacctttggtaataaatgcattttctgtcctgtgctttaatgtggttatattttaccgcatcccccaaaaagggtagacagtaaatgttacatttatggaatagtagtgccattttatacagtttgagtctcgtcagtatttctacatcaagctttgtactatggcttatttaaaaagtagaatgtttatgtatttaaacagataaaatttagaatgattttaattccagggtaaaatctgctccgaccagagagaaaaaactaattcatatatgaatatagtatttgtaatcctcttgtttaaagacatgcaagttctagaagtatttgtactgcttaatgttttaacaactctaacaataatagcagcgggcatactttgtaccagtttttgctgtaagccttttatatatattaatcctctttaaaaccaccctatcaagtacaagataataatttgatatggttgatgaagcaactgatgggaaaaaagagaggttaaataatttgccccaaatcttattaagtgatgtagccagcatctgaacccaatcagactgtagactagagcctcctcccaaccactcagctttgctgcttcccacatactagttacataactactgtatgactatagaggtcaggttatcagccttctagaatcagtaatgttttctgtcaaaaaaaaaaaaaaaagaaacttgagaagcagctcctggattttcagaaattaacaagaagaatagctaaggactcaacagttataccaaatgcaccataattagttgattcaccaggtagaagaaaaggagtacaatcattggttttctgtgtctgtaagaccaatcttttggtttggaatttgaaatattggagttctctcttatccaaggtttcactttgtgtggtttcagttacccgtggtcaaccacagttgaaaatagatgagtactgtacaagctattttgagagagaccacattcacatgatttttagagttataattgttctgttttattattagttattgttaatctcttaccatgcttaatttttaaattaaactttatcataattgtgtatgagtaggaaaaaatagtacagtcatgcatcacagcagggatacattctgagaaatgcatggttaggcgattttgtcattgtgtgaacaccatagagtgtgcttacacaaacctagatgggatagcctgctacacgcctaggctttgtatggtacaaacctgcagtacagcctattactgtactgaatagtataaggaaatagtgatacaatggtacgtatttgtgtgataggaatttttcagctccattttaatcttatgggaccactgtcatatatttatgtctttgtcttaagtgtccttatgcggcacatgactgcatgtatagagttcagtactatctgccatttcaggcacctactgtgggtctttgaagtatcccctgcagataaggggggactactgtatgcaactgggagaaaaaaagggttaagaaagaagagacctgagtcaaacgggagagtactctgccaaagaagcagtgaagattccccgaggaatgtgaggttgtggtcttagcaagtaggcagtggataagagaacctgcagcaaagaaaccaaggctctctacctggtgaggcaggagtagtctttttgaaaagactgtgggatcatggacaggttgagctctggattctcactaagagacatactatccagtacacacttccctctgatcgtcacttggctggctttttttcatcattggtttctcagttcagttgctaatttcttaggccttctgcagcttctgtagctgaaatagtttcctaacactctttatctcattaccctgttttattgtcttcatatggtttattagtctttgaaattaccttgtttatttatttgttcacccttctgtgttccctactgtctgatgttcactgtccattgccatttatctaattctagaagagtgcttgggatacagtagttgcttggtgaatttattttaaaacaaatttcagtaaaacttgtttcattgaaattaatttttcaagagtttgtggctctctgcagattcatccatgaaccccaagttaagaatatctgtactacgcatttacttcttgaccctctgtaatcccaaggatgccactgtgggggctgtaggcataccccagccaagttcaagttggtattccttgaataaagtaatgtagtgacacaccttggatcctgtgttattcttaattcttcattacttataacagtattaaaaggcagaggcatagtttaccttataagtacccagtaaatttttttaatgaatagcaaggcattcgatgtattgtagaaatatttagtggtcattttttattctttcagctggatgcttcaggtaacatgtactttgattttgagtccacattgccaggagatcccagtgatgattacaaatttataaaaccaacgatccttctcagattccatacctatttcagacttactagagttcactgacaggaatttcctgttgatgtatttaggatctacagagtttttgtttttagtatgtgtgcgtgcaatctacttattaaagtgagtttttttcatttgtggtaattgtgtggtagttcatcaggatatgttgagatcatctgcctttaaaaaatgccttttaaagttcatatatgtgtcttttcaaatcatgtgaacaattacattgcttaagggaggaaaaatgcttttatagattattctctctcccgttattccaagaactgtataagtcaaaattcatctcattttttaccttgaatccaaatagttttataaataaccacatccaaatagcatacacctgtaattgtttctgttggcagtacgttacagtaatgtgtttttagatttttgatatttttaaagactttcaattttaaaaaattaaatcatctatgaattaaagttagttatcaactgtgattgtaatagtgcctatgttgcctatgtaatacaaaatattaagtaaattccacatttattttatctacccaaatgacagtgacctcatttttctgtacccttcctcttaagttaattcgttattaattttttatatatgatgactcaacctctgttcccttgcttttaagcactgaaaaataaaaattaacagaaatgtggttaattccaagtacaagtgagaggaaaatttaactaatatgtcatctgtcttgtcttctgtaagatttttagaaatcgctgtggtcaagagtgatatgaatcaagtacatccttatattccttgtggcagtgtaaattggactagctcattcaggaaatgatttagctataggatcaagaaccaaaagaagtctattctctagggcactataattccacttctgaaaatttacctgaaataattcagaagaaaccgtgaaccaaattataacactgggaaataaccaagtaaattaggcaggtgcagtctttaggaacaaacattaaaaaatcatttctgaaggctgacaacacagaagatacatataatattgaacaattaaatataaaatttattttttataaccattgtgtggggttgagattgtggataaagatgaagcaaactctgaaagataaaaacggaatgttggttgtgggattgtgggtatactactttggttgccattggataatttatttaaaacacacagattggccaggcatggtggctcatacctgtaatcccaccactttgggaggccgaggtgggtggatcacttgagttcaggagttggagaccagcctgaccaacatggtgaaaccccatctctactaaaaatataaaaaattagctgggcgtggcggtgggtgcctgaaatctcagctactcaggacgctgaggcaagagaattgcttgaacctgggagatggaggttgcaataggccataatcacaccactgcactccagccagggcaacagagtgagacttctcaaaaaaaaaaaaaaaaaaaaaactaaaaaacactagattgaccagaatggattcttgtattttttttcttaccataaagttttataggcaaaatagaaaatttcattttgcatataggaaactctaaagcattttgcataataattgatggtacacagggtaattcccacatttgaaaaattgttaaaggaagtgatttttctagagttttgattaacagctttagtttcttgaattatctgtgctcttgtttgttcttataattagagaaaattatttttatataggtaacaaaatcaaatcaaggcatatcagagatgagagtatatgatgtacaaatatttcaagtgacaagatcaactgtataacattttgttggttgtcctattctgtttgtatttttctcaggctctatcaaagaaagcaagagatggaaaattgttgcctgaagaataccaaggaggatcttttaggtaaaatttaaactcttaattatccatagcatcaaacagatagatgtaagacttataaagtccctgtcagcctttcatttatctgaaatattttttaaaatttaagctaaaaatactttatttagacaatagaatatctgaaaaaattcttcagactagtcaggctttcatattaaagctagtaggaacctattagtgttgaactaaacgttcgttggacattgactaacatggaatgataaatattatgtattctttagtatctgacccacccccaatattaatgtctgtaatattatattgctatgtgaaacaaccacttatttattattgcagcatataatattctattgtataaatataccagaattcattttactgttggtgggcatttgcgttgcttccagttcggggctattacaaattatggtgctatgaacattcttattagtgtcttatagtgaatgtatgtacattttttgttgtatagacctaaaagtagaattcctaagttagaagctttagcagctactaccaaacaattttccaaatggttatacaaatttacacctccaccaacggtcctgagaattcccattgctccacattcttgccactatttaataatgttaggttttaaattttaacaattcttggggtgtgtagtggtactctttgtaggaaaatgcaaattagtgatgttgagtacttttcactcatcagccgtttgggtatctggtaattcatgagataaagtacccactgcaatctggtgtccatttaaaaaaatgatgtatagttcttatttctggatatacagacctttataggatatatattgtttcaaatagctttcacactctgtgacttgcctttgggactctctcggtgatttttttaaatgaacggaagttctgagttttaatgaattcctatttatcagtatttttctttgtagttggtactgttcattttctgttaggaatttttgcctatctcagagtcatgaagttactcttctgtgttatcttctaaaagcatttacgttacttttcacatgtagatcacaattcaactgaaattggattttgtatataatgtgaagtttcaagtgctcttttttccccatatggatactaaatttacacagcatcatgtattgaatattgatttctcctttttcatagcattgaaaaggtgattatatatgtgttggtctagttctgtgctattttttttccactggcctgtttgtctatcctttgtttactaccaccaagctataactcttgatagctggtaatgaagtcttccaattttgttcaccctcaagattgtcttctggcttttcgtatttccaaataaattgtaaaattgatttgccatttttcacacacacaccccttgctggtttcttgattgggattgcattaagtcttttgatgatttgagaattgacatccttacagtattgagtattctaacctgtgaatatggtagaaaccattgtgtattcagttatttgatttctttcagttatgttttataattttctgtgtagaggtcttgtatatgtttcattagatttattctttggtatttgttttttgatactattataaatggtattgttttaaatttttattttctaattatagcaacttgtatgtagagtcatgtgccactttatgatggggatatgagaaatgcattgttaggcagtttcatcatgcaaacatcatagagtgtacttacgcaaatcatgcaaacatcatagagtgtacttacacaaacctaaatggtacatgctgctacacaccttagctgtatgatatagccagttgctcctagactgcaaacctatacagcatgttactctactgaataccgtaagcagttgtgacacaatgatgagtatttgggtatctaaacatatctaagcatttttaaaatgtacagtaaaaatgtaaaaagtaaaacatggtacacctgtttagggcacttaccgtgaatggagcttgcaagactagaagttgctctggaagaatcagtgaatgagtgaatgcttaggacatcactatacactactgtagactttataaacactgcacacttaggctacactaaatttatttttaaaataaagtaattgcaatatgatgttatgacagctatgatgccactaggcagcagaaattcctgagctccattataatcttataagaccaccgttgtatatgtgatccttcgttatgtgggacatgactcgatataaaatggattgttatattgaccttttatctgatgacttaactaaatttacttattaattttactagttatctatagtctcatttttcctgtgtacacaattaatttatttgtaaatactaaatgtttccttttttcattactcatatatttttttcttgccttactacactgcctagtaaaatatataaaatatgtgcttcacggaaaggggactttgattaaggacatgcctccttcagagctttttcttttccccctagtatttccaacttggggatgtttggcatcgacgaatttactgcagtgattaaccctcctcaggcctgcattttggcggttgggaggttccgacctgtgctgaagctcactgaggatgaagagggaaatgccaaactgcagcagcgccagctcataacagtcacaatgtcaagtgacagtcgagtggttgatgacgaactggcaaccaggtttcttaaaagttttaaagcaaacctagagaatcctatccgacttgcctagtcctcaaagataagaagttggtgttcagcttagttgattcagtagttgttaccaagaaacatatgttataggaaaacaacttggtatttaagtatgaagtggatgaaatgtttatttatttaaggtgaaagcatttgacccagggtgtcttcatcttcaatttgggtttaatgttatagaaataaatgatgataaactctaactaataaaggaaagagaatatttggttactcagatccatttttaacctctggtgctgtataaagggaatattaaactagatgtaaatcaaagtatatgtttggctcatttgagcattttggaatatttgagaatgtatgatacatgtaaaattaaaaaaactattagaactgtaccataattatgttgaaggtagaagtgatcttcaaagagatggccattaacttagcagtgggacctcacttttacaagcactgctctagatatacttgaagaatttaataggtacagaagtttattctggataataaataaataaggatcacactgtattaggggttatggcaacattattgaattttttatgtacataaagccatatgtttagggtggtttctatctgtcttgtttttcacttatataacactgtgaacttctaaagcaagaggataaaagaagcatgaatgaaaagaatgacatttcaaaaaaatggttcaatgaaaaactatagctaaaatatgtaaacctttctaggtaaaccgcttgccttcatcttgagtcggaatatatttaaataaattgtgttatctcttgccaaacattttgttagtgtttatttaaaaacaaaatgttgtttcttaatgcatttaaatcagttttgtattgtgcagtaaaatgtgagaaaatataaacatttctattgtattttaaatgttaaaacacaaaagttcaataaaccttgaagttga

SEQ ID NO: 7375 - DNA, 716 bp, Homo sapiens
ataacactgagaaaggagtatggtatacttggtttgaactgtgtgctacactaccaggccccttccacattatactactaatttatttaaaatagataggtatcacactgagaggatataaaaaaaatttctgcctcttcatttttgtttcttgtttgaacagaaaaaatgaccaaaatattgggagtacttctaaggaaaaggcaacacacattccagttaacacttggatgtgaaaatatcaatgaatattagaatttataagtcaaactggctctgctcgctgattgcaatttttagttacattcactattttgtgctaaatttaagtcattggtatacgactggccagagtccttggttttaaacattactgagaactttatatatactcttaatgggtattttatataatgtcgaatgaaacttttatttttagatttttaaaaaatattttgcactttggacttaattttacactaaattgtatcagccagcctaagggcattatgctaaatgtaaatctagttcttggttaagcttttattgaaagataggtggtgctgtaagttaatatattgtagtgaaagtgtgggagaaaagttaaattggcacttaaatcttagttttcaaggaaaacgtgtcccgcacatactgcattatgatggactttgtctcaggtgaagtgaagaagtgaaagaatcaagtgtatggcc

SEQ ID NO: 7376 - DNA, 716 bp, Homo sapiens; identical to SEQ ID NO: 7375

SEQ ID NO: 7377 - DNA, 2625 bp, Homo sapiens
gaggcaggcagatcacaaggtcaggagatcgagaccatcctagctaacacagtgaaaccccatctctattaaaaatacaaaaaatgagccgggcatggtggcgggcgcctatagtcccagctactcgggaggcagaggcaggagaatggcgtgaacccaggaggcagagctttcagtgagccgagatcgcgccactgcactccagcctgggccacagagcgagactccatctcaaaaaaaaaaaaaaaaagacataatgatataacctcattttcttctatgttttcctgctttcctaccaatatctgtaaaacattaacgtcattatttaaaaaaatatgtaacctagataatatagtaatcagacatcattgttaaatttacagcttaaggaagtaagttgtcttttcaatcagattagtcattctgtttttttagtaatagttatatattaatgaagtgaaactttataggtaggtatacatcaatgaaatcttaggcttttaccatctatattgcatacttctgacattatatcttattttccttaggttctaagaattttagatccagttacctgcaaagagagttcacctgataatccattttttgagtcttcaccaaccaccttacttgctacaaagaaaaatattggacgatttcatccctatactagatatgaaaatataactttcaattgctgcaatcactgccggggagaactgattgccctttaacagtcaatatgttggaggcatgctaaggtacttccttattacccaagagtcattattatttgggagctggggttcttacaatgctagaaataatatcacttcctatttacataatgtatacacccaaagatattttatgtactagactccagattaccctttcttaataaatatctcagggtaaggaaagaaagaaactgtatagatatatttaaaatagagaatactttccaagcaatacatgatacttttcctaaaagactctaaaagaaaaagattctgtaactctcttttagcaccaaattattgtttatcttgctggatattttatatgaacagtgttaatttagatgcactaaagcaaaggtaggcaaactacaaccatgagtcaaacatggccacacccattcatgtgctattgtctaagctggttttgcactacaactgcagagttgaatagatgcagcagatcctttacagaaaaagttttctgacctcaattctaaagtaattgtagtagggagctggaggactttctttccctttatggtaattttttgagctacaaaagagccttgcagaaatgggtgaagggattaatcttttaaaaataaatgctatatattaggaaaataaaaaatattttagagccaagttaacaagtacttcagcaaaacatgctagttttatgcaggggattctgtattccaaatggatacaatccgacatatataaaagaaacagattcttaactattgactcttatttagcaaatgcaacagacaagaatatccaacttgatatttataaaaggtagactttttccaaaagtgtataagctcaaagaaaaaatgcaacctgtcaattaatatatactatgtaatatatattattgtgtatttatgattagccatcataaatgcccattgcttggcctttaagaataatcacaaaatatttatattaaattatacaaatttgttgcagaagtgcctgtgagagaaatcttcaaaagacaaacctggtcaaataataataattttaatgtcaatgattttttttgtctgactcatctgagttatatttagttttcaagtggcaataaatttatctaccttctttattgcgactattccttttttcccccagaattagtgctttggtttaggtctttgtctagcttaactacttccaattgattcttcagccttttcttttaggtttacttactataaaagtctcagaagaaagcataaggggaaagcttcgtgacattgtatttggcaatgatttcttgaatatgacaacagaagcacaggcaacaaaagaaaaaatagataaattgaatttcatcaaaatttcaaatttttgtgcattaaaagatgcagtgaaaaggcaacacagagaatgggagaaaatatttgcaaatcatatatctgataactgtctagtgtccagaatatataaagcactcctacaactcaaccaccaaaaaacaacccaataaaaattagcaaaggggctgggcatggtggctcatgcctgtaatcctagcactttgggaggctgaggcagtcagatcacctgaggccaggagttcaagaccagccgagccaagatggcgaaaccccatctctactaagaatacaaaaaattggcctggcgcagtggctcacgcctgtaatcccagcactttgggaggccgaggtgggtgggtcacctgaggttaggagttcaagatcagcctggccaagatggtgaaacccccgtctctactaaaaatacaaaaaattagttgggcatggtggcgggcacctgtactcccagctactcgggaggctgaggcagagaattgcttgaacctgggaggcggaggttgtagtgagcc

SEQ ID NO: 7378 - DNA, 2625 bp, Homo sapiens
gaggcaggcagatcacaaggtcaggagatcgagaccatcctagctaacacagtgaaaccccatctctattaaaaatacaaaaaatgagccgggcatggtggcgggcgcctatagtcccagctactcgggaggcagaggcaggagaatggcgtgaacccaggaggcagagctttcagtgagccgagatcgcgccactgcactccagcctgggccacagagcgagactccatctcaaaaaaaaaaaaaaaaagacataatgatataacctcattttcttctatgttttcctgctttcctaccaatatctgtaaaacattaacgtcattatttaaaaaaatatgtaacctagataatatagtaatcagacatcattgttaaatttacagcttaaggaagtaagttgtcttttcaatcagattagtcattctgtttttttagtaatagttatatattaatgaagtgaaactttataggtaggtatacatcaatgaaatcttaggcttttaccatctatattgcatacttctgacattatatcttattttccttaggttctaagaattttagatccagttacctgcaaagagagttcacctgataatccattttttgagtcttcaccaaccaccttacttgctacaaagaaaaatattggacgatttcatccctatactagatatgaaaatataactttcaattgctgcaatcactgccggggagaactgattgccctttaacagtcaatatgttggaggcatgctaaggtacttccttattacccaagagtcattattatttgggagctggggttcttacaatgctagaaataatatcacttcctatttacataatgtatacacccaaagatattttatgtactagactccagattaccctttcttaataaatatctcagggtaaggaaagaaagaaactgtatagatatatttaaaatagagaatactttccaagcaatacatgatacttttcctaaaagactctaaaagaaaaagattctgtaactctcttttagcaccaaattattgtttatcttgctggatattttatatgaacagtgttaatttagatgcactaaagcaaaggtaggcaaactacaaccatgagtcaaacatggccacacccattcatgtgctattgtctaagctggttttgcactacaactgcagagttgaatagatgcagcagatcctttacagaaaaagttttctgacctcaattctaaagtaattgtagtagggagctggaggactttctttccctttatggtaattttttgagctacaaaagagccttgcagaaatgggtgaagggattaatcttttaaaaataaatgctatctattaggaaaataaaaaatattttagagccaagttaacaagtacttcagcaaaacatgctcgttttatgcaggggattctgtattccaaatggatacaatccgacatatataaaagaaacagattcttaactattgactcttatttagcaaatgcaacagacaagaatatccaacttgatatttataaaaggtagactttttccaaaagtgtataagctcaaagaaaaaatgcaacctgtcaattaatatatactatgtaatatatattattgtgtatttatgattagccatcataaatgcccattgcttggcctttaagaataatcacaaaatatttatattaaattatacaaatttgttgcagaagtgcctgtgagagaaatcttcaaaagacaaacctggtcaaataataataattttaatgtcaatgattttttttgtctgactcatctgagttatatttagttttcaagtggcaataaatttatctaccttctttattgcgactattccttttttcccccagaattagtgctttggtttaggtctttgtctagcttaactacttccaattgattcttcagccttttcttttaggtttacttactataaaagtctcagaagaaagcataaggggaaagcttcgtgacattgtatttggcaatgatttcttgaatatgacaacagaagcacaggcaacaaaagaaaaaatagataaattgaatttcatcaaaatttcaaatttttgtgcattaaaagatgcagtgaaaaggcaacacagagaatgggagaaaatatttgcaaatcatatatctgataactgtctagtgtccagaatatataaagcactcctacaactcaaccaccaaaaaacaacccaataaaaattagcaaaggggctgggcatggtggctcatgcctgtaatcctagcactttgggaggctgaggcagtcagatcacctgaggccaggagttcaagaccagccgagccaagatggcgaaaccccatctctactaagaatacaaaaaattggcctggcgcagtggctcacgcctgtaatcccagcactttgggaggccgaggtgggtgggtcacctgaggttaggagttcaagatcagcctggccaagatggtgaaacccccgtctctactaaaaatacaaaaaattagttgggcatggtggcgggcacctgtactcccagctactcgggaggctgaggcagagaattgcttgaacctgggaggcggaggttgtagtgagcc

SEQ ID NO: 7379 - DNA, 467 bp, Homo sapiens
gccaataagcacatcaaaagatgctcagcataactactcattaaggaaatgcaaattaataccacttcacatccattaggatggcagttatcaaaaaagcaaattataaatgtcaaagatgtggagaaattggaacccctatgcattgtttgtgggaatgtaaaatgttgaaaacagtgtggcagatcctcaaaatattaaacatagagttaccatatggcctagcaattctgcttctaggtagattcccaaaagaaagcagaaactagaataggtatttgtacaacagtgttcacagctgcattattcacaatagccaaaaggtggatgtaacacagtgtccatcgatggatgaatagataaacaaaatctggtatatacatgtgaagaaatactattcagccttaaggaatgaaatttgatgctacaatgtagatgaacctttagaatattatactaagtgaaat

SEQ ID NO: 7380 - DNA, 467 bp, Homo sapiens; identical to SEQ ID NO: 7379

SEQ ID NO: 7381 - DNA, 602 bp, Homo sapiens
ctcttttatccaaccattttatttcactatacaatgttaggtatcctcagggcttgatttagatccccttcttctcccagacctttatccaccacattctcctatttaacaaaactgacagcccttcttccttagtgtctcttaaacttttcagtcccattgcttcaaggtgccatcatttcttagctagattattacaataacctccctttttctgttcttatgtctgcttatgcatactgcttcccccatcccccacactgtgtatagaatgatctctctgaaaggcaccctgcataaaatccttccccatcactttcaggctaaaatacagaaacctttctgttcatattagtgggtcagtctcctgctcctgaattcccttagcattttgtttctcgctctataaagacctataatgtaataacatctttatagtatttgagaacttattttctcctctaaatttataagcaatgttaaggtaagcccttcatctttgcttatcctctaataccaaacaaacttccataaaaatagaaggatctcaaaaactaaattgaaaaagcagtctagttgaaaaatagaggtgctaaagtaag

SEQ ID NO: 7382 - DNA, 299 bp, Homo sapiens
gcaagaagctagagagtgacttaggatacagtgtaaagatagtaaattaaggcagttctgcaagatttttaggacttctttttttcttctattcatcatttatgaagtattcttgctggaaatagtttatgtctctctatcttgctgactgatgaatactcggccaggatgctaaaatgtggtttcatgaagtatgttgtgtttctgtctgttcttgtttccttccttgaaatgtgtaaaagtgaaaaacatattaatcataaatcaagcattcatcataagcctaaaaaaagataaaa

SEQ ID NO: 7383 - DNA, 299 bp, Homo sapiens; identical to SEQ ID NO: 7382

SEQ ID NO: 7384 - DNA, 303 bp, Homo sapiens
gcaagaagctagagagtgacttaggatacagtgtaaatatattagtaaattaagacagttctgcaagatttttaggacttctatttttcttctattcatcatttatgaagtattcttgctagaaatagtttatgtctctctatcttgctgagtgatgaatactcggccaggatgctaaaatgtggtttcatgaagtatgttgtgtttctgtctgttcttgttttccttccttgaaatgtgtaaaagtgaaaaacatactaatcataaatcaggtattcatcataagcctaaaaaaagataaaa

SEQ ID NO: 7385 - DNA, 451 bp, Homo sapiens
acatgaaggtctgcgtattctttcacatgtgaacgtatgtggcacttttccatgatgcaacagcagcgggtctctagctaagctacagcagcagctctaagaggcagaggaccctgaaatgaggctgaaagaaagaatagtccataactgacatcaggcaggctgctgttgtaagcaaagaaaggaggctcacaggggcgcggactcaggccaggtcaggctattgtgggagaacacggagcacacgtgtcagctggaaaggggccggctcaggagacaaaataggcacgagaggaaaccgaaaaattgacatacgtgactatccttgtagaaatgtataaaggtttggattattttgcttatcgagttataataaacttattctaaaaatgtttatgtaaagtattatgtacatttttgttttaccttataaagattatttatatttgaa

SEQ ID NO: 7386 - DNA, 451 bp, Homo sapiens; identical to SEQ ID NO: 7385

SEQ ID NO: 7387 - DNA, 448 bp, Homo sapiens
acatgaaggtctgcgtattctttcacatgtgcacatatgtggcacttttccatgatgcaacagcagcgggtctctagctaagctacagcagcagctctaagaggcaggggaccctgaaacgaggctgaaaaaaagaatagtccataactgacatcaggcaggctgctgttgtaagcaaagaaaggaggctcacaggggcgtggactcaggccagatcaggctattgtgggagaacacggagcacatgtgtcagctggaaaggggccggctcaggagacaaaataggcacgagaggaaacccaaaaattgacatacatgactatccttgtagaaatgtataaaggtttggattattttgcttatcgagttataataaagttattctaaaaatgtttatgtaaagtattatgtacatttttgttaccttataaagattatttatatttga

SEQ ID NO: 7388 - DNA, 550 bp, Homo sapiens
cagggctggatcattccttgttcataattctttatattatttagtgtgtgtgtgtgtgtgtggggttgcatttaggatagtcagtagcatcctggcctctagcctacagagaccagtagcatctcccatcatgacaaccacaaatgtccccagacattgccaaatgtcctctggggacacagttgcctccagttgagaagcactagtttaaatttagaaaacaaattgggaaggatatataacaaattcgtaacagtaccctttgggatatgggattggaggaatggctttcactcctcttttaacataaaatttttaaaactggattttgcctccccctacagacattttttttttattttcaactgtggttttttttcccattttataaaaagattaaccttgaaaggtaatatcacatttcaattttagtcattatggattttactgtggaaggcagttctatacacctatggctgcttttcaacctagttttattggattttgtttgacattgtgaatgtcctttttcccaaagatgtgatagaca

SEQ ID NO: 7389 - DNA, 550 bp, Homo sapiens; identical to SEQ ID NO: 7388

SEQ ID NO: 7390 - DNA, 413 bp, Homo sapiens
cctggctcccatagtacatgttttatgaaggaaactaccagaaatccatgattagagatggaaaatatcagaccaattggaaattttcctttgactctcacctggtctgagcatcttctgtctttttggtacagtgaactactccagattgaaaacatttctgttttctccttgcctggcaagtgagctcagtgaaacatcctattagccacactgcagggttggacattgccacaccaggtcaagggaaagtggcactatgaaggcctgggcagcactgctgctttgagaattacgaggagaaaatctgtgctttaccaaaaagtaaattaaagatcctgcctggtatcagccttgcttgagtgactagtaaaattgcagaatagcttcataggaaaaaacaaaccccagag

SEQ ID NO: 7391 - DNA, 413 bp, Homo sapiens; identical to SEQ ID NO: 7390

SEQ ID NO: 7392 - DNA, 459 bp, Homo sapiens
ctctagcaagtcacagcagtttagggttgacatagcagagttcaaatgtctgacttttctcactgttgtgtacttgttggccaggatgcctcatttgactttgtctcacccatagtcattttcagatccaatggcccagtggcattctggcagctcttttctattcttcattcttggttggaacctgaaggtagtatgctcctctggctttggtctaatatttgaggccactctgccttcctagtatttgtataatatggccccttaagcccctaccgagatggctaggaagtgggagtgaaagttaaggctcttgggatggtgggaggaaagacaattgatttatttttgagcacgtatccaaaataaataaataatatatttataaacataaatgtatatgtctatgtgtgtatgtatgcatttatgtatgtattatatataaaatgatttatataa

SEQ ID NO: 7393 - DNA, 459 bp, Homo sapiens; identical to SEQ ID NO: 7392

SEQ ID NO: 7394 - DNA, 1591 bp, Homo sapiens
agggaggcaaaatgtgtgtatccctgagctggaagttcaaccaggcagatttcatgggcttctttcacacaagaagggtaagcatatttgacatatttgtcagggactggatggtggaaagtgatatttggcagttccttgagttctagaagtacctaaaatgatggtgaaaagaatttatagacagactgcaaaggtggaaaaatagcaaaatctggaagccgatacaagcttgatgctacattttgtctttgtgttacagggcaataaagtgacctaattttgttacaaatgaaaatgtgtattctttgaatacccagttagtataacacctctgaaatagtcatatatacacactccccaagtaaataaatcagactagtaccttccttagtacaagacattaagtttaatggaaaacagaaacaaactttcaccctattttggacatctgccttttctcaaggagatagggcaatttggtatatggagaaagggaaaggaggttgagtgcagggaagcaaggaaatgggggaagagctacacgtttccttctaattacactgtcatgattttgttcacgtagacatgccctttgagggaataaatagagataactaaacctcatctcaggtctgtttcactatcactagtcatattaccaaatgaccgcctggtttaactaaaaactaccagccttctaatgctaaagatgaagtgtccttttgactttttgaggggttgttataaagttatattagcctatgactaatttaagtacaagtaggaaaggagtaagacacaatttccaggtgttgctaagatgttatcttacgtaagtgattcagattaagtttgaggcatgttaaatgtcttccccctagcattttggccttggcaaaattacgtatgcttgtacaagccctgttttcttatttacagcaataccagaagaaatggatgtgactgctttacattaatttctactgatcccatccaaacagataatatcagaagaaatggatgtgactgctttacattaatttctactgatcccatccaaacagatgaacaacttgatgtcttcctttaaaaaaaaaatgacatgtggccttcatagcttttttccttccccttgatgtaaatctcaagtgtttaaaaggaggaatgagtctaaatcatagaaaatctctatttagattgggataagctaattagctattatttattgatcccttgctgtaagtcagaaactatattcgatgctttcaatgtattaaatctgatccttctctcaaccctgcaaagtggatactgtcctaatttttcagttaaggaaactgagactcaaagaggttaagtagcttgccaaagtctcacagctggaaagtagatgagctagaatttgtcctcagatcagccttgctttttccactctaccccactacttcccaatacccagagacaactgagttatgatggggtatggaaagctcccgaaggccagcccctctgggagactccctaatgagtccaccactatccattggaaaataccccagtttctgagaagcaaaaactctaccatgtt

SEQ ID NO: 7395 - DNA, 1591 bp, Homo sapiens; identical to SEQ ID NO: 7394

SEQ ID NO: 7396 - DNA, 6540 bp, Homo sapiens
tgcaaggggaagctgggtctccctatcacggggagtctagggaaagggggaaagtcttccagcctgtgaactttaaccagattcctacttgtgcaagaagcagaagcacaatttgaagttaatagaagctttctcatggagaactttattccgtccctgagctcttctagcaagttgttttggagttgactacgcagtgacgacggagattacccagtcaactatttttgaacgctgaaagggaaaatcacctttaaattgaaaagataattttcagaagagatttgactgtattttgtgctcctcagcattcatgcaaaggtgttcgcagagtacagaaacggagtatgatgactggacttctctgttctctttcaggtttattaatgccagaagaagaatagtacagcccatgattgaccagtcaaatcgagcaggcaagttccaagtagtatctatatttatgtcccacaggcacaaatcctcatcaagttatactccagtagtttcctcatctgataaataagtgcttccaccaggcattctggatttttttttttaatgtccccagaatcccactcaaggaagcaacttcagtaagtggtgctaattggagatttcccaccctgactctactgacactgctttttattttctttctgaattggtaattgggcacaggtattaatgccacaagcagcgtgtttgtgagctctggcattaccccttgcttgtctgcatccaatcattagcacactctcatttttctgttacccacagctccttggtgtatgctaggctttcctttctgtagcatctgctgttaaacttattgtatccattcatttgcttctggctattcataatatcctattaaagcctgacttgctgcattgccaccattattttttattaaagaatattacctttgtataaaatgcttcacatccatgctgctaaaatacatgtgagcttttctcagaattctctcaatttctctaaaacagtttttgtatggtactatcagaaccctcctggtatactccaagtcgttttattttgaaacagacatttcctcagtttactgagggtttgtggtctcctgcaataaggcttatagggaaaaacagttttccttggggtgatgactgctgccactaacaacggtgttaaacttgatggagattttacctgtggcctcgctttaaaggatttgtgaaaattagtcatcctttggcaaaatttccccaataacgccaaaatatgttcccactattggaggctagggagaagaacataaaacaatggaaatattatatttactaagtttatatttccttggtgtgaataaaaaggcaagcttttaattgagtctatttaaccttgtgaaattgtattcaggtttaaaatgtttgtgtaaaatatgaacattttgtattaagccaccagagatggcagcctcagagaatcccaaccaaatggtacattgcaatatttgtatatggggtacccctaacttctccagccttcgtccccctaatcaagagataagtaaaaaagcaagggctgcagaggacgaaccccctgggaaactggccagtgaagtctttcttccagaacatttttaaagctactcacacaccttcactcagtcatcaagacactcagacaaaccacacccccatttgtagagtgccaaccacattgttgctataacgtttcagtgctgcagcgggaacaattgctgattgtttggtatatcttttcttctttctcctctgtgtcctcgaatgaccacaatcaggttttcttcttgatccttcagtgagccaaggagcagcatatagtccagagggtcagcccatggggagctttgtgttggatggtcagcaacacatggggatccggcctgcaggtaggttggctcatcccgcctctgggcttccctgggaagtgccacctgctccaccagcctctccatccactctactatcccactgtcatggtgggtttaacatttgcctgctgcctgctctgcctgctttctttacattgggtgggggaaaaaattcctctttgaaaaagtaaagattttaccacagtaccattatactctgccccatacacatcctttttcttttttctttttaaaccaaggcaataagtgaaaaggaatctgagtttccttctattttttcaccatcaattattgctgattttccggcctcttcttggattttatctcctttctaggacctatgagtggaatgggcatgaatatgggcatggatgggcaatggcactacatgtaaccttcatcatgtaaagcaatcgcaaagcaagggggaagtaagtacagtcgggtgcgatctgtcttcactatcacttcagagactttattttattttttataatttgcccccattttatttttccttgcccataactgcatgcctttccaaactaaggacctgtttttaaatatatatcacccatctctgaagtcacagatgacactgatgtgcacttttgaaaaggccaactgacaagcctgcgtgtgttttaagcaggtgggactgccttttagcctatttactgtggccccaatgtgcacaaacacagacatcaggcagatattggacatttaagaataaaaataatgtcttgggggcaccagttgactgagagaaattaagcaggcttcaatgaagcgataaaaaaaaaaaggaaaagtagaactgtcctttgagtgacataaatctgtcagaatacgattgatgcccaaattatcttatatgcaaagatgaaatgctgcagttcattatgcctagtctagatatatgacagcagtgacaccattgattcttcactagggagtcggtgtgttttgattattttttacatgtgcctactgacttccgacatgagacagaaagacaggaaagtcagtcaataaatttaaagggaaagacatttaggagcaactgaatatgaaggaatggatttttcactgaggctgaatggctgcagttggattaagaaacccattagactttaaagcttcaagtgtttttgacatctgaaaaaaattcagagtctgccaacaagatatatcctttgctgaagacaccagagcataaaaaaattcatataacattgaaacttccttgtttaatgaggctgaatataacaacacgtaccttgattaaatcattctctatatgtaaatagaggccaacattttataggggagctcagggggtcaccacggcacaccattgatgaagccaatttccttccttccttcctttactaatgcagtcaaaaaatgtagaaagcaatgttccctaaaacagctatagagaaaacatttgctcagcttggatagttcttaatataggccatataatttctagcctatttaattacataacatattttatgcttcatgaccaattacattaatagcttaatacagaagaatattatcctctcttgatttgattatgcagccacacaatatggtatatttggtacttaattatcatcatccattgagcaggctgctgtggtagaataaacagagagctgggactatgcaggctgtgttattgtctttagatggttttgccacttctgttaataatggactgcggatctacttaacaaaatgactgcagcatataagcctttagattaccagcttacagtgtcaaaaacatctgttcagcttttcaactgtatgcactggaggttaaatagaggtgaataaagctgtccttttagatccggggatgtgcaacagtaaatataaccttaattcaataaacaggtaacttgtaagagaaatcagaatccttacaattgctgacttcccaccatttaactcataactttgaatgttgcatatctcaattgagaatttctacatttattacattttattcctaatatcaaggcattatttggggggattttcagagataaactaccgggcatgtcatatgacctcacattgacttcttacctttgacctttacaatctcttgggtgtactgctataggaatgcctctaattcaaaaagggggcttcattttaaatacacgtaaaagctcatttcttcaaaatgaatatgctgtaatgttttgtgtaataaatttttcatgaggaaatatagatatgataagatgtcaattttattttattctactatctacaatttttgtccaggtctacaaatgcaacacagaaaaataaatgatctatcaacagttaactgataaaactcgactcaaaatttatattcttattgcatttatcaaagaaatgtactgaataccattttgaaaaacagttccactttatgacatttagttgcattaaatatttagttctgttgtgttgcattatactgctgtgcgatgaaattaaatgcaaactacaatttgaatgtctgcaaacattggcaagaatctgcagctaaatttaggtataagatttgcagtgtctgttgttttttttttttttttcttttcatctttgatgggtaaagtataaaaatgtttaggaatttgacccgctttctttttccctctctattttcaggtttgcagagcatgccaggggactacgtttctcagggtggtcctatgggaatgagtatggcacagccaagttacactcctccccagatgaccccacaccctactcaattaagacatggacccccaatgcattcatatttgccaagccatccccaccacccagccatgatgatgcacggaggaccccctacccaccctggaatgactatgtcagcacagagccccacaatgttaaattctgtagatcccaatgttggcggacaggttatggacattcatgcccaatagtataagggaactcaagggaaaaggaaacacacgcaaaaactattttaagactttctgaactttgaccagatgttgacacttaatatgaaattccagacagctgtgattattttttacttttgtcatttttcatcaagcaacagaggaccaatgcaacaagaacacaaatgtgaaatcatgggctgactgagacaattctgtccatgtaaagatcctctggaaaaagactccgagagttataactactgtagtataaatataggaactaagttaaacttgtacatttctgttgatcacgccgttatgttgcctcaaatagttttagaagagaaaaaaaaatatatccttgttttccacactatgtgtgttgttcccaaaagaatgactgttttggttcatcagtgaattcaccatccaggagagactgtggtatatattttaaacctgttgggccaatgagaaaagaaccacactggagatcatgatgaacttttggctgaacctcatcactcgaactccagcttcaagaatgtgttttcatgcccggcctttgttcctccataaatgtgtcctttagtttcaaacagatctttatagttcgtgcttcataagccaattcttattattatttttgggggactcttcttcaaagagcttgccaatgaagatttaaagacagagcaggagcttcttccaggagttctgagccttggttgtggacaaaacaatcttaagttgggcagctttcctcaacacaaaaaaaagttattaatggtcattgaaccataactaggactttatcagaaactcaaagcttgggggataaaaaggagcaagagaatactgtaacaaacttcgtacagagttcggtctattaattgtttcatgttagatattctatgtgtttacctcaattgaaaaaaaaaagaatgtttttgctagtatcagatctgctgtggaattggtattgtatgtccatgaattcttcttttctcagcacgtgttcctcactagaagaaaatgctgttacctttaagctttgtcaaatttacattaaaatacttgtatgaggactgtgacgttatgttaaaaaaaaaaaggtgttaagtcacaaaaagcggtaataaatatttcatttttgattttttgttaggcttttgcgtttttaatggttttaggacaagactgcacaatgccaactctatacagtgttaaaagtaggtttttccccccagcagttgagtatattttaaactcatcaataatttttaaggtaatcatctatagcctttcaatgtctatttgacctataagttccaccagcagaaaacttctaaaggtacgaaactatgtgtacatgatgagccaggttgaaagatccccttgaacatgctcaacctcctttttagatgcatgacgttaaaaaatatatactttcagataaagcttttcatgggcatcctctgccagaataaaggacttttcagggttaattttacaacataagaaataatgtctgtgctcaaaggtaatttatctgcctgtgtttttcctctgcctgtcttactacaatattgttggatatgtaaatgaaaatttacatatgggtgttcatagataagtaaacaacttctatggagtttgaaa

SEQ ID NO: 7397 - DNA, 271 bp, Homo sapiens
cattaccttgctctcccccacccccaaccccatgataacacagagaagtgatagatttgtccaatttttataatgctttttttacaccaccccggaaggcacttgctcctatctcgggtttactatttagtgtaaagagttccgatttgggtatatttaagaaagactcagctgtcaaaagcaaagaaactgggaatggtgttttgacaaccatatagtgttaaaggaaatactgtagtctgaataaaattgcttatgttctccaaaacaa

SEQ ID NO: 7398 - DNA, 442 bp, Homo sapiens
tgaacatccagtccatgccatggtaactagttgaaaatgttatactggagtggcatttccaagttcagtgcttctataaagacctgctagctcacagaatgcttttttaatgttctgcattgttgtgtgtcccccattgaacaaccttttgagcggacctcgtttttactaatgtaaacattctgactagtatccaaagaaatgacctttgagtgaacctctaaccttccccgtaagtatttgtttgaagacagtgtggagttctcctgctgagaactaagaaccatgatgccttgcagctctgtgagtaagggagtgtttgggggaactggagagaaagacataaataagggaacaacctccagatgtaaagaataaaagagtgaaattaaaaagggaaaaaaatagcaattcgttttacccgaagagttagcctataccg

SEQ ID NO: 7399 - DNA, 2846 bp, Homo sapiens
agcagtgagtgcctgtggtcccagctacttgggcctgaggctggaggattgcttgagcctagaagttgcagtgagctatgatcatgccacactgtactccagcctggatgacagagtgaaaccctgcctctaaataaaagaaaatagaggcagactgtggtggctcacgcctgtaatcccagcactttggtaggccaaggcgggtggatcacctgcagtcaggagttcacaaccagcctgaccaacatggtgaaaccctgtctatactaaaaatacaaaacattagccacgtgtggtggtacacgcctgtaatcccagctactcgggaggctgagtcaggagaatcacttgaacctgggaggcggaggttgcagtgagctgagattgtaccactgcactccagcctgggtgacagagcaaaaccctatctcaaaaaaaaaaagaagaaaaaaatagaaaatccaaaaagaaaaaccagaaggcctgctggcgtataaatccctgggcgggtttctgataaattgccctgtgctgtcagcccctgcactgcactgctgccttccatggtgggtgggagaccccagagcggggcaggcgccactgagggcttttcttggagtcggccagcaggccacgcagcatccggcaccctgggcgggctggctagctgccttcttaggacatctctactttgaaggattttaccgcaggaagcaatagcagcgctggccattggtgctgatgacagcattgggtctggttgaggggaaggggctggaaagcagcagacccccccagtgctgcgcatggtcccggagctgtcagccaggggagtggggtcagccgtcagccagccctcccgtttcccgcccatgggccctgaccacactcccttttctagaagtcaatcctaaggtttctctgctctggctaagaggatgtaaatttggattcttagagggcatggcacccccagtccctgcccagataaagtagcacagtggcatgcagcacctctgtctgttgctgacgttggggggcttacacacccacctcatctccgtgcacagccatgactggccctgccggcagctggggtgcaggtaagggtctctctcatagaggggagctgcagctgagaactggcgaggccccttcctccaaggccctagctggcccccgggtgaacctgaggtggcaggttcaggttttcaagatggtgaggtctcgctgtctgctggacagtacgttaggctctcagaactcatgggtgtggagctgggcctgtcccgggccagtggacccctgtgtgtgggggatttggggtgctgtgggcctggttatgcactggcagatggaccttgctttggtccagctcttttccttaccctggctctgacgtgggaaggcttggagggcccgtctcatcacccccgttcgccctcagctgtccctttcccttgtcgcctggccgctgcctcgcccgcctgaggcctcctagcaggcagcctgggtgtgagttgagcctctctcttttccctctggtgggaaagtggcctttccctcaacacctgctccccggccccagaggaacccacctgttttggagctcagcttggcccagcgtttccttggggaagggaaaggagggctggacagcactgatccgggcaggcagcgtgtgcagcagtggccagccagagtgccaaagatgcacggggatgtggtgtgtggctccgggccctcgacatctctgctttgggggatttttaccttgtctgcacacttgtcaggggagaggggacagcaaggtgggaggttgaagagctttgaggctcagcagcatgtttgtggcattcggtggacaccatggccttgggcggctggacaggtttttgtgatgtgagggacacgcatggggcacatggtaagcttggcaagggctccaggaacgctgacgaagggttttaggacccccacccccatgcctgtaccagggctggcctccagagcgggtgaggacagagcagctgtgggcttttcattctgaggtcttggcccccctggccaccgcaagggactctttgcttgtcagggcttgcaaaaaccaaccttcgagaaagaaaagggaactcttcacgttgaatgttgactttgtgtgtatgcgtgtgtgtgtgtgtgtgtgcacgcgcgcgtgtgcgtgttgacttcatggaattttgttttgtgaaattcccctccaatcgtgtcagaatttacctccatgccccagtcacactgttggttctgcgctctgaacctgggtgtagctcatttgaaggactctcttctgcgtttcctaacagttatttggtggtctcaagagttgaggttgtggagggttgggagaaactgaagttctatacatttccatagagtttacatcctgcagttaaaaggcagggagggctcagcccgggccccacagctccaggccatcccctacgggctgcccacagtgcccccttttctctagccgaatctttttcgaacagcccgggaaaggaaaacggattcacttgctgattttgttcacggcggaagcaccatgttccgttcctttttcaggttcagtttgttgtgtaaatggcggttttttctggtgtgagctttggtgatggtggcagggctcctttgaagagatggttccacctcgtggtctgaagaacaaaccagagaagagtctggtttggccagaggccccctccggtccacgtcaccctgagtacacccctctgattgctctgctgtcaagaagcacgtttccaccagctgtattcaacactacaatgcttttttaaacaaat

SEQ ID NO: 7400 - DNA, 857 bp, Homo sapiens
aattccaccaaggccagaagggaaaaaggaagaacccaccgtgtctggctgtgcgggccctggggagggtcgtgagtgcagcccctctctacttccgtgcctttgtaaaacgtgtagataaccgcagtggttggctgagccaagaactctcctaaatcagtggctttctccccaccccttgctggggagtcatttttaaaaaaatctgtgggatataaaattggcctcctgctgcttcagcctacctctccctctgctgacttaatgtcgtgattctgtttcttcagatatttaaggctgttaggatgtgtgagccttgaagtgtgtgtgtgtgtcccagcgactgtccactgtccaggagatgcatgtctttgtattggagatatttctgttactcattctcttggtgctcacgattgccatggccatagggccacagtgccgtatctgctgcagacatgattgtttcttgttctagaggttttcttgttttcgaatcttgcctgatgaatccagccagaccaaggggcctagatttgacctctgtcctgggctcctgggccaggtgcaggaacatctgaggccactctgctggccacctccagtgggtgctgaccacaggatgggctttgtttacactcattttcaccctgattcttgcccccactttcataaaagaaacttcaaaatgctgacgctttggagagtaagaaaatcaatcttggctgggcacggtggctcctgcctgtgatcctagcactttgggaggctgaagctgaaggatcacttgagctcaggagttggagaccaaccctggcaacataacaagaccctgtctctacaaaaaaaaaaaaaat

SEQ ID NO: 7401 - DNA, 2846 bp, Homo sapiens; identical to SEQ ID NO: 7399

SEQ ID NO: 7402 - DNA, 857 bp, Homo sapiens; identical to SEQ ID NO: 7400

SEQ ID NO: 7403 - DNA, 1536 bp, Homo sapiens
gtggtgggcgcgccgtgctgagctctggctgtcagtgtgttcgcccgcgtcccctccgcgctctccgcttgtggataactagctgctggttgatcgcactatgactctggaagaagtccgcggccaggacacagttccggaaagcacagccaggtgggtttcagggcgctgagaaagccgctggtcggtcggcgaccgtcagggttttccagggtgggaatccgcggggtaggaggggagcgcgggggtccgggcgccagatcccggttggagagccggggtgcaggcgctgagccgggattggagtgtggttggagttggggagccaagggtgtgtgccggtggccggggctggggtctccgccgcgccctccggccggctcccgctcactgcgctggctcctccgcaggatgcagggtgccgggaaagcgctgcatgagttgctgctgtcggcgcagcgtcagggctgcctcactgccggcgtctacgagtcagccaaagtcttgaacgtgtaagtgtagacgcggcccaggctgggagacaggggcgggggtgaatggcgaggagactggcggatgggaggggtggcggcgggagaactcggctagccggttctgacctaggtccccgccttgccctcgcagggaccccgacaatgtgaccttctgtgtgctggctgcgggtgaggaggacgagggcgacatcgcgctgcagatccattttacgctgatccaggctttctgctgcgagaacgacatcgacatagtgcgcgtgggcgatgtgcagcggctggcggctatcgtgggcgccggcgaggaggcgggtgcgccgggcgacctgcactgcatcctcatttcggtgagtacagtcccgtcctgtccccgccccagtgtcgttcccgcctcggcccgcggccagccaggctgaccctgctctctctccgcagaaccccaacgaggacgcctggaaggatcccgccttggagaagctcagcctgttttgcgaggagagccgcagcgttaacgactgggtgcccagcatcaccctccccgagtgacagcccggcggggaccttggtctgatcgacgtggtgacgccccggggcgcctagagcgcggctggctctgtggaggggccctccgagggtgcccgagtgcggcgtggagactggcaggcggggggggcgcctggagagcgaggaggcgcggcctcccgaggaggggcccggtggcggcagggccaggctggtccgagctgaggactctgcaagtgtctggagcggctgctcgcccaggaaggcctaggctaggacgttggcctcagggccaggaaggacagactggccgggcaggcgtgactcagcagcctgcgctcggcaggaaggagcggcgccctggacttggtacagttgcaggagcgtgaaggacttagccgactgcgctgctttttcaaaacggatccgggcaatgcttcgttttctaaaggatgctgctgttgaagctttgaattttacaataaactttttgaaacaaact

SEQ ID NO: 7404 - DNA, 210 bp, Homo sapiens
gcagagggagggcatgctgcccagtgctagggtagaacttgagcctggctcctacttttctccttttaggaagattttaaacttgcaaaacaggagcatacttgagataagacagtgcagcagctgaagtcttgccttccaaggcgataacagtgacctgtgcctcccctccccctcctcggccctcctccccctccctcctacagctgc

SEQ ID NO: 7405 - DNA, 549 bp, Homo sapiens
gaaaagaaaagaaaagtttaatagttttaaaagagtaatacctatattccaatcacttaaaattaacatattttatccaatcaaggcatatcatcattttatacatcaagaaagaaaagaaactagcgaacaaacggggcataatgccgcctggctccgcttccccctcccctctccccccgtccttaggagacacctctggagttcagaaatgctaggagagcaagctcttcattcttagaatccaggaagggccgggcttttgcagctctcctctgccaggaagccgctggggggcgcaagacgccagcttctcaccttggcagaagtgcctgcctgcaagcgcagaatggaaacttccccataacaaattcagaagtaccttgtacattcaccacccacctgaagaaagcctgaatgaaaggaacaaagccacggcgttgtttactttcccattatcgccccagtcttgcggcagggcccgggtttccatccaatccacccggcccgccactgtcctggccagtctccaaggcttcacccaaaaaa

SEQ ID NO: 7406 - DNA, 3610 bp, Homo sapiens
gcgccgggagaggcggcagcgcagccggacgcacagcgcagcgggccggcaccagctcggccgggcccggactcggactcggcggccggcgcggcgcggcccggcccgagcgagggtggggggcggcgggcggcgcggggcggcggcgagcgggggccatgcaggcgcgctactccgtgtccagccccaactccctgggagtggtgccctacctcggcggcgagcagagctactaccgcgcggcggccgcggcggccgggggcggctacaccgccatgccggcccccatgagcgtgtactcgcaccctgcgcacgccgagcagtacccgggcggcatggcccgcgcctacgggccctacacgccgcagccgcagcccaaggacatggtgaagccgccctatagctacatcgcgctcatcaccatggccatccagaacgccccggacaagaagatcaccctgaacggcatctaccagttcatcatggaccgcttccccttctaccgggacaacaagcagggctggcagaacagcatccgccacaacctctcgctcaacgagtgcttcgtcaaggtgccgcgcgacgacaagaagccgggcaagggcagctactggacgctggacccggactcctacaacatgttcgagaacggcagcttcctgcggcggcggcggcgcttcaagaagaaggacgcggtgaaggacaaggaggagaaggacaggctgcacctcaaggagccgcccccgcccggccgccagcccccgcccgcgccgccggagcaggccgacggcaacgcgcccggtccgcagccgccgcccgtgcgcatccaggacatcaagaccgagaacggtacgtgcccctcgccgccccagcccctgtccccggccgccgccctgggcagcggcagcgccgccgcggtgcccaagatcgagagccccgacagcagcagcagcagcctgtccagcgggagcagccccccgggcagcctgccgtcggcgcggccgctcagcctggacggtgcggattccgcgccgccgccgcccgcgccctccgccccgccgccgcaccatagccagggcttcagcgtggacaacatcatgacgtcgctgcgggggtcgccgcagagcgcggccgcggagctcagctccggccttctggcctcggcggccgcgtcctcgcgcgcggggatcgcacccccgctggcgctcggcgcctactcgcccggccagagctccctctacagctccccctgcagccagacctccagcgcgggcagctcgggcggcggcggcggcggcgcgggggccgcggggggcgcgggcggcgccgggacctaccactgcaacctgcaagccatgagcctgtacgcggccggcgagcgcgggggccacttgcagggcgcgcccgggggcgcgggcggctcggccgtggacgaccccctgcccgactactctctgcctccggtcaccagcagcagctcgtcgtccctgagtcacggcggcggcggcggcggcggcgggggaggccaggaggccggccaccaccctgcggcccaccaaggccgcctcacctcgtggtacctgaaccaggcgggcggagacctgggccacttggcgagcgcggcggcggcggcggcggccgcaggctacccgggccagcagcagaacttccactcggtgcgggagatgttcgagtcacagaggatcggcttgaacaactctccagtgaacgggaatagtagctgtcaaatggccttcccttccagccagtctctgtaccgcacgtccggagctttcgtctacgactgtagcaagttttgacacaccctcaaagccgaactaaatcgaaccccaaagcaggaaaagctaaaggaacccatcaaggcaaaatcgaaactaaaaaaaaaaaatccaattaaaaaaaacccctgagaatattcaccacaccagcgaacagaatatccctccaaaaattcagctcaccagcaccagcacgaagaaaactctattttcttaaccgattaattcagagccacctccactttgccttgtctaaataaacaaacccgtaaactgttttatacagagacagcaaaatcttggtttattaaaggacagtgttactccagataacacgtaagtttcttcttgcttttcagagacctgctttcccctcctcccgtctcccctctcttgccttcttccttgcctctcacctgtaagatattattttatcctatgttgaagggagggggaaagtccccgtttatgaaagtcgctttctttttattcatggacttgttttaaaatgtaaattgcaacatagtaatttatttttaatttgtagttggatgtcgtggaccaaacgccagaaagtgttcccaaaacctgacgttaaattgcctgaaactttaaattgtgctttttttctcattataaaaagggaaactgtattaatcttattctatcctcttttctttctttttgttgaacatattcattgtttgtttattaataaattaccattcagtttgaatgagacctatatgtctggatactttaatagagctttaattattacgaaaaaagatttcagagataaaacactagaagttacctattctccacctaaatctctgaaaaatggagaaaccctctgactagtccatgtcaaattttactaaaagtctttttgtttagatttattttcctgcagcatcttctgcaaaatgtactatatagtcagcttgctttgaggctagtaaaaagatatttttctaaacagattggagttggcatataaacaaatacgttttctcactaatgacagtccatgattcggaaattttaagcccatgaatcagccgcggtcttaccacggtgatgcctgtgtgccgagagatgggactgtgcggccagatatgcacagataaatatttggcttgtgtattccatataaaattgcagtgcatattatacatccctgtgagccagatgctgaatagatattttcctattatttcagtcctttataaaaggaaaaataaaccagtttttaaatgtatgtatataattctcccccatttacaatccttcatgtattacatagaaggattgcttttttaaaaatatactgcgggttggaaagggatatttaatctttgagaaactattttagaaaatatgtttgtagaacaattatttttgaaaaagatttaaagcaataacaagaaggaaggcgagaggagcagaacattttggtctagggtggtttctttttaaaccattttttcttgttaatttacagttaaacctaggggacaatccggattggccctcccccttttgtaaataacccaggaaatgtaataaattcattatcttagggtgatctgccctgccaatcagactttggggagatggcgatttgattacagacgttcgggggggtggggggcttgcagtttgttttggagataatacagtttcctgctatctgccgctcctatctagaggcaacacttaagcagtaattgctgttgcttgttgtcaaaatttgatcattgttaaaggattgctgcaaataaatacactttaatttcagtcaaaaa

SEQ ID NO: 7407 - DNA, 107 bp, Homo sapiens
tgttctttctttttgtctgctttcccccgtttgcgcctggaagctgcgccgcgagttcctgcaaggcggtctgccgcggccgggcccggccttctcccctcgcagcg

SEQ ID NO: 7408 - DNA, 2503 bp, Homo sapiens
gtcactaagcctcccagctcggtagacatggaagaaaaggtgtccttcctgcattatagaaaaagcacagatatgccagatgtgtgcttcaggcctggttcttgatgtgttaattgacgctaacaggttttagatgattcgtttcatttctaacagaaccagttgttcaaaactattgtcttgtttccagtgccaaagctgtggatattcaatgatgtttatcactctccccctgccgctgcagtcctaccctgcactgctaatcctccctcagcaaacagatgcccctggaacaatgtaggggtgagcacaaagaaattcaggagaagaaagtacactcatgtaattcaaaattgttatctctatcataagattagtaaaaagcctttgttcagattttttattgtgagcagtgttgtattttttgttattgtttcaagggataggttgatattttgatatcacttagaaccgagtcggtaaactacatatttatctttgattaactaagattctgtttttaaagaaaagaggacatctttggctagtaatgattaggtaacagtgaatggcaggtgccatatggatccttggagcacagacggacatcaaccagcaagtatttctcagattctaccctaaaatagtgacagtatgtcaggtgtggactaatatatgtaatagctttcaaaaggaactgaacaactagcaagtaaagagtaatttatattaaaagatcccaataatagatggactatggcaagaacctctgaactagtctctctgcttctactctacctctttacagtgtattatctacactgcaatcaaaatcttccttccaaatgtaagtaactgttcaatggcttcccatgggactcggaataaaagctcacactctttacaatggccctgcaggttcctcatctcctacctccagcatcttcactgtccctctgctccaaccacactgcctctttcttattcctccagacctcccaacacagccctgcccccaagacccttccaatgactctgatcctcttccctgcgctacccagtgtctcactccatcgattcctccacatcctgccaaatgtcacctaaccagaaaggctttgttgaaccaccccagataaaataaagtcccctgcctttacccatcactctctcttgcccggtttaattctttctagcacttacattgtgataatttcttttctgcctcctgcctcttttcattggaaaatatattacatgagaggaggtttgctttattcattgctgaatgttcagcacctagaataatacctggcacaaaataggtcctcaattattatacccaattcctcccagttctcttggaagtttctccattttaccattgaaaattccacatccttgtgattcactttgtcccagtgaattccaaacagttggccatcctacccttaatagatagttgttgaatgaaggaaaggaatgaagaaaaaagaatgaggacagggaaggagggaggaatctaggacagaaaagaagggagagaggaaaaaaaggatgttaatattttcttgttctatatgtagaaagcaaaagagtatttttgtaatcttttttcagcaaatgcctggatcaaattcaatatgattttaaagccatgagaccctctcattcttggttttgatgttgcacggtatcataatacatctgattggaatttcaatatcaggtttaatatactatgcaagctggtataggctctgaaattatgcatattcatgagagcaatcacacccttacttttgatataactggcaaagtaaggtaccacaagagaacaataatcaaagaaaaagggaggactaccagttgttatttacttatgacattttactggaaaaactcaagcaacatgaaagactatttctaaatgaagtactaaaactaacaagacaatgttataaagtgtcatattttctttccttttatacaataaaacattgaaaagctccaccactatgcagccacttcaccagatgcaataatatccaaatgtgaaagtaattaataatattgtagttttaattcccttggtatttcagagatatcctttgaacagcctaaatcaaatcatactggtacttatgagaaatagatatctcttgtgagtccttatattgtgcttcccaagaacctacagtgcatttcagttatttaccttgaaaattcttcagcccatccagagtgggtttggaaatttgtaatcattttgtagaatgtgataagggaggacctgtcttcctaaattctcaagcttggaattttcaagtcagtgtcaggaccataggctctctaatgcatatatatttgccctgagcaaataattatttatctctgtgcttcggtagttgcatctgtatgttaaaaataagattattgctatgttgatttcttatgacatgagagaagaggctttaaaaattaaagaaaagaagaaaacact

SEQ ID NO: 7409 - DNA, 2504 bp, Homo sapiens
gtcactaagcctcccagctcggtagacatggaagaaaaggtgtccttcctgcattatagaaaaagcacagatatgccagatgtgtgcttcaggcctggttcttgatgtgttaattgaggctaacaggttttagatgattcgtttcatttctaacagaaccagttgttcaaaactattgtcttgtttccagtgccaaagctgtggatattcaatgatgtttatcactctccccctgccgctgcagtcctaccctgcactgctaatcctccctcagcaaacagatgcccctggaacaatgtaggggtgagcacaaagaaattcaggagaagaaagtacattcatgtaattcaaaattgttatctctatcataagattagtaaaaagcctttgttcagattttttattgtgagcagtgttgtattttttgttattgtttcaagggataggttgatattttgatatcacttagaaccgagtcggtaaactacatatttatctttgatcaactaagattctgtttttaaagaaaagaggacatctttggctagtaatgattaggtaacagtgaatggcaggtgccatatggatccttggagcacagacggacatcaaccagcaagtatttctcagattctaccctaaaatagtgacagtatgtcaggtgtggactaatatatgtaatagctttcaaaaggaactgaacaactagcaagtaaagagtaatttatattaaaagatcccaataatagatggactatggcaagaacctctgaactagtctctctgcttcttctctacctctttacagtgtattatctacactgcaatcaaaatcttccttccaaatgtaagtaactgttcaatggcttcccatgggactcggaataaaagctcacactctttacaatggccctgcaggttcctcatctcctacctccagcatcttcactgtccctctgctccaaccacactgcctctttcttattcctccagacctcccaacacagccctgcccccaagacccttccaatgactctgatcctcttccctgcgctacccagtgtctcactccatcgattcctccacatcctgccaaatgtcacctaaccagaaaggctttgttgaaccaccccagataaaataaagtcccctgcctttacccatcactctctcttgcccggtttaattctttctagcacttacattgtgataatttcttttctgcctcctgcctcttttcattggaaaatatattacatgagaggaggtttgctttattcattgctgaatgttcagcacctagaataatacctggcacaaaataggtcctcaattattataccccaattccttccaattctcttggaagtttctccattttaccattgaaaattccacatccttgtgattcactttgtcccagtgaatttcaaacagttggccatcctacccttaatagatagttgttgaatgaaggaaaggaatgaagaaaaaagaatgaggacagggaaggagggaggaatctaggacagaaaagaagggagagaggaaaaaaaggatgttaatattttcttgttctatatgtagaaagcaaaagagtatttttgtaatcttttttcagcaaatgcctggatcaaattcaatatgattttaaagccatgagaccctctcattcttggttttgatgttgcacggtatcataatacatctgattggaatttcaatatcaggtttaatatactatgcaagctggtataggctctgaaattatgcatattcatgagagcaatcacacccttacttttgatataactggcaaagtaaggtaccacaagagaacaataatcaaagaaaaagggaggactaccagttgttatttacttatgacattttactggaaaaacttaagcaacatgaaagactatttctaaatgaagtactaaaactaacaagacaatgttataaagtgtcatattttctttccttttatacaataaaacattgaaaagctccaccactatgcagccacttcaccagatgcaataatatccaaatgtgaaagtaattaataatattgtagttttaattcccttggtatttcagagatatcctttgaacagcctaaatcaaatcatactggtacttatgagaaatagatatctcttgtgagtccttatattgtgcttcccaagaacctacagtgcatttcagttatttaccttgaaaattcttcagcccatccagagtgggtttggaaatttgtaatcattttgtagaatgtgataagggaggacctgtcttcctaaattctcaagcttggaattttcaagtcagtgtcaggaccataggctctctaatgcatatatatttgccctgagcaaataattatttatctctgtgcttcggtagttgcatctgtatgttaaaaataagattattgctatgttgatttcttatgacatgagagaagaggctttaaaaattaaagaaaagaagaaaacact

SEQ ID NO: 7410 - DNA, 299 bp, Homo sapiens
aatgcagcatttttttttttttttttttttttttttggagaaggagtctagctctgttgcccaggctggagtgcagtggctctatctcggctcactgcaagctccgcctcccgggttcacgccattctcctgcctcagcctcccaagtagctgggactataggcgcccaccaccacgcctggctaattttttgtatttttagtagagacggggtttcaccgttagccaggatggtctcgatctcctgacctcaagatccgcctgcttcggcctcccaaagtgctgggattacaggcgtg

SEQ ID NO: 7411 - DNA, 284 bp, Homo sapiens
gcagcattttttttttttttttgagatggagtctagctctgttgcccaggctggagtgcagtggctctatctcggctcactgcaagctccgcctcccgggttcacgccattctcctgcctcagcctcccaagtagctgggactataggcgcccaccaccacgcctggctaattttttgtatttttagtagagacggggtttcaccgttagccaggatggtctcgatctcctgacctcaagatccgcctgcttcggcctcccaaagtgctgggattacaggcgtg

SEQ ID NO: 7412 - DNA, 13460 bp, Homo sapiens
gcccggccgcccgccctcgggcctccccccgggccctcggtcccctcccccgctggcggggcccggacagaagatggtgcagaagaaaccagccgaacttcagggtttccaccgttcgttcaaggtgaggcccggggtcggtttgggggcgctccgggctggaccaccggaatggccggcgtggggggcgcggggcccgcccctaagatcggctcccggggctcgtgcctggcccccgccctacacccggggctgcccgggccggccgtgcgctgaagcggggtcggtgtgcgaggatgggggttcagcaggccacagtcctctctccagccatggccgccgggtccttcctccaggacccccaagtgaggctgggagcaggagccccctccgggtcagggcaccaggctgtgtgtcccctgcaagcccccgccgggtatgttctggggggtcagcaggctgcagtcctgtcccagtcgctgcatgtggcttatggggggtgtcccctgcaagctccagctggttgtgccctggtggggacgggtcagcgggccacagtcccattcccacctccatgtggcttctggggactttctttcagaatccccaggccgggctggtcaggtgcacccacccccagggggcctgtgccgtgggggaggggatgggatgtcccctcagccctgcacttcgcagacaccccaggcccaagtgctgtttcctgtcggagcgggaagtttctgcgcagcccgggtggtgactgctgttgagtgctggtttcagatgagcaaatcttgggggggaaggggagggcaggtgctgggcaggggccccgcaggacctggcccaggggacgcagtgatgtcagccggcccgccccacccctcaggccggggttatgtaatcgcttcactgggcttccttgggcagggacctgttgcccggtagggaaggcaggactggagagaggaagagagagtgtgagtgtatgtgtgtgtgtttgtgtgtgtgtgtgtctctgtcttgtgtgtacacacaacgcggtgctccagggtgggaggagcaaagagagactgggaagaattcccaggtctgtccagccagtgccccagggcagcactccacccctgccacccctgcccagttttcccctagggcagcaggcctggcaccatcagagtgtcaggggctgggcgggaaagaggaggacctgacagtggtcttctccctcctagggccaggcatgagctgatacagagtcagtgcatggggccagccaggcagctaaagcacacttgaactttctagatggttccagccacctcctgccaaggcctgctgactcgagtcccacagccagacctagaacagtgggaccaggaccgcccacactgcccaggattgtgggccggcctctgtgcatggccagggcagcctggctgggagctgggaaggtgggcgtcttggtggaggagggcctggcaggcagtcctggctgtgaggtgttcctccaggtggccgggaccggttgctctaggaatctccccccacagcccccaccatgcacggctgctccctggattggggccacctctcctgaaatactctccttgcctccagcaggcagcagcccagcagggaggcacgtctgtgggtgccttgggtttctttccgttcgcagatgggaaagtgaggctctgagactgcaggcgcgtgtgcctggggctcccctgtacacgggcgaggaggccgcggagtctcgtggtgcctggcccctccgctgtggtggctgcggccgtccatctgtagctttgctgagttggaggctgtggctggcacaggggaacggtggccagacagggccaggagctcacgctgggctctgtggccccttaggtcatttcactctcgtgagctcccacgagttgggggcagctgcctcccgtctcaccgctgacagaccccagggtgaggtcactaggccaaggtcagacagcaggtgaactccagtctggccttagaccctggtcacctgccttgtggtggctgccccagggccaccaggggcctctggacaggagccttatgggaatgctgactcccatgggggctagttggagccccccccttccttccctcctcccccagcagcctcctggtagctatctgcccgagccagggtgggtggggaggcaggagggcagcttggctcacggcccctcccagactctgccctctggcctccacccatctcctggccttgggtctcccacgggctccactggagtctcacttctgctgaacgaccctcttgttagagccccactcaggttgtctggggcccagagaggggcagtgacttggcccagagcagccagcatcctcactgggactgggacccccgccacctctgtgggcccctcccgcctgggttcacccagacgggtgaagctgagtgagagctcagtggtacaaggaacctgaccgggcctcggttccccagcttcaaaggcccggcccctcgtaaagggccggcagtccctgcgctgggccatttgctctgtggaaacgtacatatgtatgccaccatcttccacgggggctgggcaaagcctactctaatctgcactgttccttgcaccctggtcagggtcttgctcccatggtcctggggctgggtcaagaaatgacccagccccagcctgcccagtgcaacaggcctggatttgaatcctggcccccagggcccaaggcggcttccttagccgggtatcagggcccaccaggggctccctccaggggtgtctggcactgaaatgggagagtgcaggatgtggtctgggcagggcctggcacactcgcgcctgtgggtgcctctcccgtgagcccccaggaccagtacagcactgtgtatactgactcggtaactggtagctgcggggttggggggctggaagcagatgagcctctggtgggtggcgggggcgtaggtgcacagagctggcaggggaaaggtgtgccgggcagctgcgggacatgggcggaggaatgcaggtgtctgggcttgggtaggggcagaaggcaggggtgatggaagcagagcccccaccttcagcaggccccagagcaccaggcactgaattcttaccccgccagccccaggcactgagcgaaagggaggggagcagcttaggggaaggagaggtggttgtgtgccatcttagatgggggaaactgaggcccagggaggactcagctgccctgagatggcccaggaggccgtgggaaagcaggcacagccaccaggctggcagcccgcctagtgactcacctccttcccactgccccgctgcctttgatccccgcgacccgccccagaggtcagccgtccccattctgtggacaagcagacggaggtgcaagacacggcttgggccccacggtgactcaatcctggcatcagaggcagggttcccaagagccagctgcttgtgtctgtcccctccccgcaatgcacccctttcccagaggcccccagggctctgcaggtgggaggaggtcttccccacggccctgtggaggttggggcccatctttctctggggtggggctgtcctgggcactgcagggtgctgagcagcacccctgccccaccccactccgtgccaggagctcccccaaccggtcacaaccacagatgtccccagacatggcccagtgtctcctgggggacagaatcaccccctgggttggcaaattccatggaccccctaagagactctgcgtcccctgatcttgccttgctgaggtgctaggaggcctcacgccttccacatgtggcccacacctgtgatcccagcactttgggaggccaaggcaggaggatcgcttgaggccaggggtttaagaccagcctgggcaacgtagcaagactttatctctacaaaacataaatttaaaaaagagagaaatccacacacacactgagtgtggggcagcgaggaggtgaatcccaggagcttgggggtcccctggtttatgctgtctgccccttcgggagttgatcctggtgggagttgatcctggtgtgtgagcggggacggagttgatttttccgtaatgctcagcgcagggcttgtcagtgtggacgctgcgacactggggcaggataggtctccctgctgcgtgggcagggatggggcctgagtgcctctcctctcctctcccctgcaggggcagaaccccttcgagctggccttctccctagaccagcccgaccacggagactctgactttggcctgcagtgctcagcccgccctggtgaggggcccgagggggaggagggcacagggcagctgctgtcgctgccatggcagtggccagcccctgcaggggggtgggggccggccggccagggccatgtcctgagccccctgggcgtgcctcctggaacagacatgcccgccagccagcccattgacatcccggacgccaagaagaggggcaagaagaagaagcgcggccgggccaccgacagcttctcgggcaggtttgaaggtgagcggggatggcgggcattgggggagccgggagcggggaaaagccagggtccctctcacgcccgccccgctgcccggcagacgtctaccagctgcaggaagatgtgctgggggagggcgctcatgcccgagtgcagacctgcatcaacctgatcaccagccaggagtacgccgtcaaggtgggcccgcgccgcgccctggggaacccagcgccttgggatcggtgttgagcgggggtggaaacagtgtgtggcattccggctgtccgtcctacagccgggaagacccgtgtctaaaagtggccaccgggccctgagtccagtcgggaatgacagtgagggtggcccctctggtaccagggtgggggcttcagacagaggcactgtgcccattgggtcccctgggccgtccctgcctctgagctgtccctgagggtacatgacagtttggtttcaaggatcaaaatgcaatgtcatatcccagggcccagaggggctctgcgtttggggaacctcagtgcaggcccgtgagagccccctgtgtcactctagccctgggcggctgctggacccagggtgtggccgaagggctgggagcaggagccctgttgaggctctggttgtgaccctgtgaccttgtgggccggttggatcccgtgttccaagaaatcttccaggcttccctcgtgacctggcatccggctcccgggctgggtggggtcccaggagggctggctgcctgggaaagagggccaggtgtgccctggcgagcagggctcgccaggagcctgtgggtcctggtggacggccaggctagagctttcctctgaggagaaggaggaagaagaggggtggccaacctggggaggttactggctaggtgctgggaccacagtggcagcaggcagggacagacacagtacggacggtccctgcctcctgggagcccccaggcaggccaaggcaatggtgcaggagcactaggcccctccggaagcacttccacacagcaggcgttcctctgagcacagccctctcctggtggcccagccttgcttcctgtctttgtttgacagatagggacactgaggctcagggggttaggtagcctgactcatgctgtgtggcctctgggggatcctaactggtgtctcagagccacctccctggtcatcttgccacattgacctggtgtggtcagtgttgggatctgcagagcctgggggacttcctgctggaggtgttgttggccactgacgtccgggagttggtctggccaggtggcagtgggaggaggaggtgtcctgggcgagtcagagaggcgaatcgctgggcctgtgggtctgaggagcgttgtttcgttctatggggactggggtgtgggccctctgccctcggggtcatgctgcgggaagccaccctggggtcacctggtgccgtgaggctgctggctggatgcagagcccccatgctgggacctcagaataggccccttccatgccaggaggggctgcgccccctccctgaagcagcattctagccagccacccaagggacaggacgaggttcagttttgtccagaaccatctgcagtgcctgctgggcacagctttcagcagcggcctgggtggtggtatttcaggacaccctggcgtccagttgttctcttgcccctcgctgggacagtgttgtctgtcagtatagacatgggactgcagaggcaggagccagggactcaagggtggaatgccacatccctgctgccaccaggccatcgcactgggcagggaaccctgggcagagtgctcatgcagccaggcacccgcccagtgagaggggctaacatgtccagcctggcaggagggtcccagcaggtgccaggggaagctgcagacgcctcctcaccccacctctgtgagtgaaggtggcagggagcagctggagctgctgggggcagtagagtggcttcctgaggctctggggctcagggaggctggatccgccagtggctgggacagccaaccagggtgggcccgaaacagatattggctgaggcggcaggcaagtgtctgcccaggctggcacggagctggggagcaggacttggtgctgtggccacatgtgaggtggggcctggtgggctggcagccaggtgtcctgaggcctccctagttctatgggtgaccaggtacccaccctgtggggaaagaggactacagctgactgtctctgggtcagggagggtggccgcccagggcagggaaccctcacgtcctgtgggggtattttgcagaagtcataggtctcaaatgtgtctctgagggctgtcagggtcacaggtggagagcagcctccactggctttttttttttttttttttttttttttttgaggcgaagtctcactctgtcaccaggatgctggagtgcaatggcgcgatctcagctccctgcaacctccacctcccgggttcaagtgattctcctgcctcagcctcacaagtagttgggattacaggcgtgtaccaccacacccagctaatttttatattttcagtagagacagggttttgccatgttggccaggatggtctcaatctcctgacctcatgatccacccgccttggcctcccaaagtgctgggatgacaggcgtgagccctgctttctagagttgcagggcgttaagtgtggtgaattccagccgtggcagtggagtttctggccccttctcgactatgagcgtcccaccaacccaggtgctgtgtcctttcgcctgtttcagatcattgagaagcagccaggccacattcggagcagggttttcagggaggtggagatgctgtaccagtgccagggacacaggtaggtgagccacccttgccaccgcactggcctgagctgtctttcagtggatgaagggcctgagtgccacatcacccccagcaagcgtctgtagggcacccagtttcccaggccctgcattcccctccctgaagcaggctggctgacagccccaggcgggcagtgtgaagctggcctattgccccagtcccagcttccggtggacaggccagcaccaagagggtgggcccctcctaggccgggcagcaggtacccaggggcctcaggaagcctcagctcctctcctgcccccacccccaccccaggaacgtcctagagctgattgagttcttcgaggaggaggaccgcttctacctggtgtttgagaagatgcggggaggtacctgggggctccaggctgtgaggagggagggagctgggaggtattacgggatgggggcctagtgccacctgcaggagggggcttgtggggtgagtgtcctgcccaaatggtggctcaggggtgaggcctttgtgctggaggaagccagtgtgggggcgtccccgccaaagtggaggtgggtgctggccttgaggggactttgaggtgacctgcgtgttccccctgtcctgccctgccctgccctgcccaggctccatcctgagccacatccacaagcgccggcacttcaacgagctggaggccagcgtggtggtgcaggacgtggccagcgccttggactttctgcataacaaaggtaggtggtgaccccgcccggagtctcctagggccgcctgccaaggactcctggaagacctccagaccctcaccccgtcgtggttctgtggcttctcccccaggcatcgcccacagggacctaaagccggaaaacatcctctgtgagcaccccaaccaggtaggccagttccggcagggtggccccgcgggaggggtggaccgcgtgggaccccaggctcacggaccttttggcccctcccaggtctcccccgtgaagatctgtgacttcgacctgggcagcggcatcaaactcaacggggactgctcccctatctccaccccggagctgctcactccggtgagggcccgcggggagggctgggggctcggccgcctgctctgcggttgcataacctcgcggagcctgggccatccagcagctccaggccgcggagctcgggcttccgcctagcaacagccgctgattggttgggcggggtgtcgcggcggggcctcgagcaggcgccccaacgcgtcggtgtttggccgggtggggcggggccgcggcgggggaggggcgagctctgcacctgctgattgggcgggggcgcgttcccggcagccgctgattggtcgggcccggcggggcggggtccgagccggctggcgcaggtgacccgcagttacccgggctcggttcccacgtaatgctgggaaaccccggctgacgcgcccctcccccgcccgcagtgcggctcggcggagtacatggccccggaggtagtggaggccttcagcgaggaggctagcatctacgacaagcgctgcgacctgtggagcctgggcgtcatcttgtatatcctactcagcggctacccgcccttcgtgggccgctgtggcagcgactgcggctgggaccgcggcgaggcctgccctgcctgccaggtgcggcggcccgcgcaccctcctctcctgggcaccctcctcccccgggcctgccctgaacaccccctaaccccaggggacctgccctgcgcaccctctaagtccaggggacctgccccctgaccaccccctaaccctcggggacctgccctgtgtgctccccagacccccggggacctactctgtactccccctaacccctggggacctgcccggtgtgccctactccctgatgccatccacagggcagtgccgccctgtctgccagtttcccgaaggcttttcaggtttgcctgcccaagggaaaccccagacagggttcagagagctgagaggtggagtgaggcccctggtttggggggatcaggctcaggctccctgcccgcggcttaaggctcagcatctgtggcctgtggtccctggaaccaggtccctcagagctgcttttttgtaaatccagctccacttgggtggagctgactctcctggtccggctcccagccccctctgccccaggcgtgcgtggtctagggcctggtctagggcctggttggggtccggttggagccacgtgtcagtgcacagtatccaggcccttgggcaggtctaagctcccctgtgttctatgtccccagaacatgctgtttgagagcatccaggagggcaagtacgagttccccgacaaggactgggcccacatctcctgcgctgccaaagacctcatctccaagctgctggtccgtgacgccaagcagaggctgagtgccgcccaagtcctgcagcacccctgggttcagggggtgagtaccagccgcacgggcggcaggaggggtatgggggcgctgcagggtggcctcagagcgagcatgggaagccctgagggtgtagcctggacaccctgagatgcactgaggcttgagagcacaggctctgccctgggatgaggggtgcagccgaaatccccaccgcccgcctgtgcacggtgcccgctggccagccaggcggctcccaggagcagctactcagagaaccttcctggagggtggtggggacccacagcctgcagcaggctggagcgaagcgggcagcgagcccagctcacatagaccccagcctagcctgccgtcagtctcaagcccaggctgtgcctccacccttccctgtgtggcctccagtcgaggaggagtcgggtgtttctcctgccagaggtcatctgagctgagctgccaccccagggagtgaggatttactaaaaatagaagctggggtcactctgtgtccccaggcgaggggctgggggcctccaatctccttgcagaagcatccagagacccatgggttaagaggggggcggaggtgggtttgggctgggaacagccgggagagatggggcttggggctctgcccccaccctcactgggtcctgtaacaccaggcctcagcctggcccagcctcgggttccctgggcagggggacatggagcctcaccatagggacctcggggtgggcgcttggctcccggggcacccaggtgcactcctggtctccggtggggtcctggtgatgggatgggcatggcatcccttggccagacaccccacccagcgccccaggcggccccagctgctctccagccctgcccccgcccactctcgttgcagtgcgccccggagaacaccttgcccactcccatggtcctgcagaggtaaggcccgcaggggtgctcgggacccctgagtccagggggcggggtttccaggttaagacatttgtgaaagacccggagaactgctttggggtcggggaggcaggcaagcctggtgactcagtgaagctcccggtggggccctggtgctcagaggagccccagggtgggggctgggaggggggcatgaagccccttcccccagggccttcacagaccccaggggtcccctgaggggtgcctcttggtgaccacctacccccaccccgtttcccaggaacagctgtgccaaagacctcacgtccttcgcggctgaggccattgccatgaaccggcagctggcccagcacgacgaggacctggctgaggaggaggccgcggggcagggccagcccgtcctggtccgagctacctcacgctgcctgcagctgtctccaccctcccagtccaagctggcgcagcggcggcaaagggccagtctgtcctcggccccagtggtcctggtgggagaccacgcctgaccctcccatctcccctctgtacataggtcacccgtcccccaatcaaatctaaaggttttttaagctatcgccagccggtgtccagcgggctgcccctcctctgcctggattcccaggcactaagctcagctgaggggggtgttttatagaaggtttttgcttttgggttttttttttcctgtttccacccctccccgttattttttcctttggatggttaaaagcattgcaggcacccgggaaggtgagcagagggtaggtgggtgggcttgtcccctccccggtcccccgccctgctcacctctactatgaaggtgcccccaggtcacctgtgctgcccgccatctgcccacgtggcttgcagtgactcaggagagcaggcccacagcgtttgccatcttgcagagctggggaggggcacaggaccctgccctcgtgttccctcccagcccgcagtatttcagggacaggctcttcccctctatccctcaccctgagagcacccctggtggcttggttggggaagggaggggctgcctgtctctggaggtgtcaggcaggcaggtggcaggcagctcacccacccaccccatgggatcccccagcccttcacccgcgcctgccttgtccccatgatagttgacaatcggggcttcctgcaaggcccgtctgtctgtccaggactcctggtggccagattcggcctccgaccttgaccttaaactgcagctgaccccaggggctcgccgctgcccctcccctccacaccaaggcctgagacagcaggagccccgcctggcccgaagccgtttccaccgcagcaggcagaggggctggacaggcactgtcagccaatgtggggggtcctgaagacacccccttggggcacccgagtgccccttctcagggctcagtctgaccgtagccacgtcctgcctcgcgccgcccctcgggcctgacctggaagctccgtcagctccgtccttgtccttagagctgagcccagaccccggggtctggccgaatcctcacccccagggcagtgtttttggtctgccaccttcaggaaaacggctgcggcctcggcctcccttcgggcacccaggaatgcgggggtctgctcagtccccccaccctccatgctccaacccccgggggctgcggagcctgctgccccctccccgcgggtggggacgttctatgcaatacagggttccactttagaagtgcgcgcggctagggtcaccgcccgcccttcccggcgcagcccccgagctccacagctggggcagcccctctggcttctaaatccgcggtcgggattcttcctcctgtttagttttttagtttttccttaaaaaaaaacaacacatcgatggactttgcttccctgttcttgaagaatacttgaatgtcggggggcctgggggtgggggcctcggagaccgtctgcctggccctgctgcccctcctgaatctcgtatgatggtcacagtccggtggccgtgggggtgctctgccttccctggtccccactgcccatatctgtggactgccccttccaaagacccctggggggggtggggcattccgcccacccctttcccccatcacttctcgcctgtcagtgattccatgtttcgtaacgggggattctctgcctttttgtatcaaagaacaagcaaatggacccccgcccgctgcaggcgcccatagccatcgggtctctaaagctgagtggctagcagcgtttgtttgtttgtttttttttttttttctgaaggtgggacagtcacttcctcctccctccccacccctgtcgcatccacgtgcgacctggaggactggtcagaaccgttactgtgaatgagtgaagatcctggaggaccctgggccccaggccagctcccatcgctgggggacggtgaacggccatgtgttaatgttacgatgtttttaaaagacaaaaaaaaaaaaaaaacctcaaaagtttttttaaagtgggggaaaaacatccaagcactttaattccaatgtaccaggtgaactgacggagctcagaagttttcctttacaccaactgtcaatgccggaattttgtattctgttttgtaaagatttaataaaagtcaaaaaacttgctgtgtg

SEQ ID NO: 7413 - DNA, 138 bp, Homo sapiens
tagtcccaggtacttgggaggctgaggcaggagaattgcttgaacctgggaggtggaggttgcagtgagccgagacgatgccactgcactccagcctgggtgacagagcaagactccatctcaaaaaaaaaaaaaaaa

SEQ ID NO: 7414 - DNA, 113 bp, Homo sapiens
ccgcgctggcggcggcggcggcgctgttccccgcgcggtccgcggagcggggtccgggctgcgcgacgtggggcggcggcggcactgcggccccggcccaagcccgaccccgg

SEQ ID NO: 7415 - DNA, 870 bp, Homo sapiens
aaaactttgtgtagcatgcctggttgtacgataagagctgagtgaaagatgcagtatcccttttccacacggaaaagccaaatagcatcagcaacaacaaatagaataatgcagtggtttctatcatgctaatttattttgctttggagcaggtacctttcctctatggcattattttcttgcatttctcataaaggggaggatgcatcccaactgaatggctcactggcatgtcttttatgtgttcagttgccattcctagctttggaaagtttctatctgtccatgtgtatacaagtcaatgccccatttttgtttttcttttaaccgaggtgtagataggaaaaggacatttttaattacttaataaccggaaatgcagatgtgtaaggagaatgagaggaatgagttaaagtggttatgcatttttctatagatgagccattacagcaaggaattttacagttgacttctctgaacctagctttaccacagtgattaaatcctatttagaaaggggaatctgatttaaatgtgtgattccttgtatttgctcctatcacaaaagatatattaaaggaggtatgccattaatgaaatccactgtcctgagtattatctttcctcctgttgtactttctcagagactatggcagaatatctggatcttccttggattttgtacacatattgtagtgaaatgtgtcctacatctgaaattgcatgggactcatgcccagcaatctggttctaggcctttgacacctgataatatgagagcaattggccagccaatagccataagcccagaggattttagagcttcatgtgtggcttttaagagcaggtttgaaaaaaaaaaaaaaagac

SEQ ID NO: 7416 - DNA, 868 bp, Homo sapiens
aaaactttgtgtagcatgcctggttgtacgataagagctgagtgaaagatgcagtatcccttttccacacggaaaagccaaatagcatcagcaacaacaaatagaataatgcagtggtttctatcatgctaatttattttgctttggagcaggtacctttcctctatggcattattttcttgcatttctcataaaggggaggatgcatcccaactgaatggctcactggcatgtcttttatgtgttcagttgccattcctagctttggaaagtttctatctgtccatgtgtatacaagtcaatgccccatttttgtttttcttttaaccgaggtgtagataggaaaaggacatttttaattacttaataaccggaaatgcagatgtgtaaggagaatgagaggaatgagttaaagtggttatgcatttttctatagatgagccattacagcaaggaattttacagttgacttctctgaacctagctttaccacagtgattaaatcctatttagaaaggggaatctgatttaaatgtgtgattccttgtatttgctcctatcacaaaagatatattaaaggaggtatgccattaatgaaatccactgtcctgagtattatctttcctcctgttgtactttctcagagactatggcagaatatctggatcttccttggattttgtacacatattgtagtgaaatgtgtcctacatctgaaattgcatgggactcatgcccagcaatctggttctaggcctttgacacctgataatatgagagcaattggccagccaatagccataagcccagaggattttagagcttcatgtgtggcttttaagagcaggtttgaaaaaaaaaaaaaaaa

SEQ ID NO: 7417 - DNA, 868 bp, Homo sapiens; identical to SEQ ID NO: 7416

SEQ ID NO: 7418 - DNA, 750 bp, Homo sapiens
cttcaaagcaaggaaataagatgctgtatatgcacacataaatgcattgataatgtaaatatcctattcacgctaatgaattactagatattaaaagtggggggtggaaatcattgtagccctttattgatgacacccattcattctggcttcagaccttgcagaggttggccatatctttttaaaagtgtcattgatgataaaagggactacccaaggctaaagcgtcaacatttttcagaacaattgcttttctcattatttacaacctatataattcaactttgaaataacccttattttgaaaaaaactgttctaggtatggcatgttttgttttttccctcaggtatattcaatacattcttcatatttgggggaactgcttttgaaaaagggatactgcatcttaacagttatcttcagtgtgcatccagtaaagtctgcgtgttgagtatttgagctacattccatatattttggccaccctcataccagaggacagccgtagttcaggaggctctgttttcaaaagcaagttcaaaagcacatgcacattgagggaagatgaaagaaaacaaaaaccaaccatgcccatttaacttcagattacagagcacaaaatgtggagtgccattaacccattgattgattgtggctgtagaatttaaaaagcaaacatggggggggtggggaatcatctgtatccagggtaagaatgaccaatattttcacatgggatcatcctaat

SEQ ID NO: 7419 - DNA, 750 bp, Homo sapiens; identical to SEQ ID NO: 7418

SEQ ID NO: 7420 - DNA, 750 bp, Homo sapiens; identical to SEQ ID NO: 7418

SEQ ID NO: 7421 - DNA, 3741 bp, Homo sapiens
atcatagcctcctaaggccaagctcctgcctttcagcagcctctacaggcccagctcctgcctcgcaattgcctttgtaggccaagatcatgccgcgaagtggcctttcctagcctaacttttgctttttgacgcatactccagtcccaaaacttcctccagtcagccggtccaggccaagctcttcctcccaaaggcttctgcaggccaaaatcatcctgaagtcaccctctgcaggcccagctcctgcctccaagtgctgtgtaggccaagctaatgcctcacagcacactttccaggctgagcgtttccttttgtgcatcctctccaagccctgaacttactccacttggcctctccagaccaagctctccctcccagtggcctctacaggccaaaattgtcctcaggtctgcctctccagggccacctcttagctaccagtggcttctgctggccaaaatcgacctcaagtcagcctcttcacacccagctcttgcctctgagtggcctctccaggagcaaaactttctcaagtcggcctctccaggcccagcctcctgcttcccgagggcatgtacaggcccagcctctgcctcacagcagactctccacacccagctcttccctgtctgcggcctctccagtccaaagctgctgctgccttttggcagcttgtacaggctcagctcctccctcacggtggcctctttcagcccaactcatgcctcttgcaacctgcccaagtgtcagctcctgtctcacactggcctgttgagggccagctcatgcctctcgtggcctcaacaggcccatcccctgcctgtcggcggcctctacaggcccggcctctacctcacagtgggctctccaggcccacctcttcctcaccgtggcctcctggggcaatgctcctccctctcgggagcctctgcgggcccagctcctgcctcccagtggcctctgtagaccaagcccgtgcctcagggcagcctttccaggcctagcgtttgctgctttgcatcctctccaggccctggacttcctccagtcggcctctccaggcccagctcttcctctcggcggcctctgcagggccagactgtcgtcaagtcggcctgtccagggccagctcctgcctcccggcggcctctgcaggcccaagtcgttctcaagtcggcttccccaggcccagctccggcctcttggcggcctctccgggtgcaaaagttcctcgagtcagcctctccaggcccagctcctcctgcctcccagtggcctctttcggcccagcccagctcatgcctcccggcggccttcccaggccccgcttttgactttcggtggcctctgcaggcctcgacaaggcccggcctcctgcctccagaaggcctgcacaggcccagcctctgcctcacagcggactctccacgcccagctagctctcgcctcactgcggcctcccgagtccaaagctcctgcctctcggccgcttcggcaggcccagctcccgcctgccagtggcctcttcaggcccatggggctcattcctcacaacagcctttccaggcccagtttttcccttccggcggcctctccgggcccagaacctcctcaagtcggcctctccagacccacttgcagcctcccggcatcctctccgggcccagctcttcctcccggctgcgtctccaggcccgactttggcctcccaacaacgtctttggactcagctcctgcccagctcccagcggccctggtaggcccacagcttcccgaagccaagctccccaggcccagctcaggcctcacggtggcctctccaggccagctcctgccctctgatggcatctgcaggccccaaacggcctccggttggtgggctcctctaggcccagcttgggcctcctggcggcctctgcaggcccaaatcgtcctgaagtcggcctctccaggcccagctccggcctcccggcggcctctgcaggcccaagtcatcctcaagtcagcctggaattgggcctggaagagagcaagtcggcctccccgggcccagctccggcctcttggcggcctctccgggtgcaaaagttcctcgagtcagcctctccaggcccagctcctcctgcctcccagtggcttctttcagcccagcccagctcatggctctcagcggccttcccaggtcccgcttttgacttttggcggcctcttcaggcccagaacttgacctccagtcggcctttgcaggcccggcctcctgcctctcaaaggcctgcacgggcccggcctcggcctcggcctcacagcggactctccacgcccagctagctctcgcctcactgtggcctccccagtccaaagctcctgcctttcggccacttcagcaggtccagctcctgcctgccagtggcctctttaggcccagctcattcctcacaacggccttcccaggccccgtttttcccttccggcagcctcttggcctctaatttgtttatcttttgtgtataaatcccaaaatatggaattttggaatatttccaccattatatattttggtaggtaatttatttggagtgagtttctgcaccatgccagaattttttattttattttccttattatttagtgttaaacaggtttaatgacggtcatggcaactttttggcacagtgaaaaatatcgcccatgatcaacgtgttctgttctggggaagggggcaaaggcagggtgaatcactttcttaaaaagtatagctcaagttgggagtgcagagggaatggggagaaaaccctcccgctgcctgtgtcgaagtgtaggagcccccacccccatactcacctgagtccagcccctctggggaaagaaggggtgcatgaactccccctagtccacaggcacctccctgtggcccaaggctctcttcacactccatcttgaagccccagcaggagctattttccaaaaagtgaaaagctctgaaggtcccacaattcatggtacatacaggggctcggaggagggaaactgcccagctttcccccggcacagctgcaggggtagggggtatagataagaggagcaggccttggccaggcgtggtggctcacgcctgtaatcccagcactttgggagggggaggcaggcggatcatgatgtcaggagatcgaaatcagcctggccaagatgatgaagccccatctgtactaaaaatacaaaaattagccagacgtggtagcgtgcacctgtaatcctagctacccggaaggctgaggcaggagaatggcgtgaacccggcgggaagaggttgcagtgagccaagatcgcaccactgcactccaacctgggcaacagagcaagactcggtctcaaaaaaaaaaaaaaaaaaaaaagcaggccttgttccgtcccaaactgaaaggattaaatggctttacctgggagaagataaccatcctgccctccattgctacccccacatactgtccatgttctcagggggtactgtgagtcctgggatcttctttggggtcgcccacctgcctgtggtagttatggagacccccaggtgttgaggcagggctggggtgtccccttccaaccaggctgtcaaggccccagctctggggcagaggcagtggcagggcagccagggttgcgccagagcctgagcagggtgaggtggggtcaggcagggctgggagtcagggcaggggcagcagcagtggacccgctatg

SEQ ID NO: 7422 - DNA, 321 bp, Homo sapiens
ggctgggagtcagggcaggggcagaacaaaccttggaggggaagatgtgtgcatagtgggcctggtgggcggctgtggcctagtggacaggaagaagcagtgggcctggaagagctgcatgatcagggccggcactggtccagggcgcgtgcagtgaagaggacagcaccttctcggtctccggttccctgagcctgtcctcggcttctccacctgtacaggcaaaggggaagctgtccccatcacacatggcacacttgggggtgttgggctttgggctgcagctggagcatcttctcatcttgcatttgggtgtggtgg

SEQ ID NO: 7423 - DNA, 251 bp, Homo sapiens
tccctcactgcggccacagaaagccaagtttctccgtgcctcatggcatcctccgaaaactgagcatttgcctcacggtggcctccccaggccacgaatctgcctgcctcccaggcaggtgctgcctcacaatggtctctttaggcccagctcatgctaaaagatggactctccaggtacagctcttgcctcctggcagcctctgcaggcccaaattctccaaaagttggcctctcctaactcagctcctg

SEQ ID NO: 7424 - DNA, 360 bp, Homo sapiens
caaggctgcagggtgttgtgattgtgcctgtgagtagcagggtgcactcccacctgggcaacagagtgagaccttgtctctaaaaattaaaaaaaaagttaaaaattaaggaaatattctttcagtattcaagaactattctccaagtcagcaaagaagctgctcacatcattgacagatgagttgaagttccaacatatatgtctttgttgtttcacttttgtcttatttgttaatgcaaacaaaaatatcaaccaatactctcatgggagctaacattcttttgtcgattgcaaccataaccataggttggctatggatatgagtttggcaaaagtcaataaaagcattctatgagaa

SEQ ID NO: 7425 - DNA, 346 bp, Homo sapiens
aaaaaaaaaaaaaaaaaaaaaaaaaaaaagccgggcgcggtggctcacgcctgtaatcccagcactttgggaggctgaggcgggcggatccaggggtcaggagatcgagaccatcctggctaacacggtgaagccccgtctctactaaaaatacaaaaaattagccgggcgtggtggcgggcgcctgtagtcccagctactcgggaggctgaggcaggagaatggcgtgaacccgggaggcggagcttgcagtgagctgagatcacgtcactgcactccagcctgggcgacagagcaagactccgtctcaaaaaaaacaaaaaaaaacaaaaattcaaaaaaaaaa

SEQ ID NO: 7426 - DNA, 891 bp, Homo sapiens
gatgaagtttacattaatgttagtaatgtccttggagctaagtcttcgaaaagtactctcaagtgtgtaccctttagggaaatataatcatgaatgagaaactaggtggtctggaagaggaatgatcaatgatgacacttattccaagttctcagcctcacagagcaataggagccagctcgcttaatttctctgtttccatatttgcaaaataaggattatctgtgattatctgtttccatttagtggttgctctgtgaaatatttgaaatcagtgtagtggtgagtggatgataatggtgagaagcgtttgggagctagggaaaatagaagtgtctgccccctctctgttttgctattcagtagctgtaactgtacagattcttcctcagattgaaactccacttcccttgtttcccggtggttagtcccactcctgctcatgcgacataagaacatatataataatccattttaatatatttactaaccaggtccttttgttgtgcaatattttgtatacttaattcagtccttcaacaaatgcttgcctactagaacactgtgttaagtgctgaggttgcaaatggtttcttgtttaactttcattcaacaaatactgtatttcatctgcatctactacataacatttcctgtggtgggtgctgagaatgcaaagttaagatagaaacttgaccttgagaaacatatgtccagtgagagatacaggaggaataaataatacttaaaccgcatttatgtttatcattacattatcatggctttttcctagtaaaagttatgtaaatgttatttgatgtttctgctgaacatatgagcatgataagctgccacatttccaaaataaagataaggaagttgtcattagta

SEQ ID NO: 7427 - DNA, 891 bp, Homo sapiens; identical to SEQ ID NO: 7426

SEQ ID NO: 7428 - DNA, 466 bp, Homo sapiens
ctgaaacatcccactagcttgaatggacatagtagccatcaccgtgttttacagacaccatgcttcacctgccaggcaggatcccttttaacttgtcccatgccctttgcagttaatgaggttgcatagaatggattctaggatgtgatacagactccagagacatgtggacattgggaacaatatcatgaatgtacttcagggacatcagctgacagttcactttaagattcaagtgtttttcttccccatggaaacatttagctgagcaataataggaaaggaggaatatgaaagaagatatggacaactacatctggtgttgtgcattttataattgtgcattaagaaacttctaatcctacagacttgattctaatagaaaccagatacttcggaggttttatctcccaggatgtcttccaggatcataagaaaatcccctacataaccagagaaagtgagg

SEQ ID NO: 7429 - DNA, 406 bp, Homo sapiens
aaatacacattaatgtgaagcttattttctctgctacctaaatgatgaattgacaactagatgattagccacctttgaagcctggttttatgcagagctgcattaaatgtgacacccttcactcagcagtgtgaaaaaactctaatcatttaccaccttagagcttatatatttttttccatctactaactggaatcaagaaaaataaaaaaattcagaagtgatttaaaagcataataaatgcttttaaataatagggaattataggagcccacttcttgtggattgattcataaaattattagcaagcaacgttttagtttgtggacctgttgtttttgcaggctgacccttctctgcaattgaaagaagctgcataattgtaggaaagggataaggacccaga

SEQ ID NO: 7430 - DNA, 406 bp, Homo sapiens; identical to SEQ ID NO: 7429

SEQ ID NO: 7431 - DNA, 466 bp, Homo sapiens; identical to SEQ ID NO: 7428

SEQ ID NO: 7432 - DNA, 1846 bp, Homo sapiens
gggaacctagaggtcctcattttataaagcttttcatgtaaaattcccctgaacaccataaaccatactttacatatcgttgctttaattccttttctttgtgagagggcttctgcaatgttaagttagctaccatataaccatgacctcagtgttctgcaatatatgccttcaactgtttttcatatgacatggatttgagctctcctaccatcctgatcatcttttctgggtgcgtttcagcttttctatgccacataaaacattgtattagaaaccaaaaatagtactaaaggagtggtataagtaggacagagtacagctcagtgctgaaactagcagtaacttctagccttgttggccctttggggcttcacagaggaatggctgtagataaccggagatgttattcggctgggatgcgctaggagacagctccttggctgtttagtccagcatctgtcctgcttggttaggtgtcgcgtttgataggtgagtttcttgatgtcctgattttcaaatatgttaaatataattcttgattttagtttgttcttatttgatttagttctatgtttgaatgctatctgctcacagaggcttccttgaccatcttaactaaaaatccctaccagtcactctctctccctccatcctgttttagttttctttgtaacactcacattccctgatattatattagccttctttctcttctctcctcctcctccctcttcctcttctcttgtttcctcctccttttccttcctttttttcttcctgaactccctgtccttcctccttttctgcctcccttctttcctttctctccatctctttttcttcctccttccctccctctgtcttggattttaagctgcctgagggcaggaacttgttcaggaacttttgtttgttatccaaacactcagaataatactgacacatagacacatagcagatgctcaatacataggtgttaaatggttgaatacatgtccctttacatcctttcccctgcccccagactgtccagttttataatggaacgtgtttgggttcatgccagtaattcatcatgtggttttatgtcctccctcatcctgaaggaagagggacaggtgactgtgttaccattgctgaaggatcatggaggttccagaagctaatgagtgctggtgccttcccagcagtcctgaccatgttacttttctgaatgacctttactgtaatccatccaaggagtccccagcccccacctcaagtgctgttggtaagagagctttctatccaggaactgtgactcataattctgccaggggaagctaacttcttgaataagataagttctcataccagccacattgcgtcaccgtgggagcaggaaacatgttgtaatcccctcagcccatctggcacgtactcatttgccttccttatgaagaggtgtattgtgtctgacagtgatgccacttcctagttggagggagaggaacaaaaaggacatgttgttgacaaaaacgaaaagagcaactggctctgggctagtgggggaagaaagaaatcattgcgcatcttgagggatcaaccaacctctctgcacatgaaagtattgccttttacaaggcatctgtggatgctgacagatttgttggtctttcatgaggctctccctgtgctcaggttcccatctcaacggaaacacaggttgatgtgaggaacaaagcagaaatgttctgaaaaccctaaagcaatctacatgcgtatcatattagtaagacatttattttgttctgagtccttccatgtgggccttttaagagaatcctcaaatataaaaaagaaa

SEQ ID NO: 7433 - DNA, 523 bp, Homo sapiens
ctatgggggaaaaatgggagtgataatagcacaatctgtttttcaaatttgagccagtggtggaaaagttatcagtggtaataatccattgagatgttaaataaaataatgagtttttgtcatattgtttctatataggaaaaagaaaggatctgtctttagactcattctttctctggatgttgctttataagaggaaccagctaagacctttatagagtttgaaaaccaaactcagtcatcatgggcctggatcacgtgaaattagatatggaagagacttgctatttgaaagtccatcttttcagatctcctcttcttcccagaattatgcccagaatcactctctatctctgactattaatcattacatttcagcctatgtttttggactaatcaaattcttagaaagtttttagtacataaaactgaaatttgtctctttgattttagtatctaaaactgaaatttgtctctttccaaacatttacttggttcaactgtaggactgaaaaaaaaaaaa

SEQ ID NO: 7434 - DNA, 19732 bp, Homo sapiens
aaaacagaaacgtaaggccaggacgggtcaccctttgtgggcccctgaaaaatacaaaacgaagtttggagagagttgaaaggcgtttgggctgaccatggagatttttgtttcccaccctcctgcgaaagcgctcgcgctgccattggctctggctgagggcgagtccggaacctgtgcgccgcggaactttcggctctgaaatccaagttgcgctgggcgcatctttgccgcgcggtttccgggcggctcccttcccttgcatgctgcattgtgtcgggagttgctgacagccatggcgccgcaggtctggcgtcgacggaccctggagcggtgtctgacggaagtcggcaaagccacgggtcggcccgagtgcttcctcacgtaagtgcgcagatcccgggctcggggtgcgaccggggtctcacgtggacgcgggttgcaggcctccggcaaattgtggagctgggggaaggtaaggggaaacgtaaaatcgcttttccccaaatttcagagtttatgctttcctaggctatcaaaattttaaaaactgttaaaatttgtatagatggatctctcagttgagtgttactgaaatcactctaacctcaattgttaacacctagaagcttcccttgggcttcttacgcccccatccctctacacacagactgttggtttctccttcctcctatgtgctctcaaagcacttagcgcttagcatactttattgaaagtacgaacttgtcacttgtctgtccaccccccatgactaagcttcttcagaaatagaacttccatgtctcttcccaacacaagcgttttatatgtattttgttgaagaatttaaaatgtgatctatgaaattattactcatttatgtttcaaaccccaacctttccctgagttcccagctcacagcaactacagactgagcttagtttgaattccgtagcacacaactgggatatccacactgtacaacttttaacgatttttaaaattttggtactgtcaagcatctcaaattcactgcgtccaaaatagagctgttgtgtctgtttaatagaattgttgtttctacccacctatactctgccatcccctgaagtccttttcccatgctacacctgtcaagcgcgtctgtgtgaagagaccactaaaacaggctttgtgtgagccacaaggctgtttattcacttgggtgcaagtgggctgagtccgaaaagagagtcaactaatggtgatggggaaggggttgctttataggagttgggtaggtaatggaaaattacagtaaaaggtggttatctattagcagaggaggacggggtcacaaggtacatggtggggagatcataagacttattgtccagaagaagaatgtcacaaggtcgattgatcagttaaggtagggcagggacaagtcacaatggaggaatgttgtaatgttgattaatcaattaaggcaggaactggctgttttatttcttttgtggtttttcggctgccccagacttcttggctcctgcaggccatctggacatatatgtgcaggtcacaggggttacaatggctgagcttcagctcagaggcctgacaccaccacccaagccttccctatctcagtaaatggcacttctgtcttttcaggtactcaaacataaaactaggctgctactttaatgtcttcatttttctctattctatatctaattctttagcaatcctgtcagttctacctccaaactatactcagcatattcactgctctaactccagtctaaatcaccattatcctttcgctggaatgctgcatcaaccttctaatcactgtactttcctcctcctccctcgtccctttctccttccttcgtgtaaatcatcatttcatccctctgcttaaaatgttttctctttacactttaaatgacaaattcttactcctgaaccatgcataatttggctcccatcagtctctccagcttcaccctctgcctccttcacactctagccatggtcacctgtttgtttcctcaagctcacctctagaggatttgcatcttagaggatttcttctgcctggaatacatgtttcccaacctttataagactatctccttatctgtaggtttcctctcagatgtgacatctaagagaggttttccttgaccactgtagccaaagcaaatgttgatcattgaatgaataagtgaacaaatgaatggagtggtatataatgtagcagaattgataatttaaggttaattcactatatatctccaagcaaatagatttataatggttttcctgcctaaaatctatacagccgattcacagatacttggttgacaggttttatatatcagtgtagctcatcagcttatatgttgttgggggccagaatctatacttatacttcattcaaattttattttacaaaagagttgggttttttttatttttattaagagtgctgtgaaattattacctgtaattctaaatctcacttaattcctcccaataggattcaagagggattggcatcaaagttcacttctttaacaaaagtgctttatgactttaataaaatattagagaatggtaggatccatggaagccccttgcaaaaacttgtgatagaaaattttgatgatgagcagatttggcaacaactggaattgcaaaatgaaccaattttacaatactttcagaatgcagttagtgaaacaattaatgatgaagatatcagtcttctcccagagagtgaagaacaggaacgtgaagaggatggttcagagatagaggctgatgacaaggaggacctagaagatttagaggaggaggaagtgtccgacatgggtaatgatgatcctgaaatgggtgagagagctgaaaactcaagcaaatctgatctgaggaaaagccccgttttcagtgatgaggattctgaccttgactttgatatcagcaaattggaacagcagagcaaggtgcaaaacaaaggacagggaaaaccaagagaaaagtccatagtagatgataaattcttcaaactctctgaaatggaggcctatttagaaaacatagaaaaagaagaggaacgaaaagatgataatgatgaggaggaggaagatattgatttttttgaagatattgattctgatgaagatgaagggggactgtttggaagtaaaaaacttaaggtaaagttttgagagaagagagagcactttcctcctcaaattagcttttcttctgtttttctaggagagatttaattgtagttagaagatttagtgataagaaatattgtgctctatcttatcagttataaatgaatctgtacttccattcaatttatgttccagttggtcttataattttgtggtagtgttattagttgccattttcacctaataattatttagttattagtttggttattagttattagcttgtagtgttattaagtcagaaagtaatatatacatacaatatacatgcaaatctatatgcatgtgttaatatatttttctatccctaattaatagtttttaatatctttttattttagtcaggtaaaagttccagaaatctgaaatacaaagatttttttgatccagttgaaagtgatgaagacataacaaatgttcatgatgatgagctggattcaaacaaagaagatgatgaaattgctgaagaagaagcagaagaactaagtatttcggaaacgtgagtattttgaaccatcctttacattgtaagctggaattgcccaatcatgtgtgtgtactcgtagttatcaaatgtgtttgtcttagcaagttctattctctaatatcagatattctcaagatagccagaggaaagtctctgactgtaaagggacattagagatcacttaatgaagaaaaatatctctggtagtagcaatcaaaccttccttaccaggaactttgatttggttttgtgtcaataaaatcctgttatttttgtgagataagagatttgtattatagattgatgaataatttattttctatatgttggacacttttttttctgtttcttacatagcgttttacctaaataataccttttgttccttaataactgaatgattttggaagttctgagtatttggttgcattaggtatataaaataagaactttattaagggaaaatttgtttccttttgtttttctaatggaaagtagtatatttctttttataagagttttggtattgtagggatgaagatgatgaccttcaagaaaatgaagacaataaacaacataaagaaagcttgaaaagagtgacctttgctttaccagatgatgcggaaactgaagatacaggtgttttaaatgtaaagaaaaattctgatgaagttaaatcctcctttgaaaaaagacaggaaaaggtaattagtaatttaaggaatttttaatatacttgatattaaccatcctttgaaaactattaaccatcctttgaaaacaaatatcttggccaggtgcagtggctcacgcctgtaatcctaacactttggtagtccaaagcaagaggatcgcttgagctcaggagttcagaaccagcctaggcaacatagtgagaccttgtctctaccaaaaatacaaaaattagctgggcatggtgatgtgtgcctgtagtccagctactctggtgtctgaggtgggaggatcacttgagcctaggaggttgatgctgcggtgagctaagattgcatcactgctctctagcctgggcggcaagcaagaccttgtcttaaaacaaaaaaccaaaaatcttgccatatggaaagcatctgatttgcaaaatcagtgcctgcatttcagtttggggcctgtgagtaaaatagttgcttctgctgggcgtggtggctcatgcctgtaatcccagcacttttcggggctgaggcaggtggatcacttcaggtcaggagttcgagaccagcctggctaacatggtaaaaccccatctctactaaaaaaaaaaaaaagtagccaggtgtggtggcgggcacctgtaatcccagctaatcgggaggctgaggcaggagaatcccttgaacccaggaggcggaggttgcagtgagccgagatggtgtcactggactccagcctgggcgacagagtgtgactctgtctcaaaaataaaaaaatttttaaagataattgtttttttctctgtccctaatatctttatatgtatagcatgtctctcctgataaagctgtcctgtgagcatcttaactgtttccactgttttggaggataccacatatgtcttttctttttctttttctttttttttttttttttgagacagagtttcactcttgtcacccaggctggagtgcagtggcgtgatcttagctcactgcaacctccacctcccaggttcaatcaattttcctgcctcagcctcctgagtagttgggattacagatgcccgccaccacgcccaactaatttttttgtatttttagtagagacggggtttcaccatgttggccaggctggtctgaagctcctgacctcaggtgatccacccaccttggcctcccaaagtgctgggattacaggcgtgagccactgcgcccagcggataccacctatgtctttaaggtgctccacagatttttgtgagtgccaaatagccagaattttaatttataccatcacaaacatatctttcaaagttggtaaaaattgtttctttgtgtcatgatttcagacaagtgaaatttcattaaatttttgtagatgtagtctggctctaataatttggctctatcatttatttaccttaaaatttttatcacaataaaaatgagaatagggccaggcacagtggctcacacctgcactttgggaggctgaggagggaggattgtttggagcccaggaattcgagaccaacctgggcaacagggcaaaagcccgtctccactaaagattaaaaaagttagctgggaatggtagtgtgtgcctatagtctttgctactcgagaggctgatgggggaggatctcttgagtccaggagttcaaggctgcagtgagctatgattgcaccacagcactctagcctgggcaacagagctagagactgtctgaaaaaattaaaaaaaaaaagagaacaggcagagaatgaaagataccaagaatatcaaaagaattgtttttaaaatctaagaatctgaattaaatccatggttgtcagattgtccccagaagatagagaaattctaagggaaaaaaagcaccattataaaatatcaatgagttagtatccttccaccccactcctcccgcccttccccaacaaataaagaaagaaaggtttggttttattgtgaaattatatcagaccttcaagttaagtttcaataaatcaaaaataatttatttcaatttccacatataaagaataaagtagaactttcaacctttttttttttttttttgaaactgttaggtcatgaaaacccaaacctgacagaggtagcattaaaacacacacacacacacacacacacacacacacacacacacacacacagagcacagtctcattcatgaacagtgatgcaaaaatcctacagcacagtggaaaaatgatgccacacaactgcatgaaccttattctcttgaatcagtattagaaaatctagtatgattcctgactgcaagacattaaggagaaaaaacatatagtcacctccatatatgtcagaaagacatttgataaaattcaatattcatttctaattttttttttcactcctagcggaatataaatacatttaagccaaaaactgccatcatgcatgatgcatgcatcattctagaaacatccctttaagatcaggaataagacaagatgtccagtattacaattaccactgttgattaacattcttttagacgcataggccagtgtaactacaaaagataaagataagagatgaggaaaactgccaggtgcggtggctcatgcctgtaatcccaacactttgggagaccaaggcaggaggattgcttgagctcaggagttcgagaccagcctgggcaacatggtaagacctcgtctctacaaaaaatacaaaaattagtcaggcgtggttgcacgcgcctgtggtcccagttatttgggagtccaaggtaagaggattgcttgagcctaggaggtggaggttgcagtgagctgagatcacgcaactgctctccagcctaggcaactgagcgagactgtctcaaaaaaaaaaaaaaaaaaaaaagattaggaatactgcagatgtatttatattccactaagagtgaaaaatgaaagtgttggtatttggagaggaaaccgaatggataaactgaattgatattaggaaaataagagaattctgtaaggtagctgaaaaggctggcattttatacactgaagtcatcattgttgtcttttaaaagttagagataatggccaggcatggtggctcacgcctgtaatcccagcacttggtgaaaccccgtctctactaaaaaatacaaaaattagccgggcgtggtggcacacgcctgtaattccagctactcgggaggctgaggcaggagaattgctcaggagacggaggttgcagtgagctgagatcacaccactgcactccagcctaggcgacagagcgagactctgcttcaaaaaaattttaaaaaaagaagttagagtaagaatttgagtttggagtcaaaagggtcagactccatcagatactaatattctaatcaaagaattacttgacttgcgaatagatagatcacttgaatagaatagagcccagaaacaaactcaaaagcttctgggggcgtttagtatattataaacatggcattttaaattaatcaggaaaagaaattgtttgcagctcaccccaccataggcagcagaaataggaagtcatcgacagaataaaaagatggcaagaacagaatcgtagaacagtacgtttcttgctttcccactttttaaattattttttgcttttacacaaatataagattttattttctaaatgtatactagttattttatctctttcttagatgaatgaaaaaattgcatctttagaaaaagagttgttagaaaaaaagccgtggcagcttcagggggaagtgacagcacagaagaggccagagaacagcctcctggaggagaccctacactttgaccatgctgtccggatgggtatggtgccctcttctgtagttttcatgtctgtgctttttccatggttccatttcatacaaagatttggggtggtgtttcttttccctcaactttttattttaaaaacttgtaaacacatggcttggcatggtagctcacacctgtaatcccggcactttgggaggccgaggcagacggatcacctgaggtcaggagtttgagaccagcctggccaacatggtgaaaccccgtctctactaaaaatacaaaaatcagccagatacggtggcagatttcagaatcccatctactcggaaggctgaggcaggagaattgcttgaacccagaaaggggaggttgcagtgagccaaggttgtgccagtgtgctccagcgtgggcagcctgggcaacagagcgacactctgtcaaaaaagaaaaaatcaacttataaacacagaagagttgaaaaaatactacagtgaacacctatatgctattcaattggattcaccagttaccattttgttatatttgctttctctccctagcatatgtaagattgtatatgtgccctttttttaagtaagttgccaatctcatggcacttcacttttaagtacttttgcagatatcgtctaagaactaggacattctcctatgtaatcacagtaccattaatccacccaaaaaatttaacaatacgctaatgatacctaatgtatagtttgtaatcagctttcttgtagtaatctgttttgaaggcttgcatcctgtcatggtccactgattaaattttgaacttcaacctgaaactgtggtcatctcattgacttctttcttgtacccattacatcaaaatgagttttcattttatttcaatggaagagagaatggaaaagaggggaagagtccctgggtaccttgggtaaagtattagcacttactaccatatgtatcctagttttgtggttttcaaacttcagggagcatcacaaggcttgttaaagcacagatagctgtccctcttccccactttctgattcaggaagtatgggggtggcccaggaatttgcatttctaacaagttcccacgtgttgctgatgctgtgggtccaaggactgcactgaatcaatggtctagtggatatctacctaatgaataaacgttgtatatcctttagcacctgtgattacagaggaaaccacccttcaactggaagatatcattaaacagaggataagagatcaggtcagtaagaattaaatttaacttaatcaaaatgtcaccaagatttttagaaataatgtgagagtactttgagagtaggactattgctttttattttcacttagtgttcacaaaccttaaatctaggctacctagtcagcttttgttgtgtgaggtactgctcttcagtagtatccaggaaagacgagtattgtgcctgagaggagcaagaagccattatcctttctcgtgagtcttgctgaccttttgggcggtgctcagtgaagctggtggctgacctgtgatggttgcacccagaacccttggcttaggcacagtatctggtgtggtaaattattcagtatatatgtcctagtcttttttctgttacttataacagaatatctgaagctgggtgacttaaaaggaatacagttatggaggctgagaagtccaaggtcgaggggccttcttaccagtggggattccgcagagtcccaaggtggtgcagggcatcacatggtgaaagggctgagcatgctaagatgctggctcaggtgtctcttgctcttcttaagagccaccattcccccactgatgataacccattaatccataaatgcaactgccattcatgagggcaaaaccctggtgatccagtcacgtcctagaaggccccacatctgagtgttgccacatcagggattaagtttccacatgagttttggaggggacattcaaaccctagcattgtggtagttctacaattttaaaaccatttctcaatggtgtatttttttcaaatgttaaaaacctagtggtttttgttgaagaattgatctgattttgtaaacttagaataaaacttagatatatggcatgtacagtaagagatggccttataacatgtgtataatgtttgcctacacttgtgggtctaaaatagaaagggtttaaagggtgagtatcatgtgcagaacatcttaaaatttgaaatgaaacatgataaactaactcaaggcttgacttttaaacaaactgtgatggggaaatgtggaattaaagttggtaaccaggtaggaagactcatttaaaacagaaaaagatatttgagtaatggtttctttgctttcctaatgtttattctttgtgacttgaatagttatttcaggagttgaaaattttctttttgctataatttgcttactctgtaataagtaataataaatatttattataacaatgatataatttactattaatatattaatgataatttattaatatattgataatatttattataataatattccagaggaagattcttaagtgaacctagaaataaattgtaggttttgttatgttctacctgcactttatgtttcaggcttgggatgatgtagtacgtaaagaaaaacctaaagaggatgcatatgaatataaaaagcgtttaaccttagaccatgagaagagtaaattgagccttgctgaaatttatgaacaggagtacatcaaactcaaccaggtgaggaagcctgtaaggccaagccattattattaaagaaatagaagtagagaactaggctttttgtgactgttgaaatcgtgaaacagaaatcttgagctctttggctacctcatgtaagtatgagacagagcatgctaggaatagaagggttctaatattcccgctggatgtgaggggttgaggggggttgctttgcaattagactttggtcacctgatacttttacaactcattaactttctagcaattatggtggtgctacaactttaaaagcatttctcattgatattttgaagtaactgatatattttacatgattatgaattcattctgatttttaggtctgttttttctttcacttaactaaaatctctgggctgggtatggtggctcacatctgtaatcccagcactttgggaggctgaggcgggcggattgcttgaggtcaggagttttagacctgcctggccaacatagtgaaaccccatctctactaaaaatacgaaaaaattagacgggcgtggtggcatgtgcctgtaatcctagttacttgggaggccgaggcaggggaattgcttgaaccagggaagtggaggttgcagtgagcccagatcgcgccactgctctccagcctgggcgacagagtgagactccatctcaaaaaaagaaagaaagaaaggaagaaatcgctggttaaataataggacaaggtcctattcctaggaatattatatgctgatataataatcgaattattccttcacatttgatttattgggaatgtgggtacttagggatcagatggcatttttcttctgcaaaagccatttacgattcccaccagattttgttaatgaatgcccctcagttagcaacagcaaattgccctgatgccactgtgaaactgaagaactgaaaagatttgaattaaaattcttcctggctgccttgcaatccaaggtggtagctgaaggaggatgtgtacagtttcatttgaatctttgaggagattgggtagatacagaaggtatttgatgaccacgagaattaaaaattagataggtaatgcaatagcttatgccagctctaaatgttagtttcatttctctcttagaagtcaacagccagttcagaagtttttgaggatggacttggagttctagtagctaggctagttctagaagtgaaatgatggtaaacagcacatgtaggaccctttactcacatttgtgtatgtaatgtggctcagaaaaatgctgtgtagccaatatatagctacatatttgattttacagatattgttacctagaatgaggtgaaaggacatgtttaggattttttaaagtgtgaggtacgttaaaatagtaagcagtagtagcgtgatgcctgactatggctggaaggtgggtgctgatgatggacattggaaacagacctgaatgcatctctgtcatcaggatcaggaggcaaagagcctatcgtttcctagttctggtgggtttctttttttcatgtcttaataacaaacaaacaaaaagccctcttaggcatttagaataagcatttggggccaaaggggacagagagagaagcatgaaattttctttttctcttcagtagaattaaaattgctgtcagttttttcaatgtgatttgtgagaataaatctttaacacattacatgtaaataaaagaacaaaaaagtccctaccatccaaatgggtatttggataattttatgaagtctatattaacactttacttcttttttttcttttttttttttttgagacggagtcttgctcggttgccaggctggagtgcagtggcgtgatctaagctcactgcaacgtctgcctcccgggtccaagcaattcccctgcctcagcctcctgagtaacaggcacatgccaccaagcccgtctaattttttgtattttagtagagacagggtttcattatgttagccaggatggtctcgatctcctgacctcgtgatcctcccgcctcggcctcccaaagtgctgggattacaagcatgagccaccgcgcccagccagccaccatgctgggccattttttttctttttaattgatgtgagatttatataacataaaatgaaccacttagtgaacaaattgggagcatttaggacagtgttatgtaactactagctctctctagttctaaaacatttttatcagcccacaataaagccccatacgcattaagcagttgctaccctttcctcacttgccccagccccaacaaaccccagtctgcattctatctctgtggattggcctattttgagtatttgatataaatggaaccataccatatgtggccttccatttctgacctctttcagttagtgttgtgttttcaagactggcatttgtcagtgcttcatttcttttttatggttacacggtattccgttgtgtgtatttaccacagtttatctgcttatccactggtggacattcaggctgtttccaccttttgactgttaatagtgccatgtacatgtatttgtttgagtatctatttttaatcctcctggttgtacacctaggagtggcattgctgggtcagatggtaattctctgtgtagctttttgaagacctgccaagcttgttgccactgtggccgcatcattttacattcctacctatcaacaatgcacaagggttccagtttctccatccttgccaacacttgttatcacttgctattttccttttaaaaacaactgtagccatcttaggaatagcttagtttttgacagaagtaaataccaaggtaattaaatttttaagttctgagtattagaggtaatggttactgtagctcctaaaatgcacatcacatctctggtaggtgctggaaccctcatggtactgctgcttttaattttgcttttggaatgtttctttgtagctgaagctttagtgatgagaagttagaaatactctcattgacctttagtgttttgtcctgtgatatatatcaagtcgcttagtttgacattgttgaacttatttcctaagcaaaaaacagcagaagaagaaaatccagaacatgtagaaattcagaagatgatggattccctcttcttaaaattggatgccctctcaaacttccactttatccctaaaccggtaagtgtgttaacagttcagtgtgtagctagagcagggtgaccttcatagctttgatcctttgtgagactagctctttattttgtttcaggatacaaacttgtagtttgctgtaaattccaggcagggtctccatgaggaaagctcacttctggtcccatgacagttctggctctacccagatcttcagtgagcccctgccagctggggctgggcatggtcaggcatcatgctagtactgcctcttactgttttaacttacctcacactttaaaagatcctcagccgtagccacagggactcctcctttccctaccctctcagtcttctgttgcattttcattgtataatgggtttggagatgtatggatatctataccagcatttatggagtatctgctatgtgtcatattaggttctttacatacactaacacttaatgcacacaacactgaggcaggtactatagtttccatttcacaggggagaaaaccaaggtttaggaggtgggagagtgagaactaactctgggcccagctgtctccgcatgatgttccttcaccaggcccagccctctcaaatgctcctcccctgtctgtctgtcacccagacttggctctacctgtctattccttggagcctcatctcctgcttaccagcttctgtgaacccataaaacatgcttgtaccatcctttggtacttgttcacctgttgccctttggtgcctgtgttgttgtctgaaatggaatgtcatgaattaaagactagtctagaagtcagaacctgagctgagttctgctcctaactagctttatgatgcaggcaatcgctttacgtttcatttgtaccgaagagctaatctccaagatcctttattattagttgatggctaggtgattcccatgcaaatattttatcttctcagacagtaagcttttttaacctggttgtttttttttgtttgtttggttttttttttggtatatatgtatgcttttaatccagttgtaattacatgcaagtaagttcttgatggcaggaaccatctttagattcccaaagtccctgctatgggctgtgtaaaataaacaggtgaagagatgagtggaatttctcaactcctcttgtccagcaggtcttactgagatgaaggacgtgggcctttctgggccttacctgtgtgatctggctcttcccacccctttggtctcccttggcttgctacccccacccccactgatcttctgattccttgagcaggccaagtcccttgcgctttctcactgtgctcttcccctggcccagtaggctgcacttcctttttggcatggctggctccttattgcccaggctagacgcctttccctccttgcagatgttccttggctccttacctagggtagactccccttcccaccttgctgcatgtctcaccacttggctccttttcctcatagctgcattgcacatttgcagtcattcgctagttgttcattgctctctacttgtcttcaggcagcacgaaatgcatctactgttccactctgttcctcgcactagctaggatctaacacacggaagcctttagacattccttggaatactgggaagtgaaggagaagtgaatgtatatgtgtctatgtgcccaaatgaaaagcctttcttttttcccttaagaaatgtagaattgctagtgtaggttccccttgatattacttttttcatgttcaggttggtatttcacaccatctctgtagactccatttactaatcacagccattattttttgtggctttttttttttttttttttgagacagaatctcactgtgttgcccaggctggagtgcagtggcatgatcttggctcactgcaacctctgcctcccaagtttaagcgattctcctgcctcggcctcccgagtagctgggactacaggcatgcaccaccacggctggctaatttttttgtatttttagtagagacggggtttcaccatgttagccaggctggtctcaaactcctgacctcaaatgatctgcccaccttggcctcccaaagtgctgggattacaggcgtgagttaccgtgcccagcattttgtggctttttggactgtcttctttttctccatatttctctttaaacactagaatggaacacagtgtttttaataacagttgaacagtggtccagtggaagaaatgatttctttcacactctcatttttctctcacttagaatccaggatcctattgtgtttatggcttgtttttgttctttgtgaagtttccttgagcaaataactccatggacaggatggtgataaggaagaaagaatgctaatgtaactgcaatatatagtcaccattttagttgcaggatcagtatgaaacctgttttaattactggatttcttgggtagttctttcaaaaaaagacaaaaatctgaagcagatggtccttcaattaacattgcattctttccccctttttgtaattgatagctttgatttattttgatactgtttgagtttttcagtattatttcatatttgtttatagagatgttttcagtagttgaaagatgaggaaatttatcagtagtctatttttgactcttgttcccgtaagcatctttccttgcatctttttccatatacttcttagagctagcttttttttctgtaagcaaagtcaagataatattaatagagatcagtaaatcttaccaaacagcattaatggttgtttgagaatgtccacatgcatggtagataggaatagttgaggaagagatggaagaactgatgtttgaagatggcagaaatgttatgtaaaaatgtagaaaacgccgggtgtggtggctcatgcctgtaatcccagcactttgggaggccgaggcgggcagatcacgaggtcaggagatccagatcatcctggctaacacggtgaaaccccatctctactaaaaatacaaaaaattagccaggtgtgatggcaggcgcctgtagtcccagctactcgggaggctgaggcaggagaatggcatgaacccttaagagggagcttgcagtgagccgagatagcgccagtgcactccagcctgggcaacagagcaaggctctgtctcaaaagaaaaaaaaaaagaaaaagaaatacatgctgttggaatggttttgagacagaaaaccctaaaatacccaggtctctgggatcctgaagcagtgctgcccctcagcactgccgtcatgccagtccacttaggactttggctgtcaccatatctaacattttaaatagtctccattaggtttgctgactttcaagcaagtgaaaaaaagataatctccataaagtattttatatattatactttaagttaataggttcacagttcacacattttgtgttagagtcccttctggcttcccattgaatgtattatctcttttctagcctgtaccagagattaaagttgtgtcaaatctgccagccataaccatggaggaagtagccccagtgagtgttagtgatgcagctctcctggccccagaggagatcaaggtaagaagccaatgttgaaaccttaaatgtctgttacaagttagttgatcatagccagactccatttatttgacgtcatttgccttgcacttgtagttcttattccaatgtatctcagcagtttctaagtataagcaaactagtaatgttataatattcaaataccagtctcctatattctggctttattatgaggtacaggtttgagagttactgtaagagcagttttaaaatagctagtatcaatatcttattataatccaatctgaatactagcagtgatgttaagttgaaaacaaatggcttgcattgcatatatactagcaatagtttagtgtcagcatttcccccttattttattcatgtaatgctaattagtaatggaatctgaatctagaatcgagcatttggttatcagaagaggctagatatatcaaatgcagcaatccctgccatgtgaacattgaagcttatgccttacacagtaataatggtttctgccaggtgctcatcttcctggctggcttagcagcagggccttctttttccctcctcacttgatttgctacacctacactcaccccttctgtctgagcctctgccacctcagtgcaggtgacagccctggcaggataggctggcagctgaggagaaaagagatagaattgatcctcactagagagatgtttcccttcccttcctctgttccttggtctctgccctctggcctcagtccagttgctgtcattagcagctcagagctgaggctgcctctggcatgtccctgaagcccattggaatctaaatgctgtggagggctggctcctcttgtgctgttaggttgagaacccaactctccatgttgccttcttgtgaattagtttgggaactgaaccgtcactataagagtctgtgcctgtcaaagaatgcatttcaggttttaaagagctgagttaccaacgctcattggaatgcaggtggggattgctctgcatctttgtgcatttggccacagatgcacagcctgcttgctggctaccctgcagtttcttccattccagtttcctagttgttaaacttgatgaatgaatatgttggtggttatttttttaataggagaaaaataaagctggagatataaaaacagctgctgaaaaaacagctacagacaagaaacgagagcgaaggaaaaagaaatatcaaaagcgtatgaaaataaaagagaaggagaagcggagaaaactgcttgaaaagagcagtgtagatcaagcagggaaatacagcaaaacagtagcttcggagaagttaaaacagctgaccaaaactggcaaagcttccttcataaaggtaaggacaagggaaagaaaactgctcaaggggacctttgtgggggaagtggatagcaagtgctgggtgactggaatgtctgagccagctgacagcccacctgcgggatagagatgcatgatgctgactggctggaatcgcaacctttaatgttctagaatttttcatgtagggtcctcacaataacctgggtcctggcagcagcttgtcttccactcctttctctcttagattataagaacattgtagcagtgcagaatacctctatgctaactgattcagttttctgtaattctagtcctttttcatatttatggttgcatacattgttgtaatggtgatgtactatttttggcttttttcacttataagtacattttacagcataagcatgtggtgtttttaattgcaggatgaaggtaaagacaaggccttaaagtcctctcaagcattcttttctaaattacaagatcaagtaaaaatgcaaatcaatgatgcaaagaaaacagaaaagaaaaagaagaaaagacaggatatttctgttcataaattaaagctgtaatatattttgaatataatgtaaatattaatgtgtaagcttatattgtgtcattgttctgttttataataaaattcttgagaaccttcc

SEQ ID NO: 7435 - DNA, 21299 bp, Homo sapiens
caatgttgtaatttttactttaacttttaaatgaaaagtataattggatattatacttgtcttccataacaagttcaatgtctacatatctactcatttactcaacatccactcatccatgaacttgttagccacttttccatccactatgcattcaatgcatccatctgtaatccttgaaattcatctgaaacttgtttctaacatatttgagtctgactatcctctgagatctattctctctttcctttcctttttaattcattcagatgttgttttgtaagtgtttacatttatttcaagcagtactctccccaaatgaaccataagcatcttggcagtggatttctattcattttgtatattcccctaggacctgttgtggtgttctagcatctacgtgatacctaactctacaaattactactgatttaaaaaaataattcagacatctacatgcctactagatgacgcaccaggttttccacaaaacttcctatacatctagccctagcacccaaaacacctggaccctgaggaaactgtgaccacgagttgtttttgaagagcaaaacttctgagattaaaattccctaatcttacacagcttgctctaaaaaagtattccaaaacattcttagaaacttttgccccaaatattagccacaaaattgtcatactttcataactcctttgtgtatccatccatcacacacatacccttgtacacagctaacacattacattcaattaccccattgtagaagaggaataatttatttctatatgattttaataatgttccctaagtaattagtaatcaagattttcttcaaattcaaattaacaaatatgtttgttaatctaaataatatacatatttatgtatttatatatgtatatattttaatctttctgtaattcagtctttaactgtgaacttttacatgatggaagcagtgaaggactcaatgtcatagtacattttgatagtatttgataggctttttcaggtcaattaatttagttgcttgcaaatataaatcaagcttgctccagttccacaaggactccaccacagtctttaggatggagaaaaatcactggttttccatgtgctcctattttgacctcttcacttagactgcggatcttcttttttttcaaatccatcacagctgcattaatattatccaccttaagaaagggaaataaattgaacacatttgagatcataaaaataccaacttatagtatcataagacttagaaaaaactttgagagctcatgcagtctatctcctctgcctgtgggcaggaccattcttaaatcatcataaaaaataagcttaaaattttcagagaagtaagagaagttactaaatttttctaggtaagcaaccacaatgctcagaattttcaccattagtaaatgtttcttcttataatctaaatcatgtatgatatactttataatagtttattctggcagtactattagtgagattgaagacattgctttttcctgagaaccctgggtcctcatctataacaggcaaatgaggtctaccacataaattgactacagattaaaatgaggtaacagataaaaagctttcagtacagtttatggcataataggtacttagcaaatatgagtgtttccctgatccccaaaacttgccctgccaaaacacctggttattacctttgacattatcaagacacacatgaaaatcactattaaattgccatcaaaatgttattccccacccaaaaaaatttcaaactttaatgtttttgcagcctcttctaagttatttctattttcttcatacttatggacactctaggaggagcagatgtgtctctctatacttgacggagaaatgatctgcctctatcttggaaagtcacccacttagactgggaacctaagaaatggatgaaaaggtatgatatgaatggccacattcctaggcagtcataaatcactagtttaattaaaatcactagtttaattaaaaaaaacacacaaaagcacagagactagtttaacacccatgtacctaccattcagatctaataaatattagtatttatacaattttatttccaaagagccaaggattatatgctgaattctaaaaccagtcaaacagctaatgaggatactaaatgttacataaataagctatgatttcttcatatggcacatattctacttgtattcctgatatttcttttttaaacctcatagatatgtcaaagtcacacgtgcctagattctgaacacagctcatttcatgacatcttgcactgtagctggttaattctcatctttttcagaatagaacatgcactagaagctcgtggcaggaacggctcgacccacttagtgaggaaaattggtcctcactgatgtcagacattgtcaattttatcttatttttaaattcatatcaatattattaagcttttcttctgctgcgttaggtgggattggagcagcttttagtctaggactaattttcctcactaccaagccaaagcccttctgagtactcttcccaatgttacggaaattactatgactagtaagaaaaaactatccccacctctgtgtgtggattattccctctaatcctttcaaggggttctattctagcttcctaacatgcgtgcaatactcgaagctccgatgaagacatgaaaggtactacagatctttagagttcactctctgtgcagctctcctttccaggagagagctgtgaactctagcaccatggcctcctcagacttccaactcctatctccgcaactcagggagaccactaagttccacgtggattcccccttcctgcactgcagtctggaaactctctacagccagtaaactgggtaattgtagggctcatcttgtttgtttaccctctctcagaaatcaattcctgtgctgcctgatgtccaatgccagaaatccattatgtcatgtattttgtctaggttgcttgtttgtttcagggaggataaactgatctcttttacaccaacttggccggaatcagatttctaaattggcaggttttttctgtcagcaactaaaaagtgtcattacatgtcattctataatatgtcttttttactttgattgcttttaagattttcttgtcatctttgattttcagtttgactatggtgtgcttaggtgtggttttctttcttttgagacagagtctcactctgtcacccaggctggagtgtagtagtgcgatctcagctcactgcaacccctgcctccagggttcaagcaattctcctgcctcagcctccagagtagctgggactacaggcacacgccaccatgcccagctaatttttatatttttagtagagaaggggtttcaccatgttggccaggatggtctcgatctcttgaccttgtgatgtgcccgcctctgactcccaaagtgctgggattacaggcgtgagccactgcacctgccttttttttttttttttttttgagacagagtctcactctgtcacctaggctggagtgcaatggcatgatcttggcttactgcagcctctgcctcctgggttcaagcgattctcctgcctcagcctcctgagtagctaggattataggcatgtgccaccatgcctggctaatttttgtatttttagtagagactgggtttcaccatgttggccaggctggtctcgaactcctgaactcaagtgatctgcccgacttggcctcccacaatgctgggattacaggcgtgagccactgttgcccggcctggtgtagttttctgtttgccctacttggggttgctgactttcttgaaaccatagagtgatgttttacatcagattggtagtgtccttgtcaactattttttcaattactgcttctgttctattttctctctcttccttttctgggactccaactatattctgctagaacttttgaccatgtcctacatctgtcttatgctctattctgttttctttttcttccatattttttacctcttgattttggaattctagtttctagaactgtgaaaagaataatttctgttttaagccactaagtttgtgatcatttattatagcagccctagaagacaaatataactaccacacatcataccgaaattgaacaacgaagtagatggatggctgatagtgggagctaagtttctcactgttggaatgagaagataaaggctagtgtggtctatgtggtaatggattagagctggagacgtcagtatgctctgaggagtttatgacatttcatgaattctataatatagttatatacagaaatgtgtatagatatgtgtatatatacagtatacacacatatatatctccctgttgtcctggctcagtagggcaagaaccaatgacacacccagtagcaataagcacacttagaacctagatcttggcttctaataccattctccagtagtaggaaccagggctcctagatgaaatgtctaattatatggctagggcaaagagtaaagaagatgaatttggagcatctcatatagaagatgaatttggagtatcttacagtgccagaaaaagaaaggaagtgcttaaaaaacaaacacaaaacacaaaaccaaaaatgatcggggtatgtcaaagggacataagaatcaactgaaagagctcctaatggccaaagctggaacaatctgaggggaaaaaaagtagtattagattgtaatgcaagtcataaaataaatatccacaagtccatactgatataactctctattccttaagtgtgggccttgcataatgacttccttccaaaagaggatagtatggaggagaaaaaaagaacagctttccagtggagaaacctgacaacacctcctcacctgggagatcaaggttaatatcaacagtagtaagtcatgttgatagtatgaatccttgatatgatgtgatgaaaatgacactttacctctatggtcttcccaaaatcaataacatgagtctaataagaaaaatatcacacaaatctcaactgagggacagtttacaaaataactgaacagtaatcttcaaaagtgttaaggtcatcagaaacaaggaaaggagatcctagaaaaaggttagaaaacaaaacaaaacaaaaaaacaaggaaagtttgagaaactgccacatgcaagaggagcctcagcagatacgatgactaaatgtgatgtgctaggggtggaggagtgggggaagggagagcatcaggataaatagctaatgcatacaaggcttaatatctaggtaatgcattgtcaggtgcagcaaaccaccatggcatacgtttacctatgtagcaaacctgcatgtcctacacttgtatcctggaacttaaaataaaattaaaaaaaaaaaatgtgatgtgaaatcctagatgggatcctggaatagaaaagggacactgggtaagaactaaaggaatcagaataaagtacagactttagctaataacaatgaattggtattggttcactaattgtgataaatgtatcaaactattataagatgttcataatttttttaaagcatctgatgagattaaccactgtttataatgagtggatcttgtttttatcctgattagagcaaatcaactataaaaagacatttgtaaatcaatctgggaaatttaatttatgagctgtgtatagatggtgccaaaagatttccctttaattttgactgaagtgccagaaaataaagatgatgtcaccgtggttatttttgtatttcttagagacccaaactgagtaagggtaaaatgacatgttgttcatttaaaataatttaaggaaaaaagaaaaaaagatgacgtgtagcaagagcttgaaaactgttgaacctgggtgatgaaagtactgacatgattttttttctacttctcatatgtttgaacaatttcatgatataatcatgactttttccatagtgcccttttgataactcctatgctacatgtgattatgaatattttcatttatggaacattctatccaagtacaagtatctataattttgacattgcaacccaatgttttagtatactccttcttcaatatccctcaatcatgaattacttcaagcctgggcacagtgtttcatgctgggcacagtggttcatgcctataatcccagcacttaggtggggccaaggtgggaggatggcttgaacccaggagtttgacaccagcctgggaaacatagtgaagccccatctctataatcaatcaatcagtcaggtgtggtggcacacacctgtagtcttagctactcaggaggctgagatgagaggactgcttgagcccaggttgaggctgaagtgagctatgatggtgccactgcactccagcctgggtaacagagtgagaccctgtctcaaaaaactaataaatgtctaaatgacattgcactagcatctacttctacttctgttactatttctatcactaacttcaattttaaagctcttttaccatatttatccttctgttagtgttgctatacattttatgattcttttaagagtactcctaatgctttgtttggcagtaataaaaagaataaaattaaaatgtcttaattttctgaattgaaagtagatgcaatagttgtaagaaatgcagagcaatttgatttgggaaattaaatcagtccctctaagtaaggatgaaagtaacacagtcagtaataacccatcttttaaaaaaagggaggttttcaaacactgcatgttctcactcataagtgggagttgaagaatgagaacacatggacacagggtggggagtcatataccggggcctgttggggggtgggggaaagggggggataacagtaagagaaatatctaatgtagacgacgggttaatgggtgcagcaaaccactatggcacatgtgtaccttatgtaacaaacctgcacgttctgcacatgtatcccagaacttaaagtattaatttaaaaaaggggggggttatggttttttaaaactgcttttatagtccttcaaacaattacagagtgtaccatatagttctggaagactttgcataccactagtgaaaatcggggctatttacttttcttttttttgagatggagtcttgctctgtggcccaggctggagtgcagtggtgcaatctcagctcactgcaagctctgcctcccgggttcatgccgttctcctgcctcagcctcccaagtagtaggtgcccgccaccacgcctggctaatttttttgtatttttagtagagacagggtttcaccgtgttagccaggatggtctcgatctcctgacctcgtgatccacccgcctcggcctcccaaaagtgctgggattacaggcgtgagccaccatgcccggccctttacttttcacttcaacttcttaccagctatttcctttttctttctttctttcttttttttggtatttatctgtatctgagagtttatcttgattctgccccttcacctgcaaattaagagtgacaataacccgaataaaaaatgtttggattgtcacaatcagaattcaaaactttttttttttttttttgagatggagtctcgctctgttaccaggctagaatgcagtggtgcgatctcagttcactgcaacctccgcctcccaggctcaaggaattctcctgcctcggcctcccgagtaactgggattacaggcgcgtgccaccatggctaatttttatatttttagtagagataggtttcaccatgttggccaagctggtctccaactcctgacctcaggtgatcctgcctcggcctcccaaagtgctgggattacaggcgtgagccactgcacccggccagaattcacaatcttcaggtacatctcataacctctttggtcctcagcttccccatctgaaaatggcaatacaatcttgtttatttcaagccaagtaattgggctaaataactctaaccttaaggtatgtaatcctcaatgaccaaattttatgaaaaagtaataatgtacccctcttaactatacatgacatttggacagatttaacaaacataagctttaattttatatacagttgtaatggtgctgatataatgaatgacttcaatcctcaaattggtataaatccatgaaagttaaagtgaaaagtctggattaagtatttgttgtatttgttccaactgtatctcctcaaaagctaaaagctgagtgaattatgcaagcctaacactgtctcactttacatagggttcagatggttccagtcttcttggatttatttcagaagagcacatgttacctaagcttccacaatgactatatagtctagtgggggctatgtggagtatccatcaaatgcttgtctctgctgaaattttcacagtggatagtaaaatatttttttaattccctagtttattgtgaaaagccaaaatgagaataaaattttttaaaaaggagaatattttcctttcttgattgaagaacaaacattacccagtatgtaggaaatgagttacctcactagcctgttactttgaagttataaattttttctttcctaaggaatatatgctgtcaaaaaagatctgcaaaacatataaaagcacaaacaagaaaatgagtcatctattgtctaatcactcagaaaataaaactgctataattgctgcatttctctaccttttgtcttagtttttaaatactattaatatttttctcatgtgcttttccccagcagcctgcaacagtaatttcaagattaccttgaaatcaaatccaacatctctgtctgccactgggaagccaggctcccatgatccttactacctactcatctaaccagccccttctctgtcaccggtccctatgattctgcagcccctccctcagcctcagcactgcactcatcaccctccatgtgctccaaccgtggggctgccctcttcatcccatctgagctcccactcacaattccaggccacaccacccctgcacagaggcctgttaccccatgtgagctgggccactccctgtgctgcagtcctccttgccttttgtgggattcaacatcccgcccggaagcgtcccagtggatacacatcctcctcaccctgtgtggctctgactccccatacctgccccctaccccatgtgaacatctgcctcacccttctcaggccctgctcccataccaggccactccctgcgaggacacccagcttatcccacctgggcttcaactccccacattagtcaccattttcccctgcaacgatgcactccccacaggaccagccctggccctccatgctgggcgtgccctccccacagtgtcggtgcccctaccctgctctggctctcccactccttgctgccgctgcccctcaggtggacgctcttctcaacatccttgggctccagctccctgctctgagctgtgtctcagtccattcgggctgttagaacaaaatacctaaactaggtggctcagaaaaaacagaaatttgtcagtttgagagcctgggaagtccaagatctaagtgctggcagattcaacatctggtgggggattggtggttcacagacagcaccttctcactgtcctcccgtagcggaaggggcaacgggtgtctctgaggcctcttttataaggacactaatcccattcatgagggataggcctactgctcatgaatgaggcctcaggaatcatctccctaaggccccacctcctaacaccatcactttggggttatgatttcgacatatgaattttgaggggacataagcatttagttctaagctggcctcccatgctgatgccctcctcactctgacactgcaagtcaagatgctcccttgggcacaaacgcacaaaccctgctcagactcggacaccttgcactggaactccccatgcatgggcactcagtctctggcttccccggggcaggcagctctcactcatggatgccctcctcaccttgccaggatcccaacaccctgctttaggccagtctggttctccccatcaacaaaaatgactcttctgctctgtcctacctgaagtcttcaggaagggaaggaatggggaggagtcataggtactcaatactgtttatttccttttttgtttttggtaagtagaaagaaatacagtcatgtgtcacttgatgggtacgagtcctgagaaatgcatcactaggcaatttcattgttgtgcgaacatcaccacacctggatggtggcgcctactacacacctaggctacagggtacagtctattcctccttggctacaaacctgtacagcatgttactgaaaactgtaggcaagtgtaacacaatggtgtctaaacacatttcaacacagacaaagtacaataaaaatacagtgtataaccttatgggacctcatgtggactcatcactgactgaaacattgttatgcggtgtgggactgtatttggctaaactagtaaggtatgctaatcatcccttatatttcctctttgttgcaactagcactattacttctgtttatccttttgtactttgtaggctgtgttttagtcagtcacctttaatcctctctggaaaatgaggagcatgtgtgaataaatgaagcaagcaggcaagctctgggtagacaggaactttctgcttgttcagccacatatccccagcatcttgtacagtgaaggacagagtgataccaaaaatacttaacaatcaggaaaatacaaagatactaatcagatagaattgtgcggctgagcatggtggttcatgcctgtaatcccagtgctttggaagggctgaggtagaaggattgcttgagccaagagtttgagaccagcctgggcaatatagcaagaatttgtctcttaaaaaaaaaaaaattagctgggcatgatggtgtgctgcctgtagccgtagctactcaggaggctgaggtaggagggtcgcttgagctcaggagttccaggttgcagtgcgtaatgattgtgccactgcactccagcatgggtgacacagtgagaccctctctctgaaggaaaaaaattgtagagggagaagggtgtctgaagggtcccagaaaagggtccttctggaaaaggaatgttactcaggtgttacagagcagcagctgtttaccaaccaacacggaagcatttaaatatttttacaaactcaatacaaatttgagtaagtatttctggtggcccttaaagtcttcactgtgacacactgtgctgtctggctaagttctccagagaaagcacggccagctttgtctcctcaagcagaggcacgcagaaggcagggaaggtgacccccctcttgccatcgcaggcagcagttaggagcacaaacacaagctgtgccagaaaacagtgggtgattcagtccatacttgagcaagagaagagatgggacaagatgccctctaaaattcctctagtgagaggcaaagacacacaagaaatatgagtaaacctcacaagaaaaagtagaaaccaactcaacctcgacagaaaaatgctaattaactattgagatcgtaatccacatgtgagaaaggaacatttcgtcaagtgagtcaacaaaaaccatggagcatgcaccaacagatatatgctaagtcagaggttttataagatcctggtgaaaaaggacagaaagtagccctgtgattacagaggggaaagccaattctctgatgagtggttcaacattttttttttttttcctgagatggagtcttgctctgttgcccaggctggagtgaagtggcatgatcttggctcactgcaacctctgcctcccaggttcaaacgattctcctgcctcagcctcccaagtagctggaattacaggtgtgcgccgccacgtccagctaatttttgtattttagtagagatggggtttcaccgtgttgcccaggctggtctcaaactcctgagctcaggcaatctgcccacctcggcctcccaaagtgctgtaataagcatgagccaccatgcccaggtgacacaccactttttaaaaatcaccaagcgtggcatccattgatggcctccagtacctttctccttttcctccttttaattacagcaacccccaagcttcagcagggcacataactgcctagctagagactacattccccagcctcccttgcagagaagtgtgtcatgtaactaagcttgggccaatgggataaggacagaagtgatcctagagcatctccttaaagccacttgccaggtattcccactccaccttcccttcccttccctctggctggcaaatggtgatgcctggagcaaccttgtaagtcatgtgtcatggacagcagagctgcccatcagcctgggatagctaatattagactgaaaacagaaaaataaaatcttgttaagccacttaatttttttgtggagggcagagaatgatgatgggggtattatactaaaatagcacctaactaaccactgttcacaccttctcctcttacctaccttcattttatatccaatacatttgcatgtcccccttataatctctgcttttgaatctgccattactgaacttccactattccttacttaactgaactaaatcacatagctgaactcctttgaaagcatgggctctcttgatggaatactgatagtgcagtgtgggagaggggggagtggattcaaaggtcctgcttctcatcctggggggtggggtagggcttagacaaacactcaggtccactgacaaagacctgcagccaaaagtaactccctaaaaataaaataaaggctaatattaggacttgtttagttccctgcttaaggtcttatagcttccccaccgcaaatttaaaactcagttaatataatgaaggcaactggcatcatgggtaagagtgcagaccctggaatcagaaccaatctgggattcagccccatacctgctattgatatgaccatgggcaaattaactactctgtctcagtttcctttcctgtcaaatggggataatagggccctcacagggtagctatgaaaattcaagaaaatagtatgtgttgagttactttgtagacatactactagaggactcactaaatgttagttcttttttttgagacagggtctcgctctttcattcaggctagagtgcagtggtgtgatcacggctcactacaacctccacctcagcacttcctgggctcaagtgatgctcccacatcagcctcccaagtagctgggactacaggtgcataccaccacacctgactagctttttgtatttttagtagagacacggttttgccatttggcccaggctggtctcaaactcctgggctcgagcaatctgcccaccttggcctcccaaagtgctaagattacaggtgtgtattagtccattttcacgctattgataaagacatacccgagactgggcaatttacaaaagaaacaggtttaatgatttacagttccacgtggctggggaggcctcacactcatggcagaaggcaaggaggagcaagtcacatcttacatggatggcagcaggcaaagagagacagattgggcagggaaaatcccccttataaaactgtcagatcttgtgaaacttattcactatcacaagaacagcacggaaagacctgcccccatgattcaattacctcccactggtccctcccacaacatgtgggaattcaagatgagatttgggtggggacacagccaagccatgtcgaggcataagccaccacacccagccactaagtgttagctgttatgataactctatgcctttccacatgcaattccctctgcctgaaataactttctccttttgttcacctagggaattccttcacattcattgtaacttatgctctgtgaggccttcccagcaactcaatctgccaggagcaatcaatctccttcatctgtgctactgcaaagtcacatatatcaattctacttatcatagtatattgcacttgggtgtttaaatttctgaccctcctcactatggacatgactcatgtcttattcactgctaaatcccaagtacttggcagaatacacattatagggtctcatacatgtttgcaataatgaactgaatacatccttgaattcactctagaatcaaatgacctctcctctgtattagaaatttggcctaacaggccaggcaaggtggctcacgcctataatcccagcactttgagaggctgacgtaggtgaatcacctgaggtcaggagtttgagaccagcctgaccaacatggtgaaacctcatctctactaaaaatacacaattagccgggcatggtggcgcatgcctgtaatcccagctacctggtaggctgaggcaggagaatcacttgaacccaggaggcagaggttgcagtgagccgagatcacgccacactgcacttcagcctgggcgacagagtaagactccgtctcaaaaaaaaaaaaaaaaagaaaagaaaaagaaatttggcttaacaattatgtcattctttctataaaaagaattgtcctagcaaattaaatcgatgcataattgtcattgctgatattctaaaaggcagttatctgaacatgaacatctatagaaatgttctctaatggacttttcttgtctaacatttcttcacattcctttaaaaattgttggcaggtgcaattcagaagatcttaaaaattacagtaattgaaaatgtattgactttgtaataacgaagaagttattagcattttaaagagagaaaagagttataaagaatacttagcatgtacactgaaagctttaaagtcttttcatttgtttctcctaattgccttatgacagtgaaaacagctgtattcctgttacatgggaggtcaaacatgatcaattctaaagcagactctacattgtggctaactttggtggcacttacagtggtcactgaatccagacttcaaaaaaatacattaatattatatgttagaattttctaaagggaaaagaaatgtatgtaaggatccacctttgaggaggatgaatattatcattctccttaaagaactttacaaaagtttctaatgacagtgaccataaatagacttaaaaagtagaagacattttttaaaagagagatttaaaataccaggcattaaaataattaaaatacctcgatgcagatgtgatgcattcctccagccttgtttttctgcagaaaacctgcaattggactgtcacgtcccaatggatgaagcagttccatcttggtatttcccaggttgacaaaaacaacagatactccatgttcaggaagagggaccgcttcacttacctgggcccccagaatattcttataaaatgctgcagccttttccaaatctggcactgctatggctacatggttgagtcgacccaggttccacacagaacctgtcacttgatccaagggctgtgatgtggaagaagctcttactgttggaatgggagcttgaagtctggaaaaaagccctgaaaaattgaacagccattgatatccttcttttgagaattaacgcacttctaaattgaattttaaaaactaaacaaataatgcatgcaaaaattcattatttatatatctgttctttttaattattgaaatgaaaccaggagataaatggaaaaacttacatcagaattactctgctctgcccattcaaataactgactggaataaaaaagctaattctgagctgcagttagatttaaaacacaggataacattttttcataacaattcatatttactggtaacacttaaatagtggcatattaagcattacttgctattctctgcatttcacaatgaaacaacatatatttaataagagcaagcaatttctctacctgtacccaattttttgtcttatattttgtaataagttcattaaaggtataaatatacattaaaagagtacatacagtactctttaatgctctgttgcccaggccggagtgctggagtgcaacagtgcgatctcagctcactgcaacctctgcctcctgggttcaagtgattcactggcctcagcctcccaagtagctgggattacaggtgcctgtcaccatacccagctaatttgtgtgtgtgtgtatgtgtgtgtatatatataaatatatatatatatatatatatatttttttttttttttgagacggagtctcactatttcgcccagaatggagtgaagtggcgcgatctgggctcactgcaacctccgccccccaggttcaagcgattctcctgcctcagcctcccgagtagctggaattacaggcacctgccacatgcccggctaatgttgtatttttagtagagatggggtttcgcctcattggccaggctggtctcgaactcctgacctcaggtgatccacccacctcggcctcccaaagtgataggattagagatgtgagccactgtgcccaccctaatttttgcatttttagtagagatggggtttcaccatgttggtcaggctggtctcaaactcctgacctcaggtgatccacccacctcggtctcccaaagtgctgggattataggtgtaagccaccattccagtcagtttttagcatttttaaaattcactgtcgctgtgtcctcatcagatagtttcttgatctccacagataactctgcattccattcatttagcaaacagtcattgcatgtcattaacaacaagaatggcctgaatttactgtgcacctactgtctggcactgtatttatttttttacaccaactatctaatattcacaacaaaccaagttagaaacttagtaagtttcattgttatcatgaaatccaagtggattacaaccgagtacacatatacataaatgtacaattgaaactaaattgcaaaaaaagaataccttccacctcagcctcctgagtagctggaaccataggcatgagccaccatgcctggctaatttttgtacgttttgtagagatggggtttcaccatgttgcccaggctgcccatgttgctcctgggctcaagcgatcctccgaccttggcttcccaaagtgctgggactacagatgtgagtcacagcactaggccagtgaaaatgttttgaaatagacaaatgtgatagttgcactaacccagtgaatgtaataattactgttaaactgtactttattatttatttattttgagacgaactcttgctctttcacccaggctggagtgcaatagtgtgatctcggctcactgcaacctccaccttccgggttcaagcgattctcctgcctcagtctcctgaataattggtattacaggcgcatgccaccgcacccggctaatttttgtatttttagtagagacagggtttcaccatgttggccaggctggtctcgaactcctgacctcgtgatccgcccacctcggcctcccaaagtgccgggatcacaggcatgagctactgtgcccagcctaaactgtacatttttaaagggttttgttatgtacattttaccaaaaaaaaaaaaaaaaaaaaaaaagatccaacaataaaaatccaaaggtgaaattgtgtagaccaagcaaactgggtagagaacactgaataaaggagttaaaaagagacagagctttatatttaataaaaatgtgttcctgaaaagtttgttgtgaattgaactcttaattattatatttctcctttgacttgtagaaacttttttccagcttgaggtatgatgactaatagaaacggtgtatctttaaggtatacaatgtgatgttttaataaatgcataaattatgaaaatgattaccaacactgaagctacctttttaaagctatttttatttcaggttgccctccaactagcaggaattcacagctctttagttttagatttctctgcctcccatttcagaatagtgcagcagaattgcattattttgaattctgcaatgtttaatttgtgattattccaataaaggttgctttgcatgaatatactacagtgtaaaaccatgtgcaaataaatgcataagatatttaaaaacagaagtgttaataaaaaacgcatgtaaagatgaatacagattaaagaaactattttcacatgtcaggaagctggtatacaagtaaaagatcaaaatcggatgtgtatgttaactctcattccaatcttcctttcaatatcaattctcgttaatcacttttagtgtcctgacttaaaaacaacattgcatttctttcagttcagattttgcatttatttcagatcacactttttagacactgtccctgaatacataaaggtttagctgcaaggatctatactcaaatgcattaagagtacttactatttaaagacattagatgttaaatttgtataaaaagtactataaaagtgaataatcacttgtaataggttttttaacagctttatctcttaatagtttttaaacagacttaaaatttatataccataaagttcacccatttgaagtgtacaattcatttctttgcatctttgcaaagttgtgcgaccttcacataatctaattttagaacacgtaataagtttgtttgtttttttgaaacgagtctggctctgtagcccaggctggagtgcaatggcgcaatcttggctcagtgcaacctctgcttcccaggttcaagcaattctcctgcctcagcctccggagtagccgggattacaggagcgcgccaccacgcccggttaatttttgtatttttagtagagatgggttttgccatgttggccaggctggtcttgaactcctgacctcaggtgatccaccttcctcagcctcccaaagtgctgggattacaggcgtgagtcaccgcgcctggccgaacataagtctgaattttcactgaatatctggtttgaggaaacatacgtatttagaaagtcattcattagaagtgctttcaagttagtctggtaagttttctcttaaacatttgaccagttaatttcacagcaccatatatatatcttcaacttgtttcaaactatgatcaattttttttattcattacagtaagtaaacagattacatttctgttagcccatttacagacgattaatgaaagtaaacctatgcagtcatgtaagttggtcattcttgtctcccacctaacaggttcaatttccattttcagaacttttctacgtgttcactctgatttttctgtgcttttgtttttcggcgaagttttatgttccttaaaagaggggccataacatagaattaccatgtaatccagcaattccacttatgagtatacacacccccaaagaagcgggaattcagaagtatttgtacacccacgttcatagctgtattacaatagccaaaaggtggggataacccaaatgtctatcaagagacgaatggataaacaaaatgtggtatacacacacaatggaatattattcagtcttaaaaagcaattttttttttttttctgagacggagtttcgctttggttgcccaggctggagtgcagtggcgcgatcttggctcacgccaacctccgcctcccgggttcaagcgattatcctgcctcagcctcccgagtacccgggataacaggcgtgtgctaccacgcccggctaatttttgtatttttagtagagacgggctcacgcctgtaatcccagcactttgggaagacgaggtgggcagatcacctgaggccaggagttccaaaccagcctggccaacatggtgaaatctcgtctccactaaaaatgcaaaaaattagccgggcgtggtgccgggtgcctgtaatcccagctactcgggaggctgaggcggaagaatggcttgaacctgggaggcagaggttgcagtgagctaacgccactgcactccagcctgggcgacagagtgagactctgtctcaaaaaaaaaaaaaaaggtaaattttactttatgtatattcaaccacacacacacacacacaagtggagacattaagcttcaagtatcttaataggacaaatcaaaggcaatctttggaatacactgtcttcatttttcctttatgccaagatgtgtatgtaagtacaaaacaaacatgcacctttatctgtattgagttcttgcagtatgtatatgacctgttggaagtcatactttttcccaaactgtcaatcattaaagtgtgcagttctaaaaatagacataaaaatgccttttcccaaatattcatttatttatagttttacgttcctatcttgtgtatcacctaagaggaaggtatgccttacggttaagaatgtgggctctggtgctagaaggatttatcacgaatgtcccggagtaactctggggcattaccacttggcaccttcttcctaatagggaatctcagattaagggaaatacttgccctctcataaaaggaggaagagaaaaaaaaaaaggataaaaagaggagaaagtgagtcagaaaacgtgacaattattacagttatttctgtcataactgattctatgtacatattttaaaaaaaatgaagggggagagaactcaagaaagtttccaaatccacatgcttttatctgtgtacgcgataaatatattagtgcacgtggaaaaaccactccttttgtattctttacaccactgacctttgagtgttcccaacagaaagctggtcacgcttggagttcggccgactagtagttgttgtttttacggaacgtgctctcctttctggtttctccccagtctctttattggtgcgcggtaaaataacttaccgatccgcttctatttacttctgtccctgccctgcctgacctgccgggcaagttccctcgactctcccgcccacatactggaaggtgcagagcccaaggcgcacagctctcggatggaaatgggactcatgcacaaggcaatccccgctactaagcggtggcgcttctggaaggcaccctctgcctaagtgacagcagctgctgtggaacgcgcccccgggggaggacattagatcaaggtgctttggccacgccgaggcctcctccgcccccgaccgccgttcccacgctccctgtcccatggcgaaggtcgccggtgcccggtattcacctacggcattcgcggctgcagccttcagcacccgcgccattttgg

SEQ ID NO: 7436 - DNA, 931 bp, Homo sapiens
ctatatttactatgtctttttctatacatacatacttaggataaagtttaatttataaattaaatgttaatgaggctaacagtagttaataataacatagaacaattataacaatataccagcattactactcttgcacttttacattgttaagtaaaataggagttactggaacacaagcgctgtgatactgcaacaatctgataacccagacagtactgagtgactaactggtgggcgatatatacagcctggatgtgctggacaaagggatgattcaagggtgagatagagtggatggcacgagatttcatcatgctgctcagaacaatgtgcaatttaaaatttatgagttgttcatttctagaattttctatttaacattttcagactgtggttgactgtgggtaactgacaccatggaaagcaaaactgtggataaggggggactaactgtaccagtaaatgctgcctcatcacctacacccttggtttacttctcagataaactcaggaagtttaaatggcattctgagaatctgtagctgcaacatagtgagcccaggagtcccggtccagcagctagtattaaattctctgttgctagcttggacctctctcgatatctaggaattgtctgcagtgtgcggtggcacagtaacaaccatttgtttctcaacaagaatctgataatgttgcttgaacctcctgaaccagtgctgcatgctctgcttcttcatatgtttgtccttagatttgaccaaaaacaataactgataatgtaatacagattccccagctccctgtgagctgggttgagcccaggaagtctgtacaagagagcatgtctactgggatttaaatagcccagaaacaggcagccggaatttcttatactcttgtgctctaaaaaaaaaaaaaaaaaaaaaaa

SEQ ID NO: 7437 - DNA, 931 bp, Homo sapiens
ctatatttactatgtctttttctatacatacatacttaggataaagtttaatttataaattaaatgttaatgaggctaacagtagttaataataacatagaacaattataacaatataccagcattactactcttgcacttttacattgttaagtaaaataggagttacttgaacacaagcgctgtgatactgcaacaatctgataacccagacagtactgagtgactaactggtgggcgatatatacagcctggatgtgctggacaaagggatgattcaagggtgagatagagtggatggcacgagatttcatcatgctgctcagaacaatgtgcaatttaaaatttatgagttgttcatttctagaattttctatttaacattttcagactgtggttgactgtgggtaactgacaccatggaaagcaaaactgtggataaggggggactaactgtaccagtaaatgctgcctcatcacctacacccttggtttacttctcagataaactcaggaagtttaaatggcattctgagaatctgtagctgcaacatagtgagcccaggagtcccggtccagcagctagtattaaattctctgttgctagcttggacctctctcgatatctaggaattgtctgcagtgtgcggtggcacagtaacaaccatttgtttctcaacaagaatctgataatgttgcttgaacctcctgaaccagtgctgcatgctctgcttcttcatatgtttgtccttagatttgaccaaaaacaataactgataacataatacagattccccagctccctgtgagctgggttgagcccaggaagtctgtacaagagagcatgtctactgggatttaaatagcccagaaacaggcagccggaatttcttacactcttgtgctctaaaaaaaaaaaaaaaggaagaaa

SEQ ID NO: 7438 - DNA, 932 bp, Homo sapiens
ctatatttactatgtctttttctatacatacatacttaggataaagtttaatttataaattaaatgttaatgaggctaacagtagttaataataacatagaacaattataacaatataccagcattactactcttgcacttttacattgttaagtaaaataggagttactggaacacaagcgctgtgatactgcaacaatctgataacccagacagtactgagtgactaactggtgggcgatatatacagcctggatgtgctggacaaagggatgattcaagggtgagatagagtggatggcacgagatttcatcatgctgctcagaacaatgtgcaatttaaaatttatgagttgttcatttctagaattttctatttaacattttccgactgtggttgactgtgggtaactgacaccatggaaagcaaaactgtggataaggggggactaactgtaccagtaaatgctgcctcatcacctacacccttggtttacttctcagataaactcaggaagtttaaatggcattctgagaatctgtagctgcaacatagtgagcccaggagtcccggtccagcagctagtattaaattctctgttgctagcttggacctctctcgatatctaggaattgtctgcagtgtgcggtggcacagtaacaaccatttgtttctcaacaagaatctgataatgttgcttgaacctcctgaaccagtgctgcatgctctgcttcttcatatgtttgtccttagatttgaccaaaaacaataactgataatgtaatacagattccccagctccctgtgagctgggttgagcccaggaagtctgtacaagagagcatgtctactgggatttaaatagcccagaaacaggcagccggaatttcttatactcttgtgctctaaaaaaaaaaaaaaagaaaaaaaa

SEQ ID NO: 7439 - DNA, 1645 bp, Homo sapiens
atatcatcataattattttattattattatttgctatcacagagtagtgtacaactaacagaacaattatattgggtaagctgcatgaaaaacaattgaagagggaaaaataatatctccatatatatgtaattgatttgtactatgcactaataaagcctgccttaaatttctgttctagtttaaaccccgaaacagtaccaggcaaggttagtggctattgaaaatatcattaaggacagggttatctaaagacacactggatactacattaattttgcaaaaataaaaagacagtatacagtgttcagtttaaaaacaaatcatatgatcttacatttcagctttttttctttgaaatcagtggtgtaatgcggagttaaatacttttaggcaaaaaacaaacacatacacacacactcacacaaaaacaaattaataaaacaaaagcctcttttaaaaccaccctattgaccatcatcatttttttcttcacccttttcatctttctattcaccaatgtctttccagtcctttttttcttttcttcttttttctttttccagtttttccaacttcccctttccctgcatcagactttcttttatcccagaatacagcaatagcctttatatctataatcttaaaagcctttctttcctcaaggctgtatattatctgcagcagtaattcttcatttctttcatttctctcagttttcttacatcatcgccaatgaattagccaagatgttctcctgtgctcttttggtgaaattttcagaacaaaacaagaaaaaggagatccctttggtacattagaatcctggaacttctttcttctctctctttctctctctcgtttccttgtagacagaatatagatttttgtttctttcttataatgggcctgttcaccttcaccctgtcttccaattttttctttctctttagcagaaatgaatttccatcttttctgaacataaaaaaaagaagaattctaagaagttgactgaagcatctgggtgctttttcttgggctccttctggcaagttggcagaacgaaggaaagaaggcagggaaggagggagagaggagggagggaaggaaggaaggaaggaaggaaggaaggaaggaaggaaggaagggagggagggagggagggagggggaagggaggggaggggagggaaggaaggaggcaggcagagaggtgggggaaaagagaaaaaaaaaagaaagagaaaggaagaaaggaaggaagggagagagtgagaaggagagaaagaaaaagagataggaagaaaagcatgcaaaggcattttgcctcttactcccttggatctcctttccccaagtgtctagttaacttttcctcagccaggcagtcacccagtacctgttttgctcttacttgccctgacactgtctgtagcgcttaatgctttgccatgactgtcttcttatttaaaaaatagttccataataaaagttcattatttccttctgtcagccaagaaagtatgtagctttctatgttttctacctgtctgtaactccaaccctgccccaacatgaggtcctctgtgtactttgtttgacagaggctttgctttctcattctttaacaatgttacttctcaaaa

SEQ ID NO: 7440 - DNA, 226 bp, Homo sapiens
tttcaccttttggatctgctgtgatgcagaaagggcaagcagagctgcagagctcctcaaaactgtgtggggtgctctccaaaggccagccagcctgcatgttccttttcattgagagatgactggaaatatagaagtgaggggtgtcacctccattgaaagaatgggtggcagatataaggcccaaagtccttttcttttagagtttagatctaatatgacagat

SEQ ID NO: 7441 - DNA, 1500 bp, Homo sapiens
atatcatcataattattttattattattatttgctatcacagagtagtgtacaactaacagaacaattatattgggtaagctgcatgaaaaacaattgaagagggaaaaataatatctccatatatatgtaattgatttgtactatgcactaataaagcctgccttagatttctgttctagtttaaaccccgaaacagtaccaggcaaggttagtggctattgaaaatatcattaaggacagggttatctaaagacacactggatactacattaattttgcaaaaataaaaagacagtatacagtgttcagtttaaaaacaaatcatatgatcttacatttcagctttttttctttgaaatcagtggtgtaatggggagttaaatacttttaggcaaaaaacaaacacatacacacacactcacacaaaaacaaattaataaaacaaaagcctcttttaaaaccaccctattgactatcatcatttttttcttcacccttttcatctttctattcaccaatgtctttccagtcctttttttcttttcttcttttttctttttccagtttttccaacttcccctttccctgcatcagactttcttttatcccagaatacagcaatagcctttatatctataatcttaaaatcctttctttcctcaagtctgtatattatctgcagcagtaattcttcatttctttcatttctctcagttttcttacatcatcgccaatgaattagccaagatgttctcctgtgctcttttggtgaaattttcagaacaaaacaagaaaaaggagatccctttggtacattagaatcctggaacttctttcttctctctctttctttctctctctcgtttccttgtagacagaatatagatttttgtttctttcttataatgggcctgttcaccttcaccctgtcttcaaattttttctttctctttagcagaaatgaatttccatcttttctgaacataaaaaaaagaagaattctaagaagttgactgaagcatctgggtgctttttcttgggctccttctggcaagttggcagaacgaaggaaagaaggcagggaaggagggagagaggagggaggggaggaaggaaggaagggagggagggagggagggggaagggaggggaggggagggaaggaaggaggcagacagagaggtgggggaaaagagaaaaaaaaaagaaagagaaaggaagaaaggaaggaagggagagagtgagaaggagagaaagaaaaagagatcggaagaaaagcatgcaaaggcattttgcctcttactcccttggatctcctttccccaagtgtctagttaacttttcctcagccaggcagtcacccagtacctgttttgctcttacttgccctgacactgtctgtagcgcttaatgctttgccatgactgtcttcttatttaaaaaatagttccataataaaagttcattatttccttctgtcagccaagaaagtatgtag

SEQ ID NO: 7442 - DNA, 226 bp, Homo sapiens
tttcaccttttggatctgctgtgatgcagaaagggcaagcagagctgcagagctcctcaaaactgtgtggggtgctctccaaaggcgagccagcctgcatgttccttttcattgagagatgactggaaatatagaaatgaggggtgtcacctccattgaaagaatgggtggcagatataaggcccaaagtccttttcttttagagtttagatctaatatgacagat

SEQ ID NO: 7443 - DNA, 226 bp, Homo sapiens
tttcaccttttggatctgctgtgatgcagaaagggcaagcagagctgcagagctcctcaaaactgtgtggggtgctctccaaaggccagccagcctgcatgttccttttcattgagagatgactggaaatatagaaatgaggggtgtcacctccattgaaagaatgggtggcagatataaggcccaaagtccttttcttttagagtttagatctaatatgacagat

SEQ ID NO: 7444 - DNA, 1500 bp, Homo sapiens
atatcatcataattattttattattattatttgctatcacagagtagtgtacaactaacagaacaattatattgggtaagctgcatgaaaaacaattgaagagggaaaaataatatctccatatatatgtaattgatttgtactatgcactaataaagcctgccttaaatttctgttctagtttaaaccccgaaacagtaccaggcaaggttagtggctattgaaaatatcattaaggacagggttatctaaagacacactggatactacattaattttgcaaaaataaaaagacagtatacagtgttcagtttaaaaacaaatcatatgatcttacatttcagcttttttctttgaaatcagtggtgtaatgcggaggttaaatactttcaggcaaaaaacaaacacatacacacacactcacacaaaacaaaattaataaaacaaaagcctcttttaaaaccaccctattgaccatcatcatttttttcttcacccttttcatctttctattcaccaatgtctttccagtcctttttttcttttcttcttttttctttttccagtttttccaacttcccctttccctgcatcagactttcttttatcccagaatacagcaatagcctttatatctataatcttaaaagcctttctttcctcaaggctgtatattatctgcagcagtaattcttcatttctttcatttctctcagttttcttacatcatcgccaatgaattagccaagatgttctcctgtgctcttttggtgaaattttcagaacaaaacaagaaaaaggagatccctttggtacattagaatcctggaacttctttcttctctctctttctctctctcgtttccttgtagacagaatatagatttttgtttctttcttataatgggcctgttcaccttcaccctgtcttccaattttttctttctctttagcagaaatgaatttccatcttttctgaacataaaaaaaagaagaattctaagaagttgactgaagcatctgggtgctttttcttgggctccttctggcaagttggcagaacgaaggaaagaaggcagggaaggagggagagaggagggagggaaggaaggaaggaaggaaggaaggaaggaaggaaggaagggagggaggggaggggagggaaggaaggaggcaggcagagaggtgggggaaaagagaaaaaaaaaagaaagagaaaggaagaaaggaaggaagggagagagtgagaaggagagaaagaaaaagagataggaagaaaagcatgcaaaggcattttgcctcttactcccttggatctcctttccccaagtgtctagttaacttttcctcagccaggcagtcacccagtacctgttttgctcttacttgccctgacactgtctgtagcgcttaatgctttgccatgactgtcttctatttaaaaaatagttccataataaaagttcattatttccttctgtcagccaagaaagtatgtag

SEQ ID NO: 7445 - DNA, 3315 bp, Homo sapiens
ggacgcgatactaggaaacccaggtctatttgttatcagagtaaggatcaagccagatagcctgttatgtaatttctccgataaaagattttgaaagcaggtgctgtgggcatctgtatggggaatcgcactcatagaattattttcatttgtaaatatttggtatcaggccaagcaagggaaagaagctttactgtattaccatctttcctggaaaagattgatttttctctctcccttaggggatatgaggtatgatacctgcaaccaaaataagctggctgttaagtgctctctccttaactattgtccaagcaatgtacatcactcttgcctagatgagtgaccatacttttttctttgctgcttggtttttctatcactaaaaagcaaatttaggtggaagatggatgggtaagtcctttgtccttgtcaaaagaatttagaaagggtaaaggtggtgggatttgaattcttttaaacggtttattcattggaaaggcaagtgagtggcagttgactgtagaatcttgggaatttttgaaggaatttaagagctgtacttattttaaataatgaggaaacaatcagagagacttaaccagggtggcaactatggaagagtgggggtagaatccaagtctacagttctacggcactgctttgtttattttttcaatcaagcacacatgagggattgcttaataaattcaagagttttctatatagtttgggattactacagacacaggtactctagccatgtgactatttcagattagtgttcccattgctctccatcctatttttcatatctaaatgtgtcatgattttagaatctctttgtaaagaaaaccaaaaagagccatgcccaaaagaatgagcatgaaatgaagcaattcaagtatttagaatttcttcttcttttttttttttttttttcaaaattctgagttaagaaagttcattgccaacagttgaggataaatagctctattgatttaggcaaatgaatgagaagatttaaacatcatcaagactcccaaagttggtgtaataaaagttgagatgttttgctagatgctgagagaaaaggcataaataggccatttgtgctcctgtaaacaaatgaaattttgtaatgatcaagagacagcaagatattataaaacacactttggactcatcgagacctggctcagagttgtacctaatttgcttatcagcatttggttagaccttagacaaattttataacctctctaagcccattttctttatctgtaaataaaggaaaaagatctgtttggatttgggacaggagagttgtctgttttatagggtaatgtttatgaaaataatttatcacctaggtacttagtaaataccagtttctgtctctgtttttcttcaaagctttgttgacaatgtaggatattgccaactaatcctttgacttgagtgcttagccatgccccaatccaggcagcatgaagaatgatcaagaaggggacacctagtggcagttgacctttgaggatctatctaggatcaggttactgatttgggacctctgaatcagtacatcataacatcgagagtgatctctgccaaaattaaaattctgtcagaacagtataagcagaaggaagacattaggtctttctgaaatatggagctgataacttctatcagttctgaattctgtactgtcccacccccaaatcatctatattgttgcatgtgcttagctttgtgccttgaattgctatttcctttttatcttgcactcagatggtatttttagagatgtttcttcaatcaaaacaagataaagttaaaaaaaaaaaaaaaacagtgacccttttgcataagccagaagagcagtgccttgcttcctgtgaaaaatgcttggcagttagcctgtgtaattatttagcaatcatgttaatagatgtttaagaataatggaactggagctgtactgagccaaggatggaaatgaagacatgtgagactattttttcttcatccaccgatactcttcagttacaaggatttaatttaaaagggttttaattaaatggaatccagaagctttggacgctccagtttttcttcttagagacaaaccctagctcagtttcctggagcttgactcagaatgcagcatggtactccggactgacagtgtgccagctttattcacttatctctctaccttttggcttgcgtttatttcagggctgcctgacattttgaccttatgtacaaagatggccgatacgattatttttcatcatatattacagaaaatactactcttgaaaaatactctgagaaatatgttctatggtcagataagtttgggaaacagtgaattattgttcctcctttgcagaatcacaatgcactgttagctaattaaagactctcagatgtcccactggaaagaatcatgtttagctttgtttaacctagcatttcccaaacttattagagcataaaactttgtttttgtttttttttaataagataggtagctatttccttagaacacagtttgggaaactttttgttcatttgttttaataagataccttaggtagctatttccttagaacacgagccgggtgcagtggctcacgcctgtaatcccagcactttgggaggcccaggcgggcggatcacctgaggtcaggagatcgagatcatccggcccaacatggtgaaaccccgtctctactaaaaagacaaaaattagccagccatggtggcaggcacctgtagtcctagctactgtggaggctgaggcaggagaatcacttgaacccgggatggggaggttgcagtgagctgagatggcgccactgtactccagcctgggcgacgagcaaaaactccttcaaaaaaaaaaaaaaaacataacttaggtagctatttccttgggaaccaatatctttacattggctagaactgtgaatcgccctttaaagataaagccccaaaatacattttttttccctacaggtaaccagagggtgaagtaacagccgaagaggaaaccagaagtgaagtgatttgtacaaaatgtcgtagtgtaatttattgagtgtcatgtggtattaatcgcaacatcctgaaaatgcaaatgaataaaagtttggtcaatgtaccatgacattccttcatgtgagcctcctaagaaaaggtcactgagcattctctgtttacattttaattttagactccagaatttcacactaagtttttcttctcatttcttatgcagtaaaagaagagtttgtatttcca

SEQ ID NO: 7446 - DNA, 20449 bp, Homo sapiens
agattctggagatagaaacttttatccctcttcttctacaggtaagaaatataagatctgaggcaaagaaaatagagttctaagaatgctgaggacagcatcagaaagttgtacagtttgggtgtgctgattgccatagttatgtattttccttaacttcattatgtttggtattctattttaagcctgtaaactttcttgaatctattcactggctatttagtagttgttttgcttcgagaagtactatttaaaatttcatagtctatttctgtagttttgaaaagatttagtaattttaatcaagaaaattacattgttgtgcagtttggtgggaagatgagctgtttcttcatttcttttgttataattgtttgtagaattatttttttcattttcactgagtgcattgcttttctttatgcctaagtttttgagctaaattgtgctatttaagaatttttttactgtaaaatattctttactattgaagcattaaaaacaaaatgtggaattcccaacttaaggatagagaccactctaatatgcagataaattgagttccagaagttgtttttataagtgaagctacttggaacttggaatgtattctatcaggatatgtttcaaggaactaggagacatatagagtaggaaattgaagtagtagtgtagataattaaagaaggtagtttttactgctttggtgggttcagaattggtcctcagctaattgtgaaacatgtttatttcgcatctttccatttctcttcttgggcttctgtttctttctgtgtgctcgttacctaatgcctgacctaatccttccagccttctttggattaccctgcctattaaagtagggtaattccatgcttgccttctaaatacctccattctccctcacccactgtcacccaggagcaataacgtccataattggttcacaaattgttctgtaaatttgctagactcctgtttgtggagctggtaaagtttggtaatttgtaagataaggaagctgtttgatgaagactgagtctctcgggtaataaattggagacaagaggataatagagtattttgccatttccttacttttcatttctagaatcctcaggatggatttagccgactaaaacgatggattatgattggcgatcatcaccagttacctccagttattaagaacatggcctttcaaaagtactcaaacatggagcagtctctcttcactcgctttgttcgcgttggagttccgactgttgaccttgatgctcaagggagagccagagcaaggtaaaagagacaggaaaaaaaatcattcccatttaaggacatttgttccatgatccaagtatttgtgaatagcttttgtgtagactattagcattcttggctatccaggaacttggctatccataaatccaaaagcacttttgtcgacttctgcaagagatgtgaatggaccaaataatttatttccttcatttcattcattaatattaatttaagtaacttataatctaaaggcttcttttcattgtcccttctcctttcttcatgtccccaaaagatatacagttaatataattttaaaatctaaaaataaagtgaacaagaggagaacacaccaattcttacttcataaaggatgcaggccccatctcatagttacccccaaatgtcctcaatttttagtcttccttgattttttaatttaagggataaagatagcattgacctcagagagcgtaatagaactctcatttttgtagtaccttcagtcttctgacccttggttacttgaagtagggaagctaaggttgaaagagcattattgcttaaaagatgagccaaaatggctaacatgaaaatttaaaagaagcacagaaacagaaacctccttatgtatattaaaagagattttacactgctaatattttctgtttgtgggggaatttgtctttggaaagcttgtgcaacctctacaactggcgatacaagaatctaggaaacttaccccatgtgcagctcttgccagagtttagtacagcaaatgctggcttactgtatgacttccagctcattaatgttgaagattttcaaggagtgggagaatctgaacctaatccttacttctatcaggtaagaaaaaataggaagcttataagtttattttgcatttgctggctgacatatgcctaaatcagtgatacttaaccatttggccgttgagaaaaggaaagttggaaccccaccttacacatagcatatgaaaaatcgatttcagattgattaaaaatacatgcactaaagaaactaaacaaactagaaactactagaagaaaatattaatgaatatacagtgttggagtgagaaaggtcttcctaagcttgttacaaaagcagaaatcataaagaaaaatagcgattggagaaaagatttattttcagtatttaaaatttatttcaatatttaacaaacaagttgaattctgaatatatttatagaactcataaattgttttaaaaaatcaagactaacaggaaaatatgaatatgcaattcatattttataacaagtataaatcactgaattacattttcacttctataacaatgctcagtgttgggataggtttggggaaactttattctcatacaatgctagtaggaaaataatttggtggacaaattgtcagcatgtatgaaaagcaatgttctcacatctaggaatttatcctaaaaaaataattgggcaagtttggaaagacttgtatgcttcatgttcatcactgcaaattattctggaaatgagaaacaacccaaatatctgtcagtagggattaattgcattattacatattccatataaaagaaatactagatagccactaagaatgataacattgtatttactaacaggaagaatgtttatgctatattaagtggaaaaaagttgcaaagtatatctacagtatctcattttaaaaaggagctgcaatacatacatatagaaatacatacagataatctatacaaaatgacctggcagcatatacatcaaaatatagtctttggttggtagcatttggggttattttaatttttttctttttttctctctctctttacagcaaaatatccaatataggttgttatacaaattagagatcttgagttattcatgaaaaagcatcatttatcatcagcttaaatgtgtatgcatagatgtaactcatgcagatcttattgtccctccaaatatttggttatattaaatcaagttactctatttgtgtacttaatgcctgagaacagatgtgacctttaaatgataactttaaaaatattagaacctagttcaaatcagtgatgtttcctaatagccaccttagaaattaattattctatcagtaatcaactgatgttttcattacatattggttttttggaatttcttctttgagtcagtttcattgcctgagtcatactgtagtattgattgaaacatttttatccagattggttacctgtttttcttattcattaagcctaactctagatgagtttttagcgattcaagaaataaatatattttcagatgatgatttgccactattaaatatatttctggagagttgaaaacactgtcccccaaaataagaatactatgcatttaagtgataacatttgaagaattagtgtcgagagggaaagactaggtggataaatgaataaaagtcactaatttgaaggggacttgactcatttggagcgagttctaaaatgtttggtcacaatacagttcatgttgttttattgttaatgcttcatgtctaacctttgggcaaagtaccaaattgggcagtgttaaagaactagaaaacttaaatgaacttgtaactcaagctgtgcgtcacaaagaaccagaatataaatgatatttttagaagtcttccagtaatctttcggttgcctttgcatgaaatccagcttcctttttttttttttttaaatattgtgtttatattcttattttactttcttctttcatctagtactttggatttagtctctactgaactggaccaaagagctttgtgtgtggttcctcacctttaagttgaataagccttagttttaagctcctttctagtctgtaatttaacagtaaaccagactgaccaatttgcggtcacatcctcatcccacctaaagtgatctagtagaagtgacaaccattacgcagagaacagaaacaaagcatacaaaaaacattaagaaacatgaggaaggaggaaaagcactgtgcaaaaattgagtcaattataatactgctaggtgtatttgctattaaactgggtattgtattggcttcttagttactttgttcctttatagttttgtgtctgtgtaactacagttgtggcacattgtatagaattttttttttttttttttttggagatgagatctcactttgtcaccaggctggagtgcagaggcacgattgaagctcgccacaacctctgcctcccaagcttaagcgatccccccacctcagtctccagagtagctgagactataggcatgcaccaccatgcccagctaatttttgtatttttagtagagacagggtttcaccatgttgtccaggctggtctcaaactcctggactcaagtgatctgtctgccttggcctccccaagtgctgggattacagatgtgagctaccatgcctggccagaatagtattaatctatattgtgattgttatggtcttaggaatattaagcctttaagttggtaagttttattttaggattgttccatgtattgcaaattaaaagtttgtatttatcactgttaatgtagcataaaattatccctcagttttatgaaaggtactcacttatccaagttactaagtcttcacttcttgcagtgtgcaaagtgaacaagttttgcttatctagatgagatattttctctataaaattgaaacaaaagcaaatgaatgcacagtctgattatgtttgcattacagaatcttggagaggcagaatatgtagtagcactttttatgtacatgtgtttacttggttaccctgctgacaaaatcagtattctaacaacatataatggccaaaagcatcttattcgcgacatcatcaatagacgatgtggaaacaatccattgattggaagaccaaacaaggtacttttataattataatatgttctcttattcatcattttggcaagatggaaaggtttatattgttctgctttgcctctttgctatctctttttaagatatttgagaaaatgaaataatgggaactataaataactctctgacagtcttgctggtttgatgtgactttctatctcagctaccacataaaagatatttattgatggtaaaagaaatgtttctgaaactttttgttcataaaatgatatataacaaaattacattataatatgtgtactgttacaaggagtatgttttgctttgcaggggtataatttagactgctttttattgtgtatagggggaggttgtcttgggaataagggaagattgtaaaatgtattcagaccttgggattttaaaaatatatatattttttatgtaatcaaaaatgcataatatcaaataaaatgatgattctttcattaatgaagggtagaatacattagaaaaaacataaagataatactaatgataaaattaggactttggctatgaacatggctatgtaaaagctcaccttttttggaaattatgcaaatgtaacaggaaaatgagaaaaagaggggacaaactatttttatagactatctgtgcagtagcagaagaaaagagggccttttgttatgaaaaccgtccagccttcagaaaacagccttgctcaccccatcttcatgtctcccacatagctaatctaagaaacttacttattcagtgatgaatagtataaagggaactagcacaagctcaatttataggaaaaaatgaagaacagcaaaacatagataggatacatgctccagaaaccatgttggcctggaaaagatgaaattttcaaatatacattttgctgtaaattgggaaatacttaatgaagtaaccatatctttgaggaaaagctacaaagcagagaaatgtaagaactcagaaagagatgaaatgtaagctggaagaaaataaaatcagaggaatgaaaacaaaatcaaaaggaatacagggaagaatagacactgcacagaatacttcataaggaatagagtgaaactgagaaactaataattttgcaagtttagaaatagaaggacctcaatatttgagtccttttacagaaaatcttactcaaataataaggaaagttactttctctcataacaagatggaaatagggtggttccaaggttgggttacagggtagctcaacgatgttattctgccctgctaatgtcagcatgtgagcccagttctccacatggtcagagtggcaacagaattcccaggtataatatccacacataacaacaaaggacgtatatccagaatatatgaactcctataaaagttattactaaataaggcagaccaatacaaaatgggcaaatgacttgaacagacacttcacataaggaagacctacaggtagccaatacgtcatgaaaaagtgcttaccatcattagttgtcaaggaaatagaaattaaagctacaatgatataccactacctacccaaaagaatgggtaaaatgatgaagattgacattatgacaaatgttggcaaggatgtacaacaactgaaactctagaactggggttctagagtttacacattgctggggaatgtgtaaagtgggataacaattttggaaaagtttgacagtttcttataaagtatgcacttactgtacagctcagcaatttcactcctgcatatttattcaagagcaatgaaaacatgtccacaaaaatatttgtacatgaatatttattgcagctttatgcaagatagcttcaaactagaaacaggccaacttttcatgaaaaggtgagtggacaaaactgtggtatatttgttcagtgaaagaatactcaaaaaggtatgaatttctcatgtacacatacatgaatatatctcagaaacatgctgattgaaagaaacaggacacaaaagaatatatccttttgatgctatttttatgtaattctagaactggcaaaaaataatctgtagtgacagaaagtaaatcagtggttgcctggggctgggggatgcagatttgaccaaaatggggcctgagatgatggacatttttattgtggtggtggtcacatgggaaaatgtattgtcaaaattcatcaaattgtacacttgaacacattttattgtgtataaactatacctccatgtagttgacttaaaaagtgttttgtaaacttcctaaagatagagagactataaattacagtatctgcagggtaagcaataaactttttgtcaaattgatgaaaagataaatgtctgagttgccagtattagtgactgaaacctttctgaacttccctatttgtacatacactttttttctttctttcttcttcttttttttttaaacagggccttactctgttacccaggccggagtgtagtgtcatgatctcaactcactgcaacctccacctcctgggctcaagcaatcctcccaacatagccttctgagtagctggaactacaggcacgcgccaccatgcccagctaatttttgtataatttgtagagatgggatttcaccgcattgcccaggctggtctttaactcctgggctcaagcgatctgcccatgttggcctcccatgtacatatattttcaaactgaacagaaagtgcaatgaagattatttgtttttttctttgatggaggaatgctgtagacatttactagtgatacgttaagtaataaataagcatactaagttatattgctgagcatcaaactgggataccagttaataagctagacatagtctctgctttcatgaagttttgcaatctaatgggggaagactgttaattccaaaaatagttatttagttatcagcaaaggtaaagacaagtgctgtaagtgttaataacataaggatgtagtttgatctgattagtatggtttctttaataatgttcattaacttgttcttggaattccaagcctatgattatgtttcttttgggattgattaaggataagatgtttgttcctagcacattatttaaatgatctctagtgtcttttggcttttgcaaatgcaccatattttccattttttatttctaggtgacaactgttgatagatttcaaggtcaacagaatgactatattcttctttctctggtacgaaccagggcagtgggccatctgaggtacgtaggaaaaaactttcataatatttattgaactttactatctacttcaattttgaaattctgtggctaagtgttctaaatattttttaagtttaaactataattactaggcaacttttgctgctttttgttggaatgtaacatcaaattccttgtaactattctcattgctgctggatttttttactcttaaatgttttagtaattttaagttttaccctttagtaaccctcagagatagcgttttatcataaaatcttaatctctcctgtatctgttagaaacttaatatcagaaattaaaggagattaactaaaaagtcttcagaataaattttcattgtataatatgttttctcattttttctcatacacaatctttcagcctcagtgttagaggataaaggagccatttgttctccctggattaagaattgtcaaaacaaacaatctacttttatcgtttattatgatgtatttatgtgctagagatttacggaaataatatcttcttattataaagcatccatttagttttatataaaccttcatctcatatgacatactaacaaaactaaggagagtttattttattactttattgattagaaataaaaagaaaattctccaagctctcataatgttgtcattaagatctgtttggagcttaacccagtgatcaggtttcatgagattaataacttttatgtaaaggtaagtaaagatgtaatgttttaaaaaattgttttgcatactagaagtttgtttttgcatattaagtgtcaagccaatatttacagacttaactttttacaaaagcaattccttcttctcattgagatttataactgccatctgaatggactgtcactatggtttatataattaacatctcaaaaacttacagtatgaatatatgaatactccttccgcccccctcctctccctaccttttttcttaactctgtggtacttggtcttcaaattccagtgactttagttctgtgctgccctttgcctaatttttctgtaaacttagaaaacaagaaagattttgatgatacaatgcttataaatgaagggttaaaagaaaacctgatttcagtattgtcttgaacatcaaaattttttagcaaaaatacctttatcccaataacttaaatttatttgtatttgccaaaattttcctttgaaactccaacttcttcatgggggatagtgttggtggtggttgtgcatagaagggatatgtcagttcattatttatgattccagttacccaggtagcttagcctaggtatcttagctagaattttatcaaacttttaataagaatttctgatttttagaaagctaatctttcatatccttccttttatatataggcaaggaactatttctgtttcaggataccaaggaaacctacttcctgccatatttcatttttttgataacattattgagttgtaatttgcgtatacaatttatctatttaaagtgtacaattcaatgatttttttgtatattaacagctatgcagttatctccacaatcaattttagaacattttcatcactgtagcaggaaaccctgtacttagcaatcacttccctccccactcccccaaacccttggcaaccactaatttactttttatctctgtagatttgcctattttggacacttaatataaatggaatcatataatatgtggtcttttgttactggcttctctcacttaacatatgttcaaggttcattgttgtcgaatgtatcagtacttcattccttttcattgctgaatagtattccattgtgtggctatgtcacattttatttatccattcatcaattggacattgggttgtttccactttgtggctattagaatgaataatgctgctatgaatatgcatatacaatttttatgtgaacacttgtttttctttcacttggatgtagacctaagagtagaatttctgggtcatatggtaactctgtatttagcattttagggaactgttagactgttttccaagtgcctgccttatttcttttgctcacacctttttttcagccagggtggactaattgggtgattgggttggagccagcttcagttccagaggcctgttttaggacaatgtggagctgtttagtagccagagtagtgggacagttctggtcccttttccagcattcattgttcttgtaccgaactgatttggacagcctagctaccaatagaaatgcacgtaacctgttctgagccaagtaatgaggctgcagctttcctctgttgtttcctcataggggttctatcagagtgttggcgttgttgtttaacagtgcttttcctctccagccatcttctggggactaagaaagaatgttgtagcccatattgccctgctttcaagacataactccaaggaactctgcctactcatgttaccatcctttgttttttttgcctggtagtttgttatgttcgtagtatttggtcattcatttaacaaacattttcagatccatccattgtttgtcagtgtgctagattcttaatatttagtaatagatctaacattcatgatctctgcccttgtggactttagggtctagtggcagattcattaatatatccttggaagatacctacatttgaatctgcagaaaatttgtagttcaaatctcctcatgtacaacggagatcatactgacaaaagccactttactgcactatagcactgaaggctggggagaagttttctccgagaccatacagtggtcattgcaataatgctgtatctgtgctgctctgtctagagatagggccttctggatgtaagagatcaccatgaaaacaacagtttatcacctgcttccaccactaaccctttttcctcctaacaacattaaattccactataattttatttataatatttgtgtgaggacttacgctaggtatttctagcagtgtaccttcagttaccagtgttggaaccacccaactgtagcataaccccttggggttttaaggaaatgtggcgaaaataataatttggctgacagtaacttagaaaataatatttccttcatgaatccagtatgtcacaaatgtagagattcctcaaggtttctgtaaaggagtatgtcctttccttctacctaaatgagcatgtcttaattttgtttgttgctggggaaagggtacctatccctgctctgtcccttcacacacatacacgtagcacaagaatataagtgatagcatatgctggtgtcacactgtacctccttaaggaaactagatgattttaagaccatagactagaccataaaaaaaaccataaaaaatgaggccgaattagagatactccccaaataccttgcattacacaaagaaaagctattagataaatattccaattcctggttctctctgtctctctgaatgttacagagaacaatctctgtaacattagatctctgtaacactcttcacactttctttcagagattggaggtgattctcccaggctttattattcttcatgaaagtcttctcttttgcagagtactcaaaaatttaaatagccatctaaaaacatctcaggtaaaaaatctgtcctctgcatttgaaaccaaaattattttttctcactaaaacacattttatttaatagtgaggtgaaattacattagccctcttcacatttatttgattcaaaccttttttaaaaaacttagattcttttaaaaaaataaattaaagaaaaatgacatcattcatcagatagccagctacatgtgtagtttgatcattcagtttaaccgttttatcactgttgatatgaacattgagtacctattataggccaggcattgaatctaaatactagaataaatacatggataaaacatgttataggctgactgtcccttatctgaagtttcagattttgaactttcacattagggatgctcaacttgtgttgttttataacatcatactgtatttccatatgtacttattattgtaaataagtataaaacagtgtggtaagagttatctaggaagtaaaattttaccttaatggagcctgggattttggtaggtgaagtggaagaagagctagttcgaattgactcaatgacagtgatacagtaagttagtaactgacaattgaactctactgtaatactaatatattacttagacctttttaataagtgcattggttattttgtgatcctccccttcaaaaaaccaacaagaggttagtaataaagccttaacttttacttggtttattagtcacgtaacattgattaacttctattaagtttttaagaagcttaactttttattgccagggcttaacaggactatctaatgaaatctgtgaaaaaaaaaaaagctgcttaaatgttaataatcttgaagtgtgctaattattttgtttatttcccaaagggatgtccgtcgcttggtagtggccatgtctagagccagacttggactttatatcttcgccagagtatccctcttccaaaactgttttgaactgactccagctttcagtcagctcacagctcgcccccttcatttgcatataattccaacagaacctttcccaactactagaaaggtaggacttctttcttcattttataaaacagcattcctcagagtggaaattgggattttcttataggtgaccacattagcttggaacattattatagataatttagtccctgttttagagtgtgctgcactgaggaactgaggtagattttctatataaaaatgatatcggtagggcgcagtggcttatgcctgtaatcccagcactttgggaggctgaggtaggaggattgcttgagcccaggagtttgagaccagcctgggcaacatagtgagaccttgtctctataaaaaataaataaataaaaattaaaaataataatgtcagccaacatttagtggctaccatgtattaggcaggcagttctttacatacattatctcattttcatctcagtaaaaacagcctattaggttattagattattttattaaccccgttttacaaatggagaaacttagggtcagagaagctaagtagtttggccatgcatctagcagatagaggatccaagatctgaaaagccaggaggtcttttcgaataacatcccagagttcatgttatttatcattatactgtactgtttgtcttcagctttgtaaggagaacttaactacttacttggaaatagagcaataaatagttgagttcttaagaagcttacattctggggaaatgagggaggagagagcacatatatttaaagaaaagatagagaaatactactccctcttatctccccttctttctccccttttcctagcaccttccctccataggtaaccagtttctttagtttcacgtttatccttatattccttttgtataaaggagaagagatatgttacttttatattattttccttcaggttattatactatagacttttgggctttgctttttcatttaatgaattgtcctaggggggtccattggattttaaataacattattttagatgttcacagtatacgtcttccctccacccctactaaaaaaaaacttaaatcttgtgtgtttaataataataagtactttataaaaagtgcctttttatttacttatttttgaagaaatgctgctgtggagaaataggaaaatggtggagagagatcatggggtggtagggtcacataaagcctcaagtgtcaggctcaagtctagacacaatcctattatatccgagtttcttgatcttttgtgggctagtaaacaggcacattcctgacaagaggtctgggacagagcctaggtgtcatcatgtgtaacaagctccccacgtgctttctatgtaagggctacatgtcacacctgaagaaatctggagtgcaggtcagacaatatcactgaacagaaggcttggaaacccatgctttagataacactcatgagttcaaggccctggggaggttagggctgagaacatctccccatcttctcctcaagagatagtgaggggcggagagtgctgtgtctcaaggaaaggcagctcttggcaagactccagaaaataagctaacaagcaaaaactcttccatgttcctagtcataatagcatggccgtatttgtacatacgagttctgaccattgcagaaaatgaccattaatcaaaagaatacctgcttagatggaatgctgccatcctgcttacttctgagaaatgttgtttaatttactaaattatttctaacttcatgctctttaaataacttttcactttgagattgaatcctccttttttggggtatgttttttaccttaatgattttctaaattgttcctatcataagaaaggataagactttataagcattttattaataactataaataggaaagttgttaatctctattttagggtggtttaaaaagaagtgcaaattctgtattttcttgatttgctttactaccttacctacacttatagagcagtgtttcttagattgttgtcagaagctacagaagaatcagctcattccacccagaccttctgaatctgaatctatagggctggagcctaggtacctgcaatttaacagtctaccccagatgattctgatagacaccaaaatcttaaaaagagcatttgaatattcaccctcttgactcatagtatatgtgttaaataaaagtaaatgttagcctcttactttttagaaaaatataagtaggacaaagagtgttaatattttctttctgaattatcttaagaactgtctttggagcatacacagtcttagaaactgctgtttcagactgtgttgacttttctctctagtcaaataattacttatcttgtactaattcttttatattagatagtaaactaaaacccatacttaacttaccagcccaaaattatattaaaagctggcaactcttagctcttctagtctctaacctttctaaatttcaatggaatcactattcttcatgaagtctttttttttttttaatgggagtcacgtggccagcaggcagagcgtgctgacctgggccccctttttattaattctatttaagtctttttttaacattcatgaagtcttcattggactcttcacacttgcattttatgtcctcttactgttaggtcttccagaccctaattgtgcttattcataagattaagaaatgggtttatgttgaagtgttaccttctagggttgttttactagatacttaacgttcttttttccttcttctagaatggagagagaccatctcatgaagtacaaataataaaaaatatgccccagatggcaaactttgtatacaacatgtacatgcatttgatacagactacacatcattatcatcaggtgagtttctcaaaatcgacttttatttttcttgctgtagaaataattttctttttttcagaataaatctttaaagtacctaattccttgtgggaaatcagctaaactaaagcaggctattattatttatgtaacattcgtatttttaaaacttctttatatagttagaattccacatacaataaagtccacaaacttaaagtgtaaaattttatatgttctggcataggtatttacctgtgaagccatcagcacagtcaagataaagagcatatccattatcccaagagttttcccttgtgcccatttgtaatccctccttgcccttcaccagtcccctttttaccttcccaggcagccaaggatctgctttctgtcatgataggtttgcttctattttctagatttttatataaatggaagcatacagtatgtattcttattttttctggctactattgcttatacaagtctttgtactttatcttgggtagatacctaagagtggaatggctgaatttatgttaaggatgtgtttaactttttaagaagctaccaacctgtttttcaaagtggttgaaccactttacactctcagcagcagtgtgagagttctagttgctacacatcctcaccctcacttgatatggtacgtctttttaaaattttggcagttctaatagatatacagtggtctcagtatggttttggttttcatttccctaaggactgatgatgagcatcttttcatgtggtcatttgccatctgtatatctttggggatgtgtctgctcaggtttcctgctcatttttttattaggctgtatattttattaagttttgagaggtttttatttattctggctacaagtcctttatctgatatgtattttacaaatattttctcccattctggcttgtttatttattttgtaagtgtctttcaaagagcaaaagttttaaattttgatgaagttcaatgtatcaaagtgttcttttatgattcatgctttttatgtcctaaaaatacatagcctaactcagaggtataaaggttttttctagaagttgcagagttttaggttggatacttaggtatgatgcattttgagttaatttttatatgatacaggtaggactgagttttattcatttgtctgtggatatgcagttgtttgagcaccacttccctaataggcgatttttttctttgttgacttgcttgtcatcttagtcaaaatatcaattgactatatatgtgagagtctgggctttctattctgttccattattctgtatatccgtccctttgccatgactgtactaccttgattatagtagctttacagtcagtctggaaattagataacataagtcctttagctttgttcttcattttagaaattgtcttagctatcccagttcctttgcttttctgtatacattttacaatcagcaggtcagtttctacccccaaaagcatgctgcagtttttaaaaggatattttgaagaggaggattgtttaggatctatttggggagattaacatcttcacatattaagtcttcctatccatgaataagatctctcgtttatttagatcttctttaaattctcatcaggattttgtagttttcaacatacaaaccttacacatattttgttaacattttgctaagtatttttctttttcgttttctttttttttttttttttttttgctgctgtcgtgcacggtactttttaaaaatcttaaaggccaggcgcggtggcttatgcctgtaatcctagcactttgggaggctgaggtaggtggatcacctgcggtcaggagttcgagaccagcctggccaacatggtgaaaccccgtctctactaaaaatacaaaaattagccaggcatggtggtacatgtctgtaatcccagctacttgggaggctgaggcaggagaatcgcttgaacctgggagacggaggttgcagtgagccaagatggcaccactgcactccagcttgggcgacagagtgggactctgtctcagtcaatcaatcaatcgatcaatcaattcattcattcaatttccagcattgtaagcagagtccctgatgagaaagtcactagactgccatggggcaaagggcaagctaagcatatagagttgctccagttttctggttgaacggaacagaaaccttgttccttgctgctcccttctcccatggctttgccttaaggccaggctcctctctgcctctcacagggctctttttcttttctttttctttttcttgagacagaatctctctctgtcacccaggctggagtgcagtgacacaatctcaactcactgcaacctccaactcacagggtcaagtgattctcctgcctcagcatcctgagtagatgggattacagctcctgccaccacgctcagctaatttttgtgttttttagtagagatggggtttcaccatgttggccaggctagtctcgaactcctggcctcaagtgatccgcctgccttggcctcccaaagtgccgggaatgccaccatgagccaccgcacccagctcacagggctctttgattaaagttgaccctttcttgagttagttttataatcagtcctgatcagtcactgttttttgcagaaatgttgacagcaaagtatgttgcttaaaaatctaatagcttttcatggttgttttcctctctgaagattttatatgtattttgattatcagtatatgacatctgtgtaggcatattccttggtgttagcagaacctagaccattgtcatcagaggtgttacatctggagtataaaatggtcagcactgttttggagaactctagaatggtaatgtgagagcttagctttataagctgtttttcatattggtattgtctttgtttttttttttttaattagactttattacaactaccacctgctatggtagaagagggtgaggaagttcaaaatcaagaaacagaattggaaacagaagaagaggccatgactgttcaagctgacatcatacccagtccaacagacaccagctgccgtcaagaaactccagcctttcaaactgacaccacccccagtgagacaggagccacttccactccagaagccatccctgctttatctgagaccacccctactgtggtaggagctgtatctgcaccggcagaagctaacacacctcaggatgccacatctgccccggaagagaccaagtagccaaactgtagtccttctaaaggaggacatggcagtcaaaaagtctgagtaaagctgttttttgtattttatatttgcttctgccattttactgtcactaattaatgtttagttcttatatttgttaactgatttcggtgtcttgaatatatttttttaaattatgtgtatgaacaattctagtttcatttgttcaatcagaagagcaaataaccattcctttcatgttttgatcactgagtgtgtctgtaatcatacctacattaaaatcattttctatgaatatataatatatacttcacatttttagtgaacttctctaaagaagaggacagaatatactggacttaaccacgaatacccttgagtgtccaaattgggaaggaacttgtttcttctgttatactatcaaatgcttaaattctgtttccttttttcttacctttgtttgctgtctttatgtaaagatattattagcagtaagatacaggtttcttcaatctatcaaagtggttacatgcatttccttctctcaaatcttagaatgccttagaatcacctaagatgtctgtttattcttgaggcacacctcagactgaatgagtcagaatctcaggattagagcctaggaatctatattttaggaggttctccacaccactaatgtttgggttgctggcagagtggcatcagcaaggctggttaggctgagccaggatttgtcatcagctaaataggaggactctgccaaatcaatctgggcaagaagcaggatcctgagtctgggcaatgagagtcagagaacttaactcctgtgtgcagggtagaattttcccatggcagaaattctgagttttctgccttatttttcttgggataaccagccacaaggagaccttcaggtaaaatgtggttcaaatatgggaaggcagaggtacctgggaccttgctactcaagtatgatttgtgaaccaacagcatcaacatcgtattgaagtttgttatttatagaaatgcagaagtttgggctctgctccaaacctattaaatctaaatctacattgcaacaaagtccccaggtgattcacaggcactttgtagtttgagaagcactgtactaagattactgtgttgtcttcacatgaatgaggctataatgtagaattaccagtgaatgtgactaatgttttctgacaagggacctctgcttacaaggtccctgggcatggtgcccagaactggaaaaaaaaaaaaaaaaaaggaaat

SEQ ID NO: 7447 - DNA, 7905 bp, Homo sapiens
cctcaacgtgccgggcgcggacggcgacgaggccgcgccggccgccggctgccccatcccgcagaactcactcaactcgcagcacagccgcgcgctgccggcgcagctcgacggcgacctgcgtttccacgccctgcgcgccggcgcgcacgtccgcatcctcgacgagcagacggtggcgcgcgtggagcacgggcgcgacgagcgcgcgctcgtcttcaccagccggcccgtgcgcgtggccgagaccatcttcgtcaaggtcacgcgctcgggtggcgcgcggcccggcgcgctgtcgttcggcgtcaccacgtgcgaccccggcacgctgcggccggccgacctgcctttcagccctgaggccctggtggaccgcaaggaattctgggccgtgtgccgcgtgcccgggcccctgcacagcggcgacatcctgggcctggtggtcaacgccgacggcgagctgcacctcagccacaatggcgcggccgccggcatgcagctgtgcgtggacgcctcgcagccgctttggatgctcttcggcctgcacgggaccatcacgcagatccgcatcctcggtgagtgcccgcagctgcgcctgggcgtatgcctttcctggaggcggggacgatccgggtaggagacaaagggcgagctccccttcctccaggctcatgatggtgttgctaaggaatcacagacacctaaggtgagttctgggcgggacttggtcatcttgtcagtggcccttatatgtcacctgggagactcacctggggggtgaggcgagggaaagcgcggattattgagtttgatgcccagaatcagatcaacccatagtctcacagatacataaacagtccagaagcacacaacccactgaccactcaaaaatgagaggaaaaggccaggtgcggtggctcacgcctgtaatctcagcattttgggaggccgaggcgggcgaatcatgaggtcaggagatcaagaccatcctggctaacacggtgaaaccccgtctctactaaaaatacaaacaattagcggggcatggtggtgggcgcctgtagtcccagctactcgggaggctgaggcaggagaatggctgagcccaggaggcggagcttgcagtgagccaagatcgtgccactgcactccagcctgggcgacagagtgagactccgtctcaaaaaaaaaaaaaaaaaaaggtttcccccagcagttaactttttgagtctcggttaccatttctccaaaatggaaataaaggtcctcacctttaaggaagtttgtgagtccaaatgagaaaaaaaggttggaatgtcagtagtcaggtggtgcagggtggtgtctggttgggggactcgggggaatccctgagcaggcagccttgggggaagtggggctgcagagttctgggcctgccttttctcgggggcacagggtttgaaaggactggggggatgtgcattgagttaagaaaagaagggaggaagattctttattggaagacttctcagagcctttaatatgcactttgattaaggagacggtgatggtggttttggtgtagagtttttccatactaatttgaccggaaatcttttcacaaagtgtctcctggtacctttgtaccccagagtgagcaggtattcatgctttccaagtgccggtctttgaaccagctctgtgagactgagctggtttcgttagatttacctggaggacctattaaagtgcagattcttggaccccccctccagagattttaattcggtagaccttggacaggttctggacatctgaattgtttttctttagtaagtatgcttacccaagtttggagacccctgggcctcacagcccctagcctagacctcagcccaggaggcttgatagataagataatgtgtgtagatgagtgagcatgaggtagttactctatgagattggcgtactgtgtataggcacatgtgagtaactgaatacacatatgttaatgcatgtaatgctgttggcttgtgagagcatgagaaatcatataaaaaacattggggacttccacctctgcaaagagaccaaatgaagatggagtgaaacataaataaaaaggaaatgaaaagcctgggtgcggtggctcacatctgtaatcccagcacttagagaggccgaggcagatgtattgcttgaggccagcagttcaagaccagcctggccaatgtggcaaatccccatttctactaaaatacaaaaaaatttagctgggtgtggtggtgcacgcctgtaagcccagctactcgggaggttgaggcaggagaatcacttgaacctgggaggcagaggctgcagtgacctgagatagtggcactgcattccagcttgggcaacagtgagattccatctcaagaaaagaaagagagagagagaaagaaagagaaagagaaaaatcaagcaagcaggcaagatgaatcaggcttgggtgagaattcaagatggaataaaaagaaattaggctgggatgcaaaaaaataaaaaataaaaaatagtcaagctgatttcattgaccaggatatactactcctcagggcaaggaaattacataagagtaaggtactttcttccctcagcaccatctaataatagctaagcagctttccagtaaggcttctgttgcccaaagaggtttactagactggagcaaaggggaggcttaaaaaaatccagatttctctctcccaagaggaggataggccaaggtgggtgttgaagaagaaccacccagaattcaatatacattcaacaaagtgctcctgatctgtttggaaaattgggcatcacaaccagcaaattggtgtttgaagatcctgactgacttcaaaagaataactaaccagtggcaatgtatgaagggtcattattaaccttatagaggaatgcttggctttgtggctagcctaagtatactaaaaatagaaggttatttccttcactcatgtgtatcacaaaacatacagccagttccatacttattggtgaaacatcagaaatattctcatgaaagtcaggaatataatagagatggcttacagatgttgttctgaaaattctggccaatgcaacaaggcaagaaaagtaaataggagttgtgaattcctgaaagaaggagatgataattaacttggaaaaatattaacacagtaagagaaaccctgtgggcatctattgaatattcttagaaataataacacaactaaatgaattagaataactacagataaaaaagatctcattgggcacttaggtgtgtgcagggcattatgttaggatttgtaggagagtcacaggtgaatactatttcctgttctaagaaagctcatgggctgggcgcggcggctcacacctgtaatctcagcactttgggaggctgaggcgggtggatcacaaggtcaggagatcgagaccaccctggttaacatgatgaaaccccgtttctactaaaaatacaaaaaaaattagctgggcctggtggcaggcgcctgtagtcccagctactcaggaggctgaggtaggagaatggtgtgaacccgggaggtggagcttgcagtgagctgagattgcgccactgcactccagcctgggcgacagagcaagactccgtctcaaaaaaaaaaaaaaaagaaagctcatggtttcactggagaaacaaaactggagtcctgggcacagaacaaatattaccccagcctttgtggttgtgtagttgtatgtctgtagtgcatgtgtgtgtgtacttgagggagtaatgtggtctgggggtagtcagggcggcccagaggaaggagtttgaggacagctgtcagaggctccctggacagccagctctttgaagtcaggggctgtctctagctttctgtctgcacggggcctgatgcctggtaggtccttggtaaggatttgttgaagggaggagagaaggaaggagggaaagagggaggcgaggattgttaaaaaggagaggaaggccgggcgcagcggctcaccccagcaatcccagcactttgggagccgaggctggcagatcacgaggtgaggagatggagaccatcttggccaacatggtgaaaccccgtctctattaaaaatattaaaaaattagctgggtgtggtggcatgtgcctatgatcccaactactcaggaggctgaggcaggagaatctcttgaacctgggatgtggagattgtagtgagccgaggtcgtgccactgcactccagcctggcgacagcgagactccgtctgaaaaaaaaaaaaaaaaaaaggagaggaagtgagtgacggaaggaggaaggaggggaggagagaatctatgatcagaacaaggtgggaaaaagtgaaggcactgcagaggtgccatgcagaaaaggtgggtgatatctggggacagtggtgaagagctcagggctccgaacaggagggtgaggttgcggggcaggggagatggtaatatacatgctccggcccaggaagctttgcagaaagcatacatggggaggggcggaggtaggtgccaggcaggggcctagtttggagctgctgttttaacaagaagaaagcaggatatgaccctccagttcataggtgagaacagaggccaggctgggtgctgtctggggtcaaagtctttagctgattagctatactccacggcggtaatatcaaatgatccccgcgccagcctgcaaaatcccgctcttggccctgtggctgggctgtgtggtcaggcctgggaacccactgtgagggacagagctttctccagtttggcctgggcaggcagctagtgtgtccttccctccctcccctttcacaggctccactatcctggccgagcggggtatcccatcactcccctgctcccctgcctccacgccaacctcgcccagtgccctgggcagccgcctgtctgaccccttgctcagcacgtgcagctctggccctctgggtagctctgctggtggtaagtaggctggctcctctgttccttggtgaccatgtgggactgcagcaaggatgcagcctttgtgtccggggctgggagtggagaggagctggagttgggctcagtaaacccttgttggggggtgatttctggggtcatcccctcctgtcccctagctgggcagtgccaaagggtagctcaggagggacctaccttaaaagattctggaccctttccttcctccatcttgccttcttttctctcactgcctcctagccactctgtcccctcatctggggttggagtgggtcagaagtggggctgctcagagctcagcctcttcccttgtgccctggaagttgggttgtcagggtgaacaggcagatcctgataaatggagggggacacaagaggccggggagctctcttcccgtgaatccagcgccgggttgggccatgtctcctcctgactggtgcccccttgtcctcagggacagcccccaattcgccagtgagcctgcccgagtcgccagtgaccccaggtctgggccagtggagcgatgagtgcaccatttgctatgaacacgcggtggacacggtcatctacacatgtggccacatgtgcctctgctacgcctgtggcctgcgcctcaagaaggctctgcacgcctgctgccccatctgccgccgccccatcaaggacatcatcaagacctaccgcagctcctagcccgttgcggtggcccatcccgcatacccatcttctcgggcttcagcccagtcccagctgaggaacaagccagtggggccccttctcttcctcattttggaaacttttcctcctctattaaacatgggaaactgaagcccttgaaggtttggggagaggggggtatcaggcagggagggggcagaggcaaatcaccgggcagagggaggggaggagaggaggccgcactctccctgtctctcccgtctctgcacccagctcctctctgcatgctgagggctaaattgggatctcagcctgccctaatctttccccatctgaggcaggtttctaggaggtgtctgtagtccatgtggcacctttgtgagaattagaaaacatgtaccttcctctgggcagctgcagccctgagccaggacatgtggcctggctagtgcagcatggagtggattttaggctcatttgccctctcagccaactgcccttgagcagtgtacagcctgctcaacaaccgccctgggcaggccgctcctgagctgctgtctccctctctgacctatgcctaccttctctttcttcgttccctgcccactgggcatggcagctgggggtgagaggctggtggttgcctcccgtcctgggcaggctgcagcctcatgccatgtctctctcccactacctgatgggcacatggacaggctgcagagggctccaggttctgggcccctggctgagaaggggaggatcctgtcctggctgtagccttcctgccccaatcatctcgctggatgccattgcccaggggtagcccttcggtatgggctggggagaagggttggtcttctgccagggtccctaagaacaggtttgcagctaccctctctgaccttttccccatatcttgtgctgtccagggcctaggctgatagtcagagcctgtggcacacctgggatgggccagggccctgggtggggaggtgtgggttccctgggccaagaccagcctttttcctcagtttaattaatttatttatttggtttgtggttttgggttttttttgtttgtttgtttgtaggtgagttcccatcctctgggcccctagaaatgctgcctttgtgtgtggggtacctgggaaagggtgtggctgaggcagtcataatgcagtatcttcccctgactccagccacaaagctcatacccagccctaccaatcatgaactggaactccataaggaggggccaaattgggaggccttttggcaaacagtgtctattttacagagaggcaaaccaagcctccttagtgccctggggctgatggtcacccagagccatagagcacccttcctcctgggccagagctgggttatcatggttggcttaggtacctcaggtggcccaggaggtcccccctccataaggacgtcaaacttccaggagggccagtgttcctagtgtgggccaggaacaggacagggagaccttgtgatggcggggcagggagcctgttcgtagggaagatgaggaggcaagggctgcctctcacacctccaggttctctaagttctggggagggagcgccccacctgctgaggtcggtcctctcagccctgcctgccctggcctgggctctcccagcctcccagccctctgccccctcagatggctttttgtttttgtttttttttgcatccatcagagactgcacctctgtgtggcaggcagggcatgggttttagtcctggccactgaccagctgtgtggccctggccgagtcgtagccccctggagcccagcttccatttctataaaatggttgtttcgggagagaggggcaggctttctgtgtgactcgggagttcttccgtgagggctgccagggggtggtgtgccaggacctcaggctgggcctttgtgctggccttgcagtgggtgtgtggggaagtcactgtcccactatgggtctccactacccagtcactgaccctgggagaccccttctgtgtgggagggagcgggggctggctagcgggccccccagccagggatcccagaggctgagggttggggagaggaagccatcatctcattacctctgtcagtgcaggggtggctgctgcttcccttgtgcacttgggtcgctgtgattgtgaataaaagtgatttcgtaccagcctga

SEQ ID NO: 7448 - DNA, 708 bp, Homo sapiens
gaacaggacagggagaccttgtgatggcggggcagggagcctgttcgtagggaagatgaggaggcaagggctgcctctcacacctccaggttctctaagttctggggagggagcgccccacctgctgaggtcggtcctctcagccctgcctgccctggcctgggctctcccagcctcccagccctctgccccctcagatggctttttgtttttgtttttttttgcatccatcagagactgcacctctgtgtggcaggcagggcatgggttttagtcctggccactgaccagctgtgtggccctggccgagtcgtagccccctggagcccagcttccatttctataaaatggttgtttcgggagagaggggcaggctttctgtgtgactcgggagttcttccgtgagggctgccagggggtggtgtgccaggacctcaggctgggcctttgtgctggccttgcagtgggtgtgtggggaagtcactgtcccactatgggtctccactacccagtcactgaccctgggagaccccttctgtgtgggagggagcgggggctggctagcgggccccccagccagggatcccagaggctgagggttggggagaggaagccatcatctcattacctctgtcagtgcaggggtggctgctgcttcccttgtgcacttgggtcgctgtgattgtgaataaaagtgatttcgtacca

SEQ ID NO: 7449 - DNA, 2018 bp, Homo sapiens
gtctcaggcaaggagggggcagaggcaaatcaccgggcagagggtaggggaggagaggaggccgcactctccctgtctctcccgtctctgcacccagctcctctctgcatgctgagggctaaattgggatctcagcctgccctaatctttccccatctgaggcaggtttctaggaggtgtctgtagtccatgtggcacctttgtgagaattagaaaacatgtaccttcctctgggcagctgcagccctgagccaggacatgtggcctggctagtgcagcatggagtggattttaggctcatttgccctctcagccaactgcccttgagcagtgtacagcctgctcaacaaccgccctgggcaggccgctcctgagctgctgtctccctctctgacctatgcctaccttctctttcttcgttccctgcccactgggcatggcagctgggggtgagaggctggtggttgcctcccgtcctgggcaggctgcagcctcatgccatgtctctctcccactacctgatgggcacatggacaggctgcagagggctccaggttctgggcccctggctgagaaggggaggatcctgtcctggctgtagccttcctgccccaatcatctcgctggatgccattgcccaggggtagcccttcggtatgggctggggagaagggttggtcttctgccagggtccctaagaacaggtttgcagctaccctctctgaccttttccccatatcttgtgctgtccagggcctaggctgatagtcagagcctgtggcacacctgggatgggccagggccctgggtggggaggtgtgggttccctgggccaagaccagctttttcctcagtttaattaatttatttatttggtttgtggttttgggttttttttgtttgtttgtttgtaggtgagttcccatcctctgggcccctagaaatgctgcctttgtgtgtggggtacctgggaaagggtgtggctgaggcagtcataatgcagtatcttcccctgactccagccacaaagctcatacccagccctaccaatcatgaactggaactccataaggaggggccaaattgggaggccttttggcaaacagtgtctattttacagagaggcaaaccaagcctccttagtgccctggggctgatggtcacccagagccatagagcacccttcctcctgggccagagctgggttatcatggttggcttaggtacctcaggtggcccaggaggtcccccctccataaggacgtcaaacttccaggagggccagtgttcctagtgtgggccaggaacaggacagggagaccttgtgatggcggggcagggagcctgttcgtagggaagatgaggaggcaagggctgcctctcacacctccaggttctctaagttctggggagggagcgccccacctgctgaggtcggtcctctcagccctgcctgccctggcctgggctctcccagcctcccagccctctgccccctcagatggctttttgtttttgtttttttttgcatccatcagagactgcacctctgtgtggcaggcagggcatgggttttagtcctggccactgaccagctgtgtggccctggccgagtcgtagccccctggagcccagcttccatttctataaaatggttgtttcgggagagaggggcaggctttctgtgtgactcgggagttcttccgtgagggctgccagggggtggtgtgccaggacctcaggctgggcctttgtgctggccttgcagtgggtgtgtggggaagtcactgtcccactatgggtctccactacccagtcactgaccctgggagaccccttctgtgtgggagggagcgggggctggctagcgggccccccagccagggatcccagaggctgagggttggggagaggaagccatcatctcattacctctgtcagtgcaggggtggctgctgcttcccttgtgcacttgggtcgctgtgattgtgaataaaagtgatttcgtaccagcctga

SEQ ID NO: 7450 - DNA, 503 bp, Homo sapiens
atgtacgcaaagagggtgtctgtgtgtttgctggggggtggttgctccctggctttccaggatgttaggccttcgtcagtgcactcgacagacggttactgtttgtcaacagaatgcttggcgctgttctagctgctagggataagacggaaggagcccaggagttaaatttttgaaaattttaaattatgaggaatacaagtttactgtagaaaatgaggaagtacacatatgcatatagcaagcacctgtgagcatttggaagcatccacatggtttcagtttcggtgcttccccccacctattcctctgcttaaacagatgtcctgcaagagtcgtttcttgactgtgttcgctaatttatgtcacaagcatcgtgtgcgccattagccatccgggattgtaacggtgcgcgcgtagggaccggacagcggggcgcgccggggccgcctcccgagagccctgcgtgacactgccccgtgtctcccgcgcagatagcgagc

SEQ ID NO: 7451 - DNA, 226 bp, Homo sapiens
atgtgggggcaggctggggtgtggaggcctggtgtcctggatactaggggagtcatcaggagctgtggcccttccctgaggggtaattgcaggcctctgaggcttcaaggtgggctggggcaatcagggaagactccctggagtcgggggctggagcgtgacttgggtctagaatgccaggtgagccttgcaaattgggagaggctactgcatctgtgaggagcag

SEQ ID NO: 7452 - DNA, 151 bp, Homo sapiens
tgtgggttccctgggccaagaccagcctttttcctcagtttaattaatttatttatttggtttgtggttttgggttttttttgtttgtttgtttgtaggtgagttcccatcctctgggcccctagaaatgctgcctttgtgtgtggggtac

SEQ ID NO: 7453 - DNA, 396 bp, Homo sapiens
ttcggttaaaaaggcccaaaactttatttagttttcagggaaatataagatgcatgtaaacataaaatacaaaacaaaacccaaatcttacagtctagaagcatgccaagacagagcattttctgcagaccaaagagtcccgtcaaagtgataaaggacacctggaaagtggcaggccaaggggctggtcccttccccaagggcactgcatttttgtgatgagattaaaaacaaaccaactccactattaaaaatgctagaaacatggagatagtttagcaccaccattgattctggaaatatttcagcactcaaatcgactgcactgagtttaatgtcctttctccagtttctctgctgccgcggcacgaaggaaagcctgggggaaaggcttct

SEQ ID NO: 7454 - DNA, 226 bp, Homo sapiens; identical to SEQ ID NO: 7451

SEQ ID NO: 7455 - DNA, 9066 bp, Homo sapiens
tcaggagaatatgttgttatgaccactcatttccacttgaagagaaagattggctactttgttattcaaacatacctgccatgcataatgacagtgattctctcacaagtctccttctggctcaacagagagtctgtaccagcaagaactgtctttggtaagtcccaatcaagatacatacgcaaggaagggtatggaagacaagttatgtcatatctgtgacactgcaaagagaaataaaaaaaaatatacactcaaatattaagttcatataacagaaagtttcaaggaattgccactctcattatggtatatattttttaaaactatttaactagcaagctgttttagtatttgtgaatagatggcattaatgaatatttgatttgatattttgaggtaaaaatgaagtgaagcaggcataaaatgcataatattaaaaactcataaataaaaacttaatatttaaacaatatatttagaatatataacatgaatcactgagttgttcgagaagcttagaaaatatcagcagagctacttatttacatttataaaaagcagagcttctttaagtagggagagccaattaatgaccaccatatcactacaggaataagtcactttacctgatgtgtgcacttctgtagagttacatgcattcattttttctattacaatatttttaatgacctacatgcttcaagttaagaaatctaattgagtattgtttaaagggtaaacaaccttttacaaataggaaaacttatttcctcatgtattattttagagggtgcatttgatataaaaaggtatttcctgcctatatccccgtatactatttcaactgtatttttcaggctgataaaaatgaaagattccaatacaatatcttctagacacagaaagcagtagtgaactgaacacaaatcaccactctcgttatgaaaattgcattctgaagcttaaaattgagtaatcataaaatcaaatgcttttatactaggcgctattctatacaattagcctgtattacttaactataaaacaaattctatctactattattatttccatttttaaaagtgaaatctaaggaacaacagattaagtaatctgcccatagttagaagctattagatggagccaggacgaagaccctagcatttagctctggagtctgttcgcctaatgacaatgctgtatcgtcacctctgagctatcctgctgcaatgaaaataattgaaatgggagtattgtggttaacttcatttggaaatcaccactacgtatttattggtgagaggtgcaattatcaaggttcattccacaaatatcaactaggcacctgctgtttttaagagctgtgctaaaggataaaagccttaagaagcttatagtctaaactgaggattattcacctgaagagattcctatggtatcatttttcaataatatgtagtgtatgaaaaatcagttatctcagaaaaaaagcaagactctgctacaagtaccagaaacgtgtattttcttctgaacttggcaatatgcttctagattggcaaacaccaaatcattgctccgacaattgcctaagcatatagctaaattaatattcagaataattgcagctgcagaacaaaagagcagttcattgcatactcattctttcccattaccacgtgtcgatattaattagcaatgaactcactaaagacgaagtcttgttaagatgcttatatctgtatgagtatgcctttttctcactaggaaattaaaacaaacaaacaaacaaacaaacaaacaaaaacaaacaaaaaacacaggacaggccgggcacggggcccacgtctgtaatcccagcactttgggaggccgaggcgggtggatcacgaggtcaggagatcgagaccatcctggccaacatggtgaaaccccgtctctactaaaaatacaaaaaattagctgggtgtagtggtgggtgcctgtagtctcagctactcgggaggctgaggcaggagaatggcttgaaccctggaggtgcagctagcagtgagccaagatcgtgccactgcactccagcctggagcaacagagcgagactccttctcaaaaaaataataataataataataataataataataataataataaaataaacacaggacatatttatgttttattttatttttgtagtatgagtacaacactatattggaaaaggttcctttaaaaggtgatttaccccttcccacaccaacgaattctactcttttgatttgaaaattatttacagcatttcagatggtgtatgtcaaaaaacattgctcttaactttttcagcaatcttatatctcaacagactcatggcctttgatgaacataactatatgtctgtaaacttagttgtgacaagtatttttgtgtttcaagttttatgtttctaatattttaagttcactagaatcacaaatacaattttctagacttttaaccttttaacatttattttgtacacatgtttctatgctttttagtttgaactcagcacatttttttttctgagctctgtgagaagcctaaaaggatcatgtagattcaaaaagaaaaaaacaaaagaaccaaacaaacaaacaaaagttgtactttataaccatttattaaaagacatccagaatgaaagaaggttgcagtctatcttgtgccttagaagaccatattcttggttttccatgctgtctctcatctggaggcagtgtggtcacttaattttgctgccaaatacatccaagtttgagattcagtctcgccacctaccagctgcatggcattggcaaatttacttcctcttatggagcttcagttgtctgttaaatgaaagtacaaggaaagtaaagtaatgctgttttttaaaaatttagcaaataaaaaaaatatacattgtcaggttccatacttgtaacttaaaagctgttcaacaaatctgtgttcttttctcttttcctataacaggaattgtattttcctatggcacaaattgtatcttcatgttaatcttctcaactgctcttaatttatggacacatttggtttaaaaatacccgttaccacattacttctgagaactgactacataaaccaagatttttttaaaaaaattgaatttattgtagtagggatttatcaaaaaggactaaagttgtcaattataatagtcattagttttgcccttattatcaggctaagagctaaacacttcattgcattaccttacttaatattcatgatagccttctgagttaaacttattaaatcaacttacaagaaaaaaattttataaaccccagaagctcgtgattttaagtcaattttctcaacgtcattcagcagttatagaacagggatttgaaactcggttgccctggactttcaattaccctaatatttgctcaagttaatactgacatgtaaattcaggagcctgaatttacaagtcattgcatttaatcctcatgatagtcttttgagtgagtgagcaaaaatgtccttctcctagaatttcaacaatggtatagacagtggagagaatgaaaaacaagtcatcccttttacagatatgggcacagagttcctacaggttaaatcacttagcagaggtcatagagctaataagtggtaggattgagactagtcactggaagaagtcagaattatttctacaatatgtagcctgatccaccctgaatgggtaactgtgactgtttttttaacatttttatatggtttaaagggaacctgacagcattatacttttgtactgagtatagtgcattacaaatagtaggctgatagtatttggtaaatgaacattagagggtatcatctttctcatactaacatataattgtgtaagtaaactaaaatgggctaacttgaaaacttcttttgaatagagggcattttaatcactagggatggatttgcagagtaggaaagatgaggcagtcttatcagaaagaaaaaagattctaacattcgaatcagaaaaactggtgttcagatgttggtactgctacttcttagctgtgtattctctagcaagttacataaaatgtattattatatatatgtgtatatatatatatgtgagtgtgtgtctatatgtatatgagacacacatgtttctatctatatatgtcagatttaggaatttctttaaaaatgtagctatttttgaatcaggaaagatagtgtaaaaccatgagtcaataaagtggcaattttccccgaatagttcaattatctataaattatcaaaaagtcattcactttctggtttacatatttggggtacatagaatattaaacagagctgagtatccagaagttacctgtggatcacaggcaagtgaagatctgtgatttctatatcaagaactaggtacagtgaggaatgttatttcttgttttacccaggacacccatgttcaaagcgccaatttaaaggagcttactatcttctgaagagcacctcaatagcagagcaatttattcctacaagatatccccctcaatgctgccattccatgaatcacagactacactggggttaaattaagactcatcaattctaaaccaaaataagatggtctagaaaccacattctgtcatgatactgttgatttccttttgttcaagtaggctgtcccatcatgatgaaatttcacagtatgaactggcatcatgtatgtttttttttttctttacaggagtaacaactgtgctcaccatgacaacattgagcatcagtgccagaaactccctccctaaggtggcttatgcaacagctatggattggtttattgccgtgtgctatgcctttgtgttctcagctctgattgagtttgccacagtaaactatttcactaagagaggttatgcatgggatggcaaaagtgtggttccagaaaaggtaaatgctttaatggtcactgtagtacatcaatattatgtctctttaaacctatgaaatgagatgttttggcctgtggtattggatggagtatgcagaataataaggattctttttttcttatgtcgtaaacaattaagtgccatgataattttgttattgataaagggagaggtcatttaggtgaatagatgtacaaagtggaggagataaaggagagtcaggaaggcaaacatttctagtcaaataggctttcctgtggtttctattgatttgagaacagttttaatgaacctgatattaggagcaaataaacttagtcaaatcctttatttaccaagtgcgttataattttataacttgaaagttatattcttttggttgttttctgagcctaatcatttggtcataaatgtataaccataatgcctcaattaaattaagtttgccacatgaaccatccctagttctctgcaaagtcaagggcaggcacattttctctttccaaaatagacatatgctttagggatcataacacacagaaattaccaagaaatgcctcatggtagaaaatgttcaagttaagaatactgctgcttctctcaattagaacctattacacagtatggattttatgtcacagcttgggaggatagctgtgtttgtggggtttgaagaacaagcgtgacaaaatgcaagtaagctttgggatgctgtgatgaagagcaaagacagagacaaagagattttaagatgtttagaaataatctagaaggagtcacttgacataagcttttctgaaactttattctatagaatattagtttcttaagatactctctgaaaatttagttctttgttgatgcccacttgaatattgctgcatactgtatttcctggtcacagcatattaaaggggctaagaaattctgtagtaaataaactggcttaactgtgtttatcccatagttaaacaaatgcattagataagaaaatcctctgtagtggtaacatctaccttatttaataaaatctaaggtgttgtacttcttgatggcaaaaggctattaaatactgcctgcatttttaatttattataataagacaggcataaattatgtttttaaattcctaaataaggcacagatttaggctgcaaaataagggccaccttgctcagcaacttataattttgcttctcactgtttactaaacaaaatgcattgctctttctttctacagccaaagaaagtaaaggatcctcttattaagaaaaacaacacttacgctccaacagcaaccagctacacccctaatttggccaggggcgacccgggcttagccaccattgctaaaagtgcaaccatagaacctaaagaggtcaagcccgaaacaaaaccaccagaacccaagaaaacctttaacagtgtcagcaaaattgaccgactgtcaagaatagccttcccgctgctatttggaatctttaacttagtctactgggctacgtatttaaacagagagcctcagctaaaagcccccacaccacatcaatagatcttttactcacattctgttgttcagtcctctgcactgggaatttatttatgttctcaacgcagtaattcccatctgctttattgcctctgtcttaaagaatttgaaagtttccttattttcataattcatttaagaacaagagacccctgtctggcagtctggagcaaagcagactatgcagcttggagacaggattctgacagagcaagcgaaagagcaaagtcatgtcagaaggagacagaatgagagagaaaagagggggaagatggttcaaagatacaagaaaaagtagaaaaaaaaataacacttaactaaaacccctaggtcatttgtagatatatatttccaaatattctaaaaaagatactgtatatgtcaaaaatatttttatgtgaaggtgtttcaaagggtaaattataaatgtttcatgaagaaaaaattttaaaaatctacgtctttattacacaaactatggtgtgcttatgtttttgttttgctttttaaactgatgtatagctttaacattttgtttccaaagctgaagatccccattctttctctttgaaaaaaaaaaaggcctaatgcattattttgtcataaaatgctattttaaaattcatggaactttcatacgtaaaggtgcagttgctcattgtagagcacatttagtccaatgaagataaatgctttaaatagtttacttcactttcatctgagcttttaccactagactcaaggaagaataattttaacagacatgtatactccatagaaactaaactaaaatagtttaaaaatattccctttttcaccctattttcagatagcacatgagcccaacactcacttaattctcattatgaagatgtttttagaggggcaaaaatattttgcaagctctggaattgttgaatgtattcttttatataactacattaaaagctttagattgaaatttatgactagcaaacaaaaatagaatatataaacgatatatgtaaatatacagcatgagattgtacattttttacttttttaaaattgtgttcttaaaatattgtgtaagaatcactgcacttagctgttggaatgttgttaaatgctatggaaatacatttagaacctgcatttaagaacagaacagcaagtatgaaccacatggaacttaaaacatatgggtgtgaagtccacttatgtagacaaaacttataatttccaaactgttgtctagtatacagtgatcagttgctctctgttcaagtcattccacacatttccctattttaggctattataatatagaaagaaaatgggaagcattagttggagctagaaaatgaactgtatattattgctatatttgctaataccaactatttcaataagtgttgtaccatatgtagcattaaatataaaatacataaaagaatgtacagaaaatagcttttattgagtaatattacatttcatttatactgtagcaatatatttgtaggtatactatgtaagggctttaaataaaagaggtccattaatacttccttataaaaattctagtctgtttcattactgcccagatgttttagagataaatatttatgcagaaggtatttttgaagtctccttttgtctgatagagtttaacagatatttaaatttagtgctcagaatccacaagtcacggtctaaacacacttagaatactacagcataaatctgttagcattattgccaaataagacagttgggatccaaacccaagtcttgagcaatgtttttctcaaaaagctgctatccaatgatataggaaaatacattgtgttttcctaaacacacttttctttttaaatgtgcttcattgtttgatttggtcctgcctaaatttcacaagctaggccaatgaaggctgaatcaaagacatttcatccaccaatatcatgtgtagatattatgtatagaaaataaaataaattatggctctaacttctgtgttgctgtttatcttgttatttttcggcgttatactaatgtgtttattgagagcattttaccttccagacttctcatggctaacttttggtctgtattttgctccttagatgtgaatatttcttattagtctgcttcctgctacgcaatgactgcatttctatcatttctcagtttgttagtatatgtggatagtattctactgtataaatgattgcaaagtttatcaaaaacaaattattatatgtagcttttctacagtgctttgctaaaccatgtagtactagttaagtcttccttgaaaataaagatacactcttataggggacagttcctgttcactcccaggaaacttttttaaaagatgacactgaatgtttattgcactttagtgcagtgaagtggcaataaaacctaacatgaatcaaggttgtttatggcagatgcatgtgttgctttacagagtttagcaaaagctcttaattttatgtcatactgtattctactgaataataaagctaacattattcaataataaaatggaa

SEQ ID NO: 7456 - DNA, 304 bp, Homo sapiens
gggtgcagtggctcacgcctgtaatcccagcactttgggaggccgaggtgggcagatcatgaggtcaggagatccagaccatcctggctaacacggtgaaaccaggtctctactaaaaatacaaaaaattagctgggtgtggtggtgggtgcctgtagtcccagctactcgggaggctgaggcaggggaatggcctgaactcgggaggcggagtttgcagtgagccgagatcacgccattgcactccagccttggcgacagagcgagactccatctcaaaaaaaaaaaaaaaaaaaaaaaaaaa

SEQ ID NO: 7457 - DNA, 1423 bp, Homo sapiens
gtttcagggaggatggggtcgacccttgcgatccccagaggccccccatggctcctcctgggctggctgtcttcctcctgtgggttctgatgccacctgggccgacggcgtcttctcagcccagggcggccgcgcctccggtgagtttcagctgagggcgcacggccagctccgagcctggctccgggtgcagcaccggcctgggacctctgctgtcccgcgtaggggtgccctgcaaatatgtgatgaataagtgaagaaatacgttctatcttctaacttgccggatgttagaaggaaaccaagcttatgcttctcatttatagctaccgttaaggattggacagaagcttagctttttgggtgagacggacaacagtgtttttagaacctttggcaaggaagagctggaaagaacatgtatttgaaagtgactgacaggtcttctggccctagggggccacctgagcaggtgcacccagcttccctccaagacagaaaataaattaagaaggagagcaggaagggccccggcagactccagacgggagggggtgctgcccatcaggcagaaggagcttggaagggaggggccgtggccatgggacgtggaggtgggagcgggggtcatcataggtctgcacactcgggttgagtcccccttccccatcacacacaggacagccagcagtgagctgcttaccccaaggagtcaagggggttcttgggcaacccctggtgctggagccggcagtggacagcaccgcagccagaccttgcttatttttggctcatgaggaacatctgtgaccgttccctcccctggcctggaaggggatgtgtgacctccactcaaaacagccatgcggctcctccggctgcgggcggggagggcatgtttcccagcacaggcccaggactgccagctgagaggctgggaggggcccctcacccctagactttgcatgtgaagccaagcgtggagcctcacagggaatctgagatgggagccagtgagatgggggcaggacccagaggggagaagaggtcctggggatgctgtggatctggatccagcgtgcgggagctgaggttccggagtgaaacactgcctttcatggaagcacgtcttcctgtcacccatcggcttcattttaaaggatgaaaatgtatcagacattcaaggagagctgcatcacataaaagaaagaccaggcaaagaaacggaaaataaatggattgagaaatgtgaatgactccaatcattccaatcattggaatgaatggattggataaaactccaatccatagactcagattagggagatatatttatataataagaacaggaaactgtgaagatgaaataagacaaaaaagacacttttgagattaaaaaattactgcaaaaaaaaaaaaccaa

SEQ ID NO: 7458 - DNA, 1427 bp, Homo sapiens
gtttcagggaggatggggtcgacccttgcgatccccagaggccccccatggctccttctgggctggctgtcttcctcctgtgggttctgatgccacctgggccgacggcgtcttctcagcccagggcggccgcgcctccggtgagtttcagctgagggcgcgcggccagctccgagcctggctccgggtgcagcaccggcctgggacctctgctgtcccgtgtaggggtgccctgcaaatatgtgatgaataagtgaagaaatacgttttatcttctaacttgccggatgttagaaggaaaccaagcttatgcttctcatttatagctaccgttaaggattggacagaagcttagctttttgggtgagacggacaacagtgtttttagaacctttggcaaggaagagctggaaagaacatgtatttgaaagtgactgacaggtcttctggccctagggggccacctgagcaggtgcacccagcttccctccaagacagaaaataaattaacaaggagagcaggaagggccccggcagactccagacgggagggggtgctgcccatcaggcagaaggagcttggaagggaggggccgtggccatgggacgtggaggtgggagcgggggtcatcataggtctgcacactcgggttgagtcccccttccccatcacacacaggacagccagcagtgagctgcttaccccaaggagtcaagggggttcttgggcaacccctggtgctggagccggcagtggacagcaccgcagccagaccttgcttatttttggctcatgaggaacatctgtgaccgttccctcccctggccctgggaggggatgtgtgacctccactcaagacagccatgcggctcctccggctgcgggcggggagggcatgtttcccagcacaggcccaggactgccagctgagaggctgggaggggcccctcacccctagactttgcatgtgaagccaagcgtggagcctcacagggaatctgagatgggagccagtgagatgggggcaggacccagaggggagaagaggtcctggggatgctgtggatctggatccagcgtgcgggagctgaggttccggagtgaaacactgcctttcatggaagcacgtcttcctgtcacccatcggcttcattttaaaggatgaaaatgtatcagacattcaaggagagctgcatcacataaaagaaagaccaggcaaagaaacggaaaataaatggattgagaaatgtgaatgactccaatcattccaatcattggaatgaatggattggataaaactccaatccatagactcagattagggagatatatttatataataagaacaggaaactgtgaagatgaaataagacaaaaaagacacttttgagattaaaaaattactgcaaaaaaaaaaaaaaaaaac

SEQ ID NO: 7459 - DNA, 982 bp, Homo sapiens
cggccgccagtagcagagcccagcacgttgcgggtgcccagttcatcttcgtggggctaaacctgcgggaagagagggaaagggcccttagtttccatggagatcgggtgcccaggggcggagggctcaaggctggagagcagagggacccccatcttttgtgggatcagggtgcccccagcatcttggaggcccactgaggcctgggggggcgcggtttaacctctagcatcagggacttaggcctgggggaggcgctgggaagtggcaggtggggcaggagggttctgcacctgaaggttgtgcacctggattgggggtgtagaagcggggcaggagcgttcaggcctctgggggcgtccaggcccgggcgggggagcaagcctgggggagggagctctgcacgcgttgctgggatgtggggggcggggggaggcggcatggggggaggggcgttgtgtttggaggacgcggtagccgggaccaagagctggctcagatcagggtctggaacggggacgggccgtgcctgggcctggtccccacctttggggccaaagcctgggtgcgggccttgcggatgctgcggaggacaagcggctgctgacaccgtgcggactccgccccagcagacccgtgccccagggacagtccctcccgcgcgcgcccagcgctcaatgccgtccccggccgcctagttcagcagctggctgggggcgggacggggtcgagttgcggggccgcgtccagacacggctgtgcgggcgacagctgcatcccctccccgcgccgcccctcgctcccggccccgtacccgccccagcctcccggccttacccgccacgggcctcggttggaaccgcgcgctggagtatccgtccctgaggccgcggccgagcgggaaggagcgggcgggcggcggcgcggaccctcagccggagcgcggagccgcggcgcctgggttttgcgcgaggcctccgcc

SEQ ID NO: 7460 - DNA, 640 bp, Homo sapiens
tgtatcttagggtgtataagagaagcgcaagagaaacatttaggctgttttatgtttgagtagagacatgaaagttttaaataaagcagcagcacaatgagtccagcggcacatcagaaagcaaatcaccatgatcaggtcaggttcagggtggttttatgtcatgatatatgtcagtgtgctttacctattagtggaccaaaggcaaaaaatacggttttctacagagaaagacaaagcatttgatttcaatcaacattcgtttgtggtgaaacatgttgagaaaactcatcatagaagtgaaatgttttctttgataaaggctaatctcagaagacatacgtagtggagagcttttaaatgtatttttaaaaatacgaaccaatgagaagattgcctactttcaccgcttctgtttaacacagcattggcagagctgccaccaagaagaacacagcacgttgaaggcacggtggctcctgaagctgcagccctgagacctgattgtaccatggaaggtggggtggctcctgcagctgtagccctgagacctgattccaccacaagtgctgcagctggcagaggccacaggacataggcatagctggtgaaacctgcaactgagggtgtcgggggctcc

SEQ ID NO: 7461 - DNA, 640 bp, Homo sapiens
tgtatcttagggtgtataagagaagcgcaagagaaacatttaggctgttttatgtttgagtagagacatgaaagttttagataaagcagcagcacaatgagtccagcggcacatcagaaagcaaatcaccatgatcaggtcaggttcagggtggttttatgtcataacatatgtcagtgtgctttacctattagtggaccaaaggcaaaaaatacggttttctacagagaaagacaaagcatttgatttcaatcaacattcgtttgtggtgaaacatgttgagaaaactcatcatagaagtgaaatgttttctttgataaaggctaatctcagaagacatacgtagtggagagcttttaaatgtatttttaaaaatacgaaccaatgagaagattgcctactttcaccgcttctgtttaacacagcattggcagagctgccaccaagaagaacacagcacgttgaaggcacggtggctcctgaagctgcagccctgagacctgattgtaccatggaaggtggggtggctcctgcagctgtagccctgagacctgattccaccacaagtgctgcagctggcagaggccacaggacataggcatagctggtgaaacctgcaactgagggtgtcgggggctcc

SEQ ID NO: 7462 - DNA, 707 bp, Homo sapiens
ggtacagccagcacaaaggcccgagcttgctgtgttcaaagaacagacaaaaaaaccgcatggttgaaatgtaatggaggtgtgatatgtaagatgggtgtggagaggtgcaaggtggccagcccacatggggcctcttaaagactgtggttagacaggtctacgaaaatgtcagaaagctttcaacagggaaatgttgacatcaggcttcatttttcagaagatctggcttctgtgtggagaatggactatgttgggacaaaagacgaagtgaggagattagatagatgccaattttaccagctccggcaagagaggttgaggcttatgcttggttagcactggaagtgaagaagtaggagcagactggattcttttctatcagatttggagtaccattagccgtataaatcattgtggggcggggaatgcctggtgccgtggctcgtgcctgtaatcccagcactttgggaggccaaggttgggagcattgcatgaggccaggagttccaaactagtctgggcaacacagcaagaccctgtttctacaaaaaaataaaattaaaaattaggtagacgtggtcacatgcaccagtagtcccagctactgggaaggctaaggctggaggatcttttgagcccaggattttgaagctgcactgagccgtgatctcaccacggcactccagcctgtgcaacacagtgag

SEQ ID NO: 7463 - DNA, 906 bp, Homo sapiens
atataatggacttacctgaggaaagacagcacataggcatggggagaggtaaccaaggtgaattttacaaactggtgtatagtagatttaaatgctcaaaaataaatgtaactgagaagagttaataattgtgagatttttcccaaattgagatacagaagaaaatatagtttgaatctgaaatttaacacttatttatgtaaaacactttatttaagatattttctaatgattttaattttagagagtaccttttcattctgtgtgttacagagaagtactgaaaagttaaggacacttgggggctacttttttccctctaaactaaaaaagacattggctgaattataactagttagttatcacctcgtcccttaaagtcagtgacctcctgtgtttgatgtatattacatagagtcttaagtcagtgtacagttccactggaatttgacagttgtctctacagtcatgcaactcgaagtagaaaagagtgctggacataggaagggggtgcttggtttgaggggttaatgtgaggcctttttgaaaaatgaatattttgataaaaagaattcttgttttagcacagttgatgcacataagtgattctcatatttgttgtataaactggtttaatacatttggaacatagttggattacattcatttcctgggaaagctagcttaccatacattcaagtttataaaacaatttgccataggcaaagccatttaaaaagttcattctgaaattatttcatttacctacagtgaaataattgtgaactaagtagtctttctgaaaactgttgggttctaggcattcctgagaaattgaaagtggctacctttcatgtcaaaaatgttgatctattataaataaaatgtttttgcatatgtttttga

SEQ ID NO: 7464 - DNA, 312 bp, Homo sapiens
taaatataatttatataaatttacctattttggtttatttttactaaaaggggaccatgttgctataaaactaatacatttcagaggtacctggaagaaaaatgtttaaactctgatttgcttcaaactatagtagaatatgtgtatgtttgttatcaggtgaatgggtagaatgtatttttattgtgaacatttttcttaattaatgaatatatttatttaagtgctaatgtttttttaaaggcaatagtaggcaagattcacagtgtatttcaagtgagagtctcttttcttaaatattttaatatcatt

SEQ ID NO: 7465 - DNA, 440 bp, Homo sapiens
atttcctatgcttaaggcatgtattttcagtaagcagttaaaaagacagcatgacttttttattaaaccctaaataatcatatatagcttttctggtttattaatgtatagaataattctgcagtggtagaaatttaacaggggaattttatccataactatcaatttcatactttacctagataaccagaattatgtgacttgtttgttgaaagtaacatgcgttgtatgacttgtttgttttttattgaagtttgcatctcaaatgataatttaaagtttttgttagtgaaagtagggcagtgaccacacctttatataactattattaccttgattaattgctacattgtaaaagaaaatattttctacaattacagaatcctcagaacaactctgaaaacaaatgaggtattatccccaattaaaaaaaaaaaaaa

SEQ ID NO: 7466 - DNA, 1572 bp, Homo sapiens
ttgaatttgacccaaagtcaggtggtcagttcatattgaaaacatagaaaatcatttgtcactttaaatgttcatgctcagtcatttctttaccacctgtctgtgtgcaacttggaaatttctggagcactgatgactgtgcatttgtgatttcctttaggatgccatttccatttaccaattgctttcctcagcctgcaattgtgtcttcattctgattagtttattccatttagattttaagaatgatagttgatgactgcctttttcccaatgttacaatagtagaaatgtggtatcttacattttccaaacattttcttctcctgggctttcctgtaccgttcagtgatggagagctcacagttcctattgagatatttattttcattactatccttacatagaacgcatttccagaactttttccttccattcaacttatagctcctctttaaaaacaaaattattctatactccatgctttgatactctaaattcaaccggtcatatttttttttcttttcctttctctttgactggtcaattcagaaaaggaagtccagttcgagtgttcagatgatggtgaggatctatctgccagatttctcctcctgtgaaaattcacacttaggaataaaagtcttatttacctaagatagtgtaagtaagtggagagggtgtaggaccattacaggtcagtgttagtcaactatcaaaacacggtacttctcttacatattacattgttttttctctgaaattgaatttgttatacatgtagatagtatattaagaggtttgctcttttacaaagtcaattttctctttgaaaataaaaagaccatgacagaatgaatgtctgtatagtgatcagtaaaaacaaacaaacaaaaaactatatgttttttttaatgttctttatggttgctaaaataggagtgatttataggacaccataatacattcaccatggagtttataaaggtgtgaaagtgatcttacaatgtaccaatcctagttaagtacctttaaaggaaatgtttattaaccttcaaacaataaatttaacacctgagaaataggaatatcttgcccatgcctcataagagtaattcagtgcatcatacaattatctgatttgattgattcatgattttttaaaaaagaaaaacaccttgcttctattaacataaaataattatatcacacaaaagtgccagagtttttgtatttttaaaagacatctatgggccaggagcggtgtctcacacctgtaatcccagcagtttgagaggttgagacagacggatcacctgagatcaggagttcgagaccagcctggccaacacggtaaaaccccatctctactaaaaaaaaaaacaaacaaacaaaaaacagaaattagccaagtgtggtggccgtacctgtaatcccagctactggggaggctgaggcgggagaatcacttgaacccagaaggcagaggtttcagtgagccgagatcgcgccatggcactccagcctgggcaacaagagcgaaactccatctcaaagaaaaaaaaaaaagac

SEQ ID NO: 7467 - DNA, 445 bp, Homo sapiens
cccaaaatagaaataaaagtatctcagaatatttctttcatttgcattcactgataaaaactaaatatagcatattaaatacatgtggtgctttaaccataagtgcccctgttcatttgacaggaagccggctatgttttgcctagcatgtttcccgaataggaaattattcgtgtgtgcatccctccccttttctcacgtaccctgtactaacataaatactgaattttgatccctctttaatagactttttacctcttatctctttggctcttgcacaaatatcatgttaaattctgtgcactttgatttaaaggaaaaaaaaggttttaactatctgcagaatatagattgatgacaacatttatagaattttccagtaaaggaaagtttagaagttttctcatccttttctgtgggtcaagcagcacagtgtcacaactta

SEQ ID NO: 7468 - DNA, 344 bp, Homo sapiens
ggattatatatgaaatagtcatgaaaaaataatgttgttatacaatatagagttcctatagaaataattaaatgtcttaatctctctgatttactacagttccaaactaccatggtgacctaaaagtctgtaaaaaccaaatgcttttccaaataattatgctgcatacgtgaaggccactgaaatatatagcctgaaaaatactcacatttgggtatggaaaatagaatgtcaaatgtctaaattaatctgcttgggcagtttttataaaggtcttaattattccttgtttctgtcataaggtgttgagatatattcaagatgaatgatctgaacaaatatta

SEQ ID NO: 7469 - DNA, 4699 bp, Homo sapiens
ggaaacagccacctctgtccacggtgcccgccgatggatacattctggagctggatgatggcaacggtggtcaattccgggtcagtagacagcccactacgtacttgttaacccaaagcagtgactctgtcagaggacctgccagggagtctcagggctggcttccccatctctcctggggacaggccatcctggcagggcctgcctgcccttcacctgaagcctgctttctccctctaccgtgaaggtggatggagcagtctctgaaactgccctacccttcttatgagacaggacatgcagtactggagtcagactgcctgcattcaagttggtctcctccaccctagctatgtggacaatgcctaattatcacccctttgagtcttcaggtcctcatttattaactagagggatgataacaatagcgtgaatctcatgctttgttgctaagagtccattagataattcatacaaaattcttagcatgctgcctagaacatagcaagcgttcattattagttattattattaccatcattgcttattgctaataatataattaaccgttgtccaagatttatttctgcaatccacagcttctaatgtctttgattggcattcctcttaattgacatggtctcctgttatagcttccctattctaagcaacctttctagcaaaggtttccccagttctatagttttgttctgggcctttcaccagatagaactggtaccagaagattgctaccttcccaaggtgagggagccctatccccattgagaagctcatgctgccctctgaaggcaggacagaatggcctcctggtaagacacagctgtggtaccaccagattgatgattcatgtgccaccacctgccggcatgtgtctgcttctctcatacagagcttcattctcatccatcctctccctgccaccctactttccatcctctccaccctagtcttgcctggaagttctgatgcttggagcttcctaagggagcagccgttctggggactgaggccagttcctgcactgatgaagaggagacccctgtctaaaaaaacctcaggcccgtgaggatgaggctttcttctggtcaccaatagccaaacctgagccactagctttcaagagcaaagcctctcaaggcccccttttcctgaatgtgtttttgatcccccactaggtttaagtacttgagagcaggggccttgtcttctacaattctcctcaaggacaaaggttctctcttttgatagagaagccttatttacatatatgttgatttattggcatgataaaatctaatttctttctttccaagataagggcctcaggttccatttcatgtcttttgcagtgtgtgtgagagtgtgtgtgtgtgtgttgtgtgtgtgtaaaatcctatttgtcagtttctcattcctgactttgccttttcagtgcctgtgtcattttcagggcctttcttttccctttattatcttttttttctcctgggaaagtaactctcccggttttcccaattctttaaataattatcttattttgtcttgactttttcctctactcaaaagtgcggtcctcccccagcagcattggtttcacctgggaacttgttaaaaatgcaaaatcgagaccctaccccagacacctactggatcagcaactgcatttttacaagatcctcaggtgattcatatgcacgtaaagtttgagaagcactgaatgagaggacataatattccaatttttgttattccagcaggagtaatgaattgatgggtgatccaagaccgtggtcttcttagtatcctaccagagagttgtcatattaaggctgtgctttgaatgcaaattatttttattcattacatcagcataattttgcaatgtgtacagctgaagagggaggcaaatgcctaacctatgctaaagacgcattatgctaggatttattttaagcctttgaaatgtcattcttcctcctttccctgtttcctcccccttccctctgtactgtgatgaaaacctatccccggtggcttggagtgtaatctctgtgacagttctgaagttatcagcggagttctaaacataggatagagaccaccttcctgttttcatggtttcaaacatgttttttacaaaccatactgatggataaggagctcagtaggggctatatactgtaccaatcccaagttaataagtgtaatctgaactataagcactcagttttattttttttaagccctagctgctaataactaccattcattaggctgcctggcccatgctaaatacaaggcatgacgctaatctgcatatacaacattaagtaatcctcacaccaacctcataaggtggatattattatcccattttacagattaggaaactgaggctaaaaaggtaaattaaatggcccaatatctcacaggattcaaatccagattagaatgacaccagggctcttgctcctaaccactgagcgacactgcctccctcgcccctcagaagggggcaggctaagtgctgtcctgttctttgctgactctcaggaggtgtatgtggggaaggagacaatgtgcactgtggatggtcttcacttcaacagcacatacaacgctcgggtcaaggccttcaacaaaacaggagtcagcccgtacagcaagaccctggtcctccaaacgtctgagggtaaggcccttcagcagtatccctcagagcgagaactgcgtggcatctaaagtggctggcaagcccggaggtaaccccaccactgcccacattcctgaagtgtttccatgacttgctctgcattctgcacagagccgctgttcctctcctgcctttagagagcctatggtatgtggatgtgatcaaaccaaagattccacatcggcagttccaatggcttgggccggcggcttcctttgataacaatctaaataagctgcagttgaagaagctgaaaaatgaaggcctgaatgtgcccctggtgtgtaagacaaatgtatctaggctctagagcaggctcccattctccaccgatacacatcatgtgccagttttgcccagatgattctaaattactctgtagtacttgcttgttctgagggtgggacctaggttctttccagtcgtggatttgtatgactgaatgtgtttcaaatgggtggtggggtgctagagctgtttagagagggcctgttggctgctcctggcttacccacttagactgcctccgtttcatacccaaagcggaggccgtcagcaccaggattgagacttcctgtgggcaccaaacaggaagagaccagcaacttcgcattacccgccattttcatctttgccagtcccttcagtcttggctaggctaccgagagccaccatacaaggttcatctctagagaatttttgcttcttagctatactttaaatattttggtcatcaaagacaagtaatgtgtctcagatgagaggcttgaatttgatggccagatataacctctgaggcttttaacattttcattttaagagtaagcaagacacatgaaattaaacctacaaggaggtatttgtggctggtgccaaagcattctgacactttggggtgtcattttaatcaaagaaatcacccccccacctcaccgggattctccataacttccctctgcagaactaattatgttgattttgttcaagttcaagatgttagctaaaagaactatggtggtgttttttttcccacttcccacaaacctcaacatgtgccagtcaccctaaaatgcttcacatggttaaaaacaagcacaattttgaatcctacagcaaggatgaaaggcccctagccgtgaaaacagtgctttggggagcagttgtcagtctaagtgatgctattccaagagaaggatatgctgagggaaaatgcccacatgacctgttcccatttggagtacagtgatgtggtagctacagcttcccccagaattatcattttagcaccttctctcagggatgacctatcagtttgagagcagttgcctcttttctcaaaataccatactaactgctaaagccctccaagagtctttcctagatgcaacgcagaaggcccttgctggtgatggcctcatttcccatgtgtgtacaaggtggtttgattgaagagtgaagtgcatgcctgcagagcagagagaaatttgtagcaatgttgctaatatgtgttatcagatctgcgggaaaactatttctattcataatacatcatgggaatcatactattctggtaaaaatcagttattagcataacagcctgagcacttatgtctctcgtttcatcctgcaggaggatgtagcgcctcagtttattttaatgttcataagattatggtgtctaatttaataaattacaggattggaactgcgatccttggtaccacagtcacagaactgggggtcattttctagatgaaacaaacggaacaagttctcttccaacaaagaaactgtactgtagaaattaatttcctccatgaattttatatattgtgtacaaatataaggtatgtatctgaatacaaagaaaagcctatcatcatatagatatcagtattctctgttactgcacagaagtaattttctcatgatgaaataaagttcacacacatactttctccataa

SEQ ID NO: 7470 - DNA, 311 bp, Homo sapiens
gcacagcggccgggcgcggtggctcacgcctgtaatcccagcactttgggaggcagaggcgggcggatcacgaggtcaggagatcaagaccatcctggctaacacagtgaaaccccgtctctactaaaaatacaaaaaattagccgggcgtggtggcgggcgcctgtagtcccagctactccggaggctgaggcaggagaatggtgtgaacccgggaggcggagcttgcagtgagccgagattgtgccgctgcactccaacctgggcgacagagcgacactccatctcaaaaaaaaaaaaaaaaaaattat

SEQ ID NO: 7471 - DNA, 1657 bp, Homo sapiens
gcaggaactacactggaagtggggaggggcagtgtgctctgggtagctgtcctcctctgtaatggcaggagctgggtatgcctcgtgacctcttggactcctgctcacattatcactgctgccttcccagatgagctgtgcaaatagatggcggccatgagtggaattggaaacgaggttggagggagcttctgtctgtccagtttggggcctgccaagcctggcatggtgagggtatggtggagccaggaggggccactatgggagccgggccaggaagctgcattctactgagccttttacctcttgcaaggacctgcctttcaggagactttggtctctaaaggccagggatggaagcttcagggagagctctccagctcctgtttagctctttggttcagacctaagtggcgagccacttgactggatgggacctccagccagccacagcattggaatccagcctggctcctgcactgcctttcatattgatgtccatgacaatcccagctgtcttgcagtacatggcacaggcagccctggcatcttgaggagggtgttcagtgtggtccctggcagaatatgagcctggggcagacaggatgtggctttagaccgtgaacagggagccatgccccaggacatacgaccctgtgccccacactcgcccacactcactcctggtcattaatcacagtgctcatgggcccctgattcaaaggaagtgccagctgtacatgggcccaatgaactttactcaagattagaggactgtttaggggcatttgaaatgaattgtggaaaggacatttgtgagaccatttgaaaggtcactcaggggtggtacaacaggataaataatgaacccattacaaggttctagtgaaccactgtggccttgggaactgaatttcatcactttggaagccagagaaaggcactggaaatagctttgcctttgcacagaggggagttttcttctgcttaactggatccaattagaaagtgattcaccgaacacttattctgtgcgagggtcttacagtaaagactcagtgtggcaaggcccctgttttccaggactttacaatcctagttgggagtggggtgaggtcaggggtgtgtaagttgaacactatgatgagagcaccctgaggcggatgcagccagctccctgtgaacatggacaacatgacagggctgggtctagacactggaaatgggtccacctggtttactagacttgagctgaacccatttgtacaattagaggaatttatctattcaccaaatatgcatatctcttcaattattaaagactaccatgtcctactttcagtcgcccagaaatagaccctgcaattccagtgccagtaactcatgtcagaggtgatccctggagacactgcaggagagtgggcaggaagacagggagtgaaggtaggcagcaacggttccttatccagcaagtcatgagtatggcagccaggtctcatcctgtacagaatagccctcagcatcatccccaccaaggggcaaggaagccgggtgttcattcccccacctccctctgtcattggctgagggctgcattgaggcattaactacccagggattctgccatgtcctggtaggagaaaaaaaaaaaaaaaaa

SEQ ID NO: 7472 - DNA, 1659 bp, Homo sapiens
gcaggaactacactggaagtggggaggggcagtgtgctctgggtagctgtcctcctctgtaatggcaggagctgggtatgcctcgtgacctcttggactcctgctcacattatcactgctgccttcccagatgagctgtgcaaatagatggcggccatgagtggaattggaaacgaggttggagggagcttctgtctgtccagtttggggcctgccaagcctggcatggtgagggtatggtggagccaggaggggccactatgggagccgggccaggaagctgcattctactgagccttttacctcttgcaaggacctgcctttcaggagacttcggtctctaaaggccagggatggaagcttcagggagagctctccagctcctgtttagctctttggttcagacctaagtggcgagccacttgactggatgggacctccagccagccacagcattggaatccagcctggctcctgcactgcctttcatattgatgtccatgacaatcccagctgtcttgcagtacatggcacaggcagccctggcatcttgaggagggtgttcagtgtggtccctggcagaatatgagcctggggcagacaggatgtggctttagaccgtgaacagggagccctgccccaggacatacgaccctgtgccccacactcgcccacactcactcctggtcattaatcacagtgctcatgggcccctgattcaaaggaagtgccagctgtacatgggcccaatgaactttactcaagattagaggactgtttaggggcatttgaaatgaattgtggaaaggacatttgtgagaccatttgaaaggtcactcaggggtggtacaacaggataaataatgaacccattacaaggttctagtgaaccactgtggccttgggaactgaatttcatcactttggaagccagagaaaggcactggaaatagctttgcctttgcacagaggggagttttcttctgcttaactggatccaattagaaagtgattcagcgaacacttattctgtgcgagggtcttacagtaaagactcagtgtggcaaggcccctgttttccaggactttacaatcctagttgggagtggggtgaggtcaggggtgtgtaagttgaacactatgatgagagcaccctgaggcggatgcagccagctccctgtgaacatggacaacatgacagggctgggtctagacactggaaatgggtccacctggtttactagacttgagctgaacccatttgtacaattagaggaatttatctattcaccaaatatgcatatctcttcaattattaaagactaccatgtcctactttcagtcgcccagaaatagaccctgcaattccagtgccagtaactcatgtcagaggtgatccctggagacactgcaggagagtgggcaggaagacagggagtgaaggtaggcagcaacggttccttatccagcaagtcatgagtatggcagcacggtctcatcctgtacagaatagccctcagcatcatccccccccaggggccaggaatccgggtgttcattcccccccctccctctgtcattggctgagggctgcatttgaggccttaactaccccgggattttgccaagtcccgctaggagaaaaaaaaaaaaaaaaaa

SEQ ID NO: 7473 - DNA, 1659 bp, Homo sapiens
gcaggaactacactggaagtggggaggggcagtgtgctctgggtagctgtcctcctctgtaatggcaggagctgggtatgcctcgtgacctcttggactcctgctcacattatcactgctgccttcccagatgagctgtgcaaatagatggcggccatgagtggaattggaaacgaggttggagggagcttctgtctgtccagtttggggcctgccaagcctggcatggtgagggtatggtggagccaggaggggccactatgggagccgggccaggaagctgcattctactgagccttttacctcttgcaaggacctgcctttcaggagacttcggtctctaaaggccagggatggaagcttcagggagagctctccagctcctgtttagctctttggttcagacctaagtggcgagccacttgactggatgggacctccagccagccacagcattggaatccagcctggctcctgcactgcctttcatattgatgtccatgacaatcccagctgtcttgcagtacatggcacaggcagccctggcatcttgaggagggtgttcagtgtggtccctggcagaatatgagcctggggcagacaggatgtggctttagaccgtgaacagggagccctgccccaggacatacgaccctgtgccccacactcgcccacactcactcctggtcattaatcacagtgctcatgggcccctgattcaaaggaagtgccagctgtacatgggcccaatgaactttactcaagattagaggactgtttaggggcatttgaaatgaattgtggaaaggacatttgtgagaccatttgaaaggtcactcaggggtggtacaacaggataaataatgaacccattacaaggttctagtgaaccactgtggccttgggaactgaatttcatcactttggaagccagagaaaggcactggaaatagctttgcctttgcacagaggggagttttcttctgcttaactggatccaattagaaagtgattcagcgaacacttattctgtgcgagggtcttacagtaaagactcagtgtggcaaggcccctgttttccaggactttacaatcctagttgggagtggggtgaggtcaggggtgtgtaagttgaacactatgatgagagcaccctgaggcggatgcagccagctccctgtgaacatggacaacatgacagggctgggtctagacactggaaatgggtccacctggtttactagacttgagctgaacccatttgtacaattagaggaatttatctattcaccaaatatgcatatctcttcaattattaaagactaccatgtcctactttcagtcgcccagaaatagaccctgcaattccagtgccagtaactcatgtcagaggtgatccctggagacactgcaggagagtgggcaggaagacagggagtgaaggtaggcagcaacggttccttatccagcaagtcatgagtatggcagccaggtctcatcctgtacagaatagccctcagcatcatccccaccaaggggcaaggaagccgggtgttcattcccccacctccctctgtcattggctgagggctgcatttgaggcattaactacccagggattctgccatgtcctgctaggagaaaaaaaaaaaaaaaaaa

SEQ ID NO: 7474 - DNA, 2068 bp, Homo sapiens
gtgccattccacaggtagaaacactcacatgtgcttagaaacgctctgctttcctccttgattacccaaattctcattctgagcttctatttctccagatctagactcgggaatttaatatctgaagactcatatagggctgatctaccctaacttgcaaaatttcatgcatatttcatacttacactcttcatatgtcagtggtgctattgtttggctactttctctatctgtgtggtttcatcaccagtctattcacccctatataaaacttaagatttgagataagaactggaatttaaatgacttaggaaagaatgtatcttggttagaatataagagtctgaaaagtctgctgtgggtgctaagctggctactaagggaaatgctaacagaaatttgtcatatgtcttcagagtattgtctggcaactgattaaaacagaggaagagtgaaacaacatctgcttctctccacctcacactgataaaatggttgaataaatgcactttgcttatggccatgaagaacacaggggacttcatctttccaagtgttttcatacaatgctcaaggctaattcttttggtcctgatgttttatttcttagcacctgctggatcaagaagcacccacaaggatcatttctcaaaaatgtctgaaactatatctattctgactatgaaccttgatcacaattcaaacccttaggctactgttctgattgttttcagcattacccactaacttttgctttctatttccatattctgtattctgggggcactttttatacagagtctgaaagtgctattcttttttttttttttttttgagacggagtctctctctgttgccaggctgcagtgcaatggcacgatttcggctcactgcaacctctgcctccggttcaagcaactctcctgactcagcctcccgagtagctgggactacaggcgtgcaccaccacacccggctaatttttgtttttagtacaggcggggtttcaccatgttggccaggatggtcttgatctcttgacctcctgatgcatccgcctcaggctcccaaagtgctgggattacaggtgtgagccactgtgcccagcccgaaagtgctattcttattatgacctacagtggtaatatttcacttaaaaatcagtgctatgcccattgctggttaacaagctttggagaagtattaggttgaaccatagaaactgccacaactgttcaaatattgaaaattttatatgcttcagctcatagtctccttcacacacattctctttcatatttttttataattttattttttgtatgacttaatgggcacatgctgatttcctgtatgtcgtcaacactcctgagccatgagggtaagatcagagctgcaggagtccagacacgtactttgtcgcctgccaagtgaaagacaatgaatggagttatctaaatttttcagtgaactttttggtgtctatgttgtctaattttattcccttactttgtgtttaagaaagatctaatacccacagagaataccaaggctattaaagtctaagcaggtgacctacctcaaagcttaagttcctgttatcataggcctcgtttctcaaatttgtataaatgtacatgtgatggaaaaccagaagatgcttggtaaacatggtcagttttactcaatgatgaatggtttcagtcatttttttgtattaaaggaaacataaatatactatggagtaaaatgcaaacactacacggttttttaagataaattctgacacttgaaaggcatgttctgcatttagggctattgccagccccagaaccatgggatgaagttttactccttctgctggtagaggaagtttagtggaaggtttgagaacctgagccctgagtgtaggaaatgcatagaagtagcaaagtctgaacaacactgagaactacacagtaaaattagcacataggatttattatcctttgttgaatgagtatatgagtatatgatgatgctgctgatgatgatgacaatgaccacgatgatttaaaaaaaaaaaaaa

SEQ ID NO: 7475 - DNA, 2071 bp, Homo sapiens
gtgccattccacaggtagaaacactcacatgtgcttagaaacgctctgctttcctccttgattacccaaattctcattctgagcttctatttctccagatctagactcgggaatttaatatctgaagactcatatagggctgatctaccctaacttgcaaaatttcatgcatatttcatacttacactcttcatatgtcagtggtgctattgtttggttactttctctatctgtgtggtttcatcaccagtctattcacccctatataaaacttaagatttgagataagaactggaatttaaatgacttaggaaagaatgtatcttggttagaatataagagtctgaaaagtctgctgtgggtgctaagctggctactaagggaaatgctaacagaaatttgtcatatgtcttcagagtattgtctggcaactgattaaaacagaggaagagtgaaacaacatctgcttctctccacctcacactgataaaatggttgaataaatgcactttgcttatggccatgaagaacacaggggacttcatctttccaagtgttttcatacaatgctcaaggctaattcttttggtcctgatgttttatttcttagcacctgctggatcaagaagcacccacaaggatcatttctcaaaaatgtctgaaactatatctattctgactatgaaccttgatcacaattcaaacccttaggctactgttctgattgttttcagcattacccactaacttttgctttctatttccatattctgtattctgggggcactttttatacagagtctgaaagtgctattctttttttttttttttttgagacggagtctctctctgttgccaggctgcagtgcaatggcacgatttcggctcactgcaacctctgcctccggttcaagcaactctcctgactcagcctcccgagtagctgggactacaggcgtgcaccaccacacccggctaatttttgtttttagtacaggcggggtttcaccatgttggccaggatggtcttgatctcttgacctcctgatgcatccgcctcaggctcccaaagtgctgggattacaggtgtgagccactgtgcccagcccgaaagtgctattcttattatgacctacagtggtaatatttcacttaaaaatcagtgctatgcccattgctggttaacacgctttggagaagtattaggttgaaccatagaaactgccacaactgttcaaatattgaaaattttatatgcttcagctcatagtctccttcacacacattctctttcatatttttttataattttattttttgtatgacttaatgggcacatgctgatttcctgtatgtcgtcaacactcctgagccatgacgggtaagatcagagctgcaggagtcccgacacgtactttgtcgcctgccaagtgaaaggccaatgaatggagtttatctaatttttccagtgaccttttggggtgtctatgttgtcaaattttattcccttactttgtgtttaagaaagatctaatacccacagagaataccaaggctattaaagtctaagcaggtgacctacctcaaagcttaagttcctgttatcataggcctcgtttctcaaatttgtataaatgtacatgtgatggaaaaccagaagatgcttggtaaacatggtcagttttactcaatgatgaatggtttcagtcatttttttgtattaaaggaaacataaatatactatggagtaaaatgcaaacactacacggttttttaagataaattctgacacttgaaaggcatgttctgcatttagggctattgccagccccagaaccatgggatgaagttttactccttctgctggtagaggaagtttagtggaaggtttgagaacctgagccctgagtgtaggaaatgcatagaagtagcaaagtctgaacaacactgagaactacacagtaaaattagcacataggatttattatcctttgttgaatgagtatatgagtatatgatgatgctgctgatgatgatgacaatgaccacgatgatttaaaaaaaaaaaaaa

SEQ ID NO: 7476 - DNA, 2067 bp, Homo sapiens
gtgccattccacaggtagaaacactcacatgtgcttagaaacgctctgctttcctccttgattacccaaattctcattctgagcttctatttctccagatctagactcgggaatttaatatctgaagactcatatagggctgatctaccctaacttgcaaaatttcatgcatatttcatacttacactcttcatatgtcagtggtgctattgtttggttactttctctatctgtgtggtttcatcaccagtctattcacccctatataaaacttaagatttgagataagaactggaatttaaatgacttaggaaagaatgtatcttggttagaatataagagtctgaaaagtctgctgtgggtgctaagctggctactaagggaaatgctaacagaaatttgtcatatgtcttcagagtattgtctggcaactgattaaaacagaggaagagtgaaacaacatctgcttctctccacctcacactgataaaatggttgaataaatgcactttgcttatggccatgaagaacacaggggacttcatctttccaagtgttttcatacaatgctcaaggctaattcttttggtcctgatgttttatttcttagcacctgctggatcaagaagcacccacaaggatcatttctcaaaaatgtctgaaactatatctattctgactatgaaccttgatcacaattcaaacccttaggctactgttctgattgttttcagcattacccactaacttttgctttctatttccatattctgtattctgggggcactttttatacagagtctgaaagtgctattctttttttttttttttttgagacggagtctctctctgttgccaggctgcagtgcaatggcacgatttcggctcactgcaacctctgcctccggttcaagcaactctcctgactcagcctcccgagtagctgggactacaggcgtgcaccaccacacccggctaatttttgtttttagtacaggcggggtttcaccatgttggccaggatggtcttgatctcttgacctcctgatgcatccgcctcaggctcccaaagtgctgggattacaggtgtgagccactgtgcccagcccgaaagtgctattcttattatgacctacagtggtaatatttcacttaaaaatcagtgctatgcccattgctggttaacaagctttggagaagtattaggttgaaccatagaaactgccacaactgttcaaatattgaaaattttatatgcttcagctcatagtctccttcacacacattctctttcatatttttttataattttattttttgtatgacttaatgggcacatgctgatttcctgtatgtcgtcaacactcctgagccatgagggtaagatcagagctgcaggagtccagacacgtactttgtcgcctgccaagtgaaagacaatgaatggagttatctaaatttttcagtgaactttttggtgtctatgttgtctaattttattcccttactttgtgtttaagaaagatctaatacccacagagaataccaaggctattaaagtctaagcaggtgacctacctcaaagcttaagttcctgttatcataggcctcgtttctcaaatttgtataaatgtacatgtgatggaaaaccagaagatgcttggtaaacatggtcagttttactcaatgatgaatggtttcagtcatttttttgtattaaaggaaacataaatatactatggagtaaaatgcaaacactacacggttttttaagataaattctgacacttgaaaggcatgttctgcatttagggctattgccagccccagaaccatgggatgaagttttactccttctgctggtagaggaagtttagtggaaggtttgagaacctgagccctgagtgtaggaaatgcatagaagtagcaaagtctgaacaacactgagaactacacagtaaaattagcacataggatttattatcctttgttgaatgagtatatgagtatatgatgatgctgctgatgatgatgacaatgaccacgatgatttaaaaaaaaaaaaaa

SEQ ID NO: 7477 - DNA, 7025 bp, Homo sapiens
ggtacagcctgtacacccgcacctggctcgggtacctcttctaccgacagcagctgcgcagggctcggaatcgctaccctaaaggccactcgaaaacccagccccgcctcttcaatggtgagctctgactgccccggccagcatcccccattctgtgcccccaccctccccgcctgctccccttcacataccccagcccctgggctccctgcctgttaccccgcccacagcccatctctgtccccaggagtgaaggtgcttcccatccctgtcctctcggacaactacagctacctcatcatcgacacccaggcccagctggctgtggctgtggacccttcagaccctcgggctgtgcaggtgaggggagggcagggagcagggggtgcctggagtcaccttggggactggcagtttcgccttgctagagagggctgacccttgtccgtctgcccgtgggatgtgtcccatatgctccatgttcacacgtgcacatgcgcacacatagcctggggaaggggggtacagggcatggctgggcagaaggggagagcaggagtgggggatgcagagccagagggctgggggtgttggcccaggactctgggtctagtgagtttccaggctggctttcactcccattggcccccttcagaccccctttctttctgtcacctctgtctgtcagtatctgggtctctctgtctttccctcccattccttatctctctgtgtctgcctctctctatgtacaagtgtccctctgcctccatgtgccccgtgcttcacattcctggatctctcccctccagctccatccctttcctctgcttcatctctccatgctctcctctcctctccaccagcgcccacactcctggctcttgctgcttcaagtgcctcttgcatcctgctccccagtctccaaacctcctctctctcgcaggcttccattgaaaaggaaggggtcaccttggtcgccattctgtgtactcacaagcactggtaaggggctcccgtcttccctggcccacccttgtcccagctgggcttgccaggactgggcccattgaggacggccggggccagagatcaagaagtcagtacgggccggcacccgccttcctcgtgaagtcacctggacaccagcagggagggaggagaggggacagtctcccaccactccattgatcaagcttctgaagccccagagggcagggcagtcatttctctttcatttcatgggcatgtattagatacctactgcacactgggcatggacaaaagttatgactcttccatcaaggaaattctaagaccaataggggaggtagccctgtatcaaagtatataacagcggaggcaagagggttgggagttcaagcccaacctgggcaacatagtgagaccttgtcttcaaaaaagaagtatgtgatatttaggtaacagttggcacagggaacagggatgggaggcccaggcacggtgtgatcagatccacttggagaattgaaagatgatgacctgagctgagggttcaggaagctcggctggcattggccagcttgagttgttgggggcgatgttctgggcaagggaacagcttgaacaaaggcctagaggtgtggacaacttggcttagtccagaagccacagccccagcacttaaaggcctggagatgctgtggtaaagaagggggcttaggtacagttgcccctcgaagccccctgcctgtctctgctgtcctgcagggaccacagtggagggaaccgtgacctcagccggcggcaccgggactgtcgggtgtacgggagccctcaggacggcatcccctacctcacccagtaagtccctgacctaggcaagggatggcccttccatgggccctttcccccacccccagccttcagtgaagtgtttcaggggtatcagcaggtggatctttgccagtgcccttcctggcccaatcccagcctatctgaagactggcactgcccatcccccaactgatccagccatagtccccaaaagaggaaagggggagggttcggacctgagacccgaggcactggggtgacttcttttgtatggaagcccactctcttgtgaatcacccagccccttgggcctgggatggggacagggatcagcatggcacagatccaataccttctgtcccctgctcccttgttccccagtcccctgtgtcatcaagatgtggtcagcgtgggacggcttcagatccgggccctggctacacctggccacacacaaggccatctggtctacctactggatggggagccctacaagggtccctcctgcctcttctcaggggacctgctcttcctctctggctgtggtgagtttccccgaaagagagaggagctgggagaggagggagagacagaagccagggcagccacagtcccatggagagcactgaagccttagttttagcacagatgttgccgtggcagttacttccatctgtgttactcagattggttttaatccttgagacttcccttggggcaccttgggaggctgaggcaggaggatcacttgaggctaggagttggagaccagactgggcaaaatagcaagactgtctctacaaaaaaattttaaaataggccaggcgtggtggctcatgcctgtaatcccagcactttgggaggctgaggtgggaggatcacctgaggtcaggagttcaagaccagcctggtcaacatggtgaaaccccgtctctactaaaaatacagaaattagccgggcatggtggtgcatgcctgtaatcccagctactagggaggctgagacaggagaactgcttgaacccgagaggtagaggttgcagcgagctgagatcgcgccactgcactccaacctggaagacagagtgagactctgtcacaaaacagaaaaaaaaatttaaataatataaataatataggccaggagcagtgactcaggcctgtaatcccagaactctgggaggccaaagcaagtggattgcttgagcccaggagttcaagaccagcttgggcaacatggtgaaaccccgtctctacaaaaaatacaaaaattagccagtgtggtggtgagcccaggaattcaaggttgcagtgagctatgattgtgccactgcactgcagcctgggcaacaatgagactctgtctcaaaaataaaaaagacttctgccagctgcgggacagaatgggagaatgtctgtagctgagtaaagccctgcagggaattagtttcccctgggtggagactggttctctgatacagtgactggcaggactaggttatgaaaagttaagaacagctaggtgagtgggtgggtgaggatcacaagtcccaggctgcatgaaatcccaaagggcagcctaggcgaagaagtgttccgtgggaaagagcagccctgcgtctaccaagcctggggcctgcagcccgaagattccacagcccctcccttcaggtgtcactgtgtgcaacggaggcctcggatgggcttggtcagggggtgaccagttgggcccagttcccagtgaggagggaatagatgcctggggtgggtctggaaagtgcacagtcagggctgacggccagccagagcattacaagctggttcccacctgtctgggtgtgccttatgccatattgtgttatcctggcaccttgtgacataccctccaacccccacccagggcggacctttgagggcaatgcagagaccatgctgagctcactggacactgtgctggggctaggggatgacacccttctgtggcctggtgagacacccccttactactccccatcctccagccccacgctcagcctgggacaagggccttcccaccccctcactcccctagaaagcaggccagcccagttcctggcccagaagcgacacagctccacctctaggggtagggacagagttctggcctcccttcttcctggagtgctggctccgtaccacctctgcttctcacactaccttcccctgccagtcagccttcagcctcttgggagccttgcaggccccagggcattccagagagatgtctaattgttcatagccttagcccagaacagaaaatagcctttgcttatctggggagaagtcagtaaatccactctgcatgtaaccattgccttgtggtgcataaaaacattcacagatatctgttaatcctcagaacatatattcattcattcattcattcatcaagtactttatgtgcacctaacacataccaggctctgttccaggcaccaggaacacagcaggtacatctgtgtctggtggcatcattgttctctccacttgccaaatgagaaaattgtgcctcagagaggggccatgactagaccgaggtcacatgctaggcttggtggagtcagggctagatgcaggcctgccagctccaggtctagtggttttttcccctggaactattgccaccttttcacccatggctgacttgtgcccacagttagagaagcagctcctggcagttggggttttcctggaagtgctgacctcatccctagttgtcaggtgcccatcagcctggacctggggcagggaagactgttctgactgtaccaccaatctctctctgctctgtgtctcaccctcatggctgtcggtaggtcatgagtatgcagaggagaacctgggctttgcaggtgtggtggagcccgagaacctggcccgggagaggaagatgcagtgggtgcagcggcagcggctggagcgcaagggcacggtgagggactcggggtccaggaggagctgtgtgggcaggcactcagccccaacgggaacccatccatgctgaccccaggcctgcgagcacctccccaaaactctgacctctttggcccatgggccctcaagtcagaactcctgaactccaggatggggcaggggtcgggtcaggcttctctgtcttgggtccatttcccagcttctctccaccaaacctggttcctctcacccacagtgcccatctaccctgggagaggagcgctcctacaacccgttcctgagaacccactgcctggcgctacaggaggctctggggccggggccgggccccactggggatgatgactactcccgggcccagctcctggaagagctccgccggctgaaggatatgcacaagagcaagtgatgcccccagcgcccccagcccagcccactccccgcatggggaggccgccaccaccaacacctcatcatccttctcatcgctaacaccaccacctccatcggcacccaagcgggcatcatccccccacactgctcaggggaggggagggatcaggcgatgagactgtgaggccaaaagaagggggcctgttggaggctgggaaccccgcagcgcgaggctgcctcatcaacggcaagaggaaaggaggggtctcgggacatctccagaccctaccaactgggagggtcccctcctccttccctactcctgggacggcagcaaggacatgggggctgctgttagcttctccgtcaggaggcctcatctcactgtagccctggaacccagggtccatcttgcccttcccccatccatggttgggaaagaagctcagcccctcacagtggcctcaagtgtgatgccttacaaaagcaccactcagatgggcagctggactctggtgtcctgagactctgccctcttcccacagcctccctgccccacccatccctgcaaagccatttttcagacagagccattcctaagaacactgaagggctggaatgctggctggccactctctgcctcagtggcctccctacagcctggaagaaggagggtcctgattgccaaggaaacctcctcattgggctaaggagacactggagtctggagtgtggagccccacagtcttgcaggtcacatgctctccttgcacatctggcctggttgtacccactggcctctgcctctgccctgggccaaaagggcccctccttgccaggggagagacagccacggtcctctttggccgatgctgtattctcattttggcccttgttcttaggcccgtctgcccgccttcctccatctaacctttcctgttttatccgcagcccttttcttctttgagttagtaaagatttattctgtaacctgacactcatctggccctttgcagtttgccagccatattcccatgtgatttcccactggatccaggcccccatccggctggcaggagggggctctgacgtgcaggttggaaatcagaagtctgtgagagcgcgggagtgcatggcagctctgggtcccagacctggcccgacccctctgcttcacctccagctctgctgctcctctactcttgggtcgagatccctttggagccacagcgaggaaccctgtggtcctcaggcaggtgtaccttgagtcagccaggagccctcttttcctgtgtcaaagcctgccctcgggctctgctcacctctggtgaccctccaagatgcccctgccctcagtttcccctcatgatctggcctctgcccccttctctagccacagcctctagtacactttagcaataccaccagactagttagagttccccactcaccaagcaagacatgcagtttcatgcctctgtgccttcgctcatgctgtttcttccgactggaatgccttcccctgctcctcctgccttgtctgcctggcaagttcatctctcacgatcccctcaaaggccccctcctccaggaaggcaacccctgtgcccctcccctccaggctacctctgcactttgtcaatgcttctcttgtggcacttatcacactgtattttacttgtttacatgtttgtctccccttctagactgtgaatccttaagggcatggactgtatcttatgcatctctgtatttctgcgcctagcacggtgcctagcacacagtaggcgctcaataaatgttgaatgaatgaatgatttaatcaagacttgatcacccaa

SEQ ID NO: 7478 - DNA, 3304 bp, Homo sapiens
gggcggacctttgagggcaatgcagagaccatgctgagctcactggacactgtgctggggctaggggatgacacccttctgtggcctggtgagacacccccttactactccccatcctccagccccacgctcagcctgggacaagggccttcccaccccctcactcccctagaaagcaggccagcccagttcctggcccagaagcgacacagctccacctctaggggtagggacagagttctggcctcccttcttcctggagtgctggctccgtaccacctctgcttctcacactaccttcccctgccagtcagccttcagcctcttgggagccttgcaggccccagggcattccagagagatgtctaattgttcatagccttagcccagaacagaaaatagcctttgcttatctggggagaagtcagtaaatccactctgcatgtaaccattgccttgtggtgcataaaaacattcacagatatctgttaatcctcagaacatatattcattcattcattcattcatcaagtactttatgtgcacctaacacataccaggctctgttccaggcaccaggaacacagcaggtacatctgtgtctggtggcatcattgttctctccacttgccaaatgagaaaattgtgcctcagagaggggccatgactagaccgaggtcacatgctaggcttggtggagtcagggctagatgcaggcctgccagctccaggtctagtggttttttcccctggaactattgccaccttttcacccatggctgacttgtgcccacagttagagaagcagctcctggcagttggggttttcctggaagtgctgacctcatccctagttgtcaggtgcccatcagcctggacctggggcagggaagactgttctgactgtaccaccaatctctctctgctctgtgtctcaccctcatggctgtcggtaggtcatgagtatgcagaggagaacctgggctttgcaggtgtggtggagcccgagaacctggcccgggagaggaagatgcagtgggtgcagcggcagcggctggagcgcaagggcacggtgagggactcggggtccaggaggagctgtgtgggcaggcactcagccccaacgggaacccatccatgctgaccccaggcctgcgagcacctccccaaaactctgacctctttgcccatgggccctcaagtcagaactcctgaactccaggatggggcaggggtcgggtcaggcttctctgtcttgggtccatttcccagcttctctccaccaaacctggttcctctcacccacagtgcccatctaccctgggagaggagcgctcctacaacccgttcctgagaacccactgcctggcgctacaggaggctctggggccggccgggcccactggggatgatgactactcccgggcccagctcctggaagacgtccgccggctgaaggatatgcacaagagcaagtgatgcccccagcgcccccagcccagcccactccccgcatggggaggccgccaccaccaacacctcatcatccttctcatcgctaacaccaccacctccatcggcacccaagcgggcatcatccccccacactgctcaggggaggggagggatcaggcgatgagactgtgaggccaaaagaagggggcctgttggaggctgggaaccccgcagcgcgaggctgcctcatcaacggcaagaggaaaggaggggtctcgggacatctccagaccctaccaactgggagggtcccctcctccttccctactcctgggacggcagcaaggacatgggggctgctgttagcttctccgtcaggaggcctcatctcactgtagccctggaacccagggtccatcttgcccttcccccatccatggttgggaaagaagctcagcccctcacagtggcctcaagtgtgatgccttacaaaagcaccactcagatgggcagctggactctggtgtcctgagactctgccctcttcccacagcctccctgccccacccatccctgcaaagccatttttcagacagagccattcctaagaacactgaagggctggaatgctggctggccactctctgcctcagtggcctccctacagcctggaagaaggagggtcctgattgccaaggaaacctcctcattgggctaaggagacactggagtctggagtgtggagccccacagtcttgcaggtcacatgctctccttgcacatctggcctggttgtacccactggcctctgcctctgccctgggccaaaagggcccctccttgccaggggagagacagccacggtcctctttggccgatgctgtattctcattttggcccttgttcttaggcccgtctgcccgccttcctccatctaacctttcctgttttatccgcagcccttttcttctttgagttagtaaagatttattctgtaacctgacactcatctggccctttgcagtttgccagccatattcccatgtgatttcccactggatccaggcccccatccggctggcaggagggggctctgacgtgcaggttggaaatcagaagtctgtgagagcgcgggagtgcatggcagctctgggtcccagacctggcccgacccctctgcttcacctccagctctgctgctcctctactcttgggtcgagatccctttggagccacagcgaggaaccctgtggtcctcaggcaggtgtaccttgagtcagccaggagccctcttttcctgtgtcaaagcctgccctcgggctctgctcacctctggtgaccctccaagatgcccctgccctcagtttcccctcatgatctggcctctgcccccttctctagccacagcctctagtacactttagcaataccaccagactagttagagttccccactcaccaagcaagacatgcagtttcatgcctctgtgccttcgctcatgctgtttcttccgactggaatgccttcccctgctcctcctgccttgtctgcctggcaagttcatctctcacgatcccctcaaaggccccctcctccaggaaggcaacccctgtgcccctcccctccaggctacctctgcactttgtcaatgcttctcttgtggcacttatcacactgtattttacttgtttacatgtttgtctccccttctagactgtgaatccttaagggcatggactgtatcttatgcatctctgtatttctgcgcctagcacggtgcctagcacacagtaggcgctcaataaatgttgaatgaatgaatgatttaatcaagacttgatcacccaa

SEQ ID NO: 7479 - DNA, 160 bp, Homo sapiens
ccgggcatggtggtgtgagcctgtaatcccagctactcgggaggctgaggcaggagaatcacttgaacctgggaggtggaggttgcagtgagccgagattgcaccactgcactccagtctgggcaacagagcgagactctgtctcaaaaaaaaaaaaaaa

SEQ ID NO: 7480 - DNA, 136 bp, Homo sapiens
taatcccagctactcaggaggctgaggcaggagaatcacgtgaacccaggaggcggaggttgcagtgagccgagatcgcaccactgcactccagcctgggcgacagaatgagactctgtctcaaaaaaaaaaaaaa

SEQ ID NO: 7481 - DNA, 136 bp, Homo sapiens; identical to SEQ ID NO: 7480

SEQ ID NO: 7482 - DNA, 948 bp, Homo sapiens
tgaagtttgatgtcatacatatcatttcattacattactttttattgccaaataattcattatatggatatgtcacattttatttattcataagttgatggaaatttggattgtcccacttcttggttatgaatgttgctacactaaacatttgtggacacatttttgtgtggacatatgtttttatttttctggattatgtactcaggaatggaattgctgccttaatatggcaactctgtttagctttttgaggaactgccaaactgtttaccaaagtggttgtaccattttctgttttgttcagcagtatataaagggtccaatttcttcgcattttggctatcacttgttattacatgtctttctgatgatagtcattgtagtgagtgtgaagtatttcattatggctttgatttttctcagatgactaatgatattgagcatcttttcatatagtttttgatcatttacatatcttctttggagaaatgtctattcaaatcctttgcccatgttttaattgggttatttatcttttaattattgagttgtaagggttctttagatattctagatataattttcttgccagatataatttgcaaatattttctcccattcagagtgttgttttttcacttcattgatcttgtctttgaagcagaaaagtttttaattttgatgaagaagtccaagttatctattttttctttcttttttttatttgtttgtttttttgtgacacagtcttgctctgtcgctgaggctggagtgcagtggcgtgatcttggcttttgcaacctccacctcctgggttaaagcaattcccctgcctcagcctcccaagtagctgggactgcaggtgtgtgccactacacctcgctaatttttgtatttcttttttttttagtagagatagggttttgccatgttgtccaggctggt

SEQ ID NO: 7483 - DNA, 324 bp, Homo sapiens
aaagtactgggattacaggcgtgagccactgtgcccagcccgttgtgtttttggtgtcgtatttaagaaatcattaccaggacgaatatttagctccaagttttattttactttattatttatttatttgtttattttttgaggtggagtcttgctccgactcacactcactggagtgcagtggcatgatctttgctcactgcaacctccacctgcctggttcaagcaattcttctgcctcagcctcccaggtagctggaactacaggtgcatgccaccacacccagccaatttttgtatttctagtattgatggggtttcacc

SEQ ID NO: 7484 - DNA, 21575 bp, Homo sapiens
gttttaagttcttaatggaactttctatgattatagtttgatatatatatataatagaaaattgactaaattcagtcagattttgggttcagttctgcgacctgtgtgatactttgtaatttatcttaatcctcttctgttttccaagattactttctctttctgagtcttctccctgttttccaagattattagtattataagactattattttgtttttgatatgtagcaactaaagatatgagtacttttcagaatttaggggactatggtaatttgagataattatctctgttttctttcttagcctgtggacatctctacagcaatgagtgaacgggcacttgctcagaaaagactcagtgagaatgcatttgatcttgaagccatgagcatgttaaatagagctcaggaaagggtatgtagcagttttttaaaaaaaattattatttaccatcagccaactcacaccaatgtaccagttttaatgtctaaataagaattttgctaactagatggttgagttgtaacatcctttaccttattttcaatgtcttattttaaatgaaagtgattcgaggcctgatcatttattcaataaatgtttattgtttactatgtggcaggaactgtttcttgagagaacaaaatagaaaaatttccctgtcctcacagagtttacaatctggtgtataaaaacaactaagtgcctacaaccctatgaaatgtgtaggtattaatagttgccatatttcagccgagaaaactgaagtaaagggtggttaaggccaggcatggtcgctgatgcctgtaatcccagcactttgggaggccgaggtgggggcaaggagtcaggagttcaagaccagcctggccaaggtgatgaaaccccatctctactaaaaatacaaaaattagctgggtttggtgttgcatgcctgtaatgccagctactcaggaggctgaggcaggagaaatgcttgaacctgggaggcagaggttgcagtgagccaggatcgcgccactgtactccagcctgggcaacagagtgagactgtctaaaaaaaacaaaagagtgattaagtgatatccatagtcacacaactaattagtgggggaactgggattcaaacccaagcaatctgaatctggagtctgtgcttttaacaatggacagcctctccatttcatttctactgttttatggtaaatcagtaagtacatgttcagacaggaaatacattgctgacagtgcaaggtgtttagtaaatctaatttgtgtgaatgacagctgatctttatcacaacaaatgttggtgactgaaaaaaagtatacaagcttctttaaaaagttgttttacggccgggtgcagtggctcacgcctgttatcccagcactttgaaaggccgaggcgggcggatcagttgaggtcaggagttcaagaccagcctgactaacatggagaaaccctgtctcgactaaaaatacaaaattagccgggcgcggtggcgcatgtttgtaatcaatcccagctactctggaggctgaggcaggagaatcgcttgaactcgggaggaggaggttgcagtgagcagacatcgcaccattgcactccagcctgggcaacaagagagaaactccatctcaaaaaaaaatagtcgtttatgtattcaagtggacagtttcctacatttaaactctttaaacctgtgtcatgaatttagtctgtataaatgtctcaaaggaagtaattaagaatccaggctgtcatgacatgtattacaatacatttgtatgagataggaagggagggtggggacccattgtcatatgagctcttttttgcatttttagtgtatctgtgtgatagtttgaagaatattaacagctgtattttttagtagctgtgcttttagatacatttcaaaatcttattaatgggattcactaaatgttgtcaaactgcttctttagaaagtttaggcaaacatttaatgttaaatatgttttaaaagttaaatatttaagtctgcttttcagccatttttagtgaattattaccagtgatgttttaatcaggtaattttacttagttaactgagactacttcttttcttcagattgatgcctgggctcagctgaactctattcctggccagttcacaggaagtacaggagtacaggttttgacacaagaacagttggccaatactggtgcccaagcctggattaaaaaggtacacagtatatgcacatatgaaagtgtcgaacaaaaagtttaaattttttggaaactgtttattaaaactgcatgaaaagaccagtgactctaaccaaagttccaagtaaatttgctatgtgtatatgctccagggcggacactgaagacggactggattcatgagaaaatggcaaatgtataaatgtggctcaagagccactaacttataaggttattttaaaaattgttactgctgcttttgaaggggtgatttaactttattttgaacgctaatagtgtatcaggtgctgttcagaatattccacagttcctgctggactactaacctaatcatttcaaagcagtggttctcaaatttttcttcatcatgggatactttattacaggtttatttttagtggatcactgcccccaagagccctctaccaccttaattttccattcctctattcctttgccctcgcaccccacccgcttcattagtgcctgtgccttcttgtaagatctcttggcccccgttcctcactcctcttgtgacctgtagccccaggaccttttggttgtcagctgctggttacagcaagtggttgggaggccctagtattagctctgcatgtggtgatcttgccatgggactggaagcctgagggaggatggctggagtggggtgggctgtggtgaaggggatgggatggagattaatctgtggaccaccatttaggccctagtggcctctggtgatccacaggctcaatttgagaaccactaatttcatgacaaaacagatatgtaagacctaaaatcaagggagagaatggacgcctcgtgctacgaagatgtaggtgcatctggtttcagattctgcagtgagacctgtgaactccacctacggctgcctcatcattgggggagtcttaggtggctaagaagggcattctgaagaaacgcgttgtggtgaagggacaaagcttggttggatgggtgatgggaaatttgttacaggagtactggcagcatagcagtgctgaaactgggaggccgcgtggtctaatggattgggaaggtttctttatcctgttgtactcctgactccttgtgtaatcatgggcaagtaactctttggaatttcaaagtctctgaggtgtctagtggtaatcagtaacgtgatggttacctatagagagttgctatgagtgccagtgaatgagctgaatttctgaaaaatgagacattggttgctttgtgtattttaatcttgtaacatttatttcaattttgatagctttatctttgttgatcttactaacaaattaatatgaaacatcatgtatactcattatgcctgcctttttttgggaagtagttgcactgatgtgtatagtgagtacacagttagattcattaagaaattacaatttctgcagtttgctgagggttggtgttagaataaagggtgaaaatgtatatagcaaaatattttaaagattggattaatcttggacttctatattatagttactatgaaagtgatttatataatatttgaaaaaatgtctttcatctttggaagaactataaatgtacatctatttctttagttttaattctttaatactatttagtcttgaagctaagtactcagccagtatttcaggaagttagaaataaagcttatgggtgttaaaataggcacataatacagagtcatgtacactgctaggtagaaacttctgaatgtgcttccattacaaaattttggtctttatctaatgatgtgctgatccataatgtttgtatacttataaatgtgttaataacttaaataacttttaaaaagtgaatcttttactgactcaattggttttcccctaaaataatttcttctggtatttgcagtcttgtaggcagttaacagactttaataactttaaaatgtttagtagcaccttgaaaaaaggcttcaactttatattttatgtaagatatactttgggaagcaaattattttgataaattatgagataaagatatgttcagaccaaattttaaattatagataaaagtagcacttaaaggaaaagattcatttgtatagaattactgaagaatatttgatgctagtatcaactaaaaaagaaacttttgaaaattaaaaatgggccacaacatgtagaagtcattaggcagctgaaaatttaggatgtatgatccatgttaaatatcacaaatattgtctactcattaaatgtttagttgtgtttagaaaacctgtcaaacgatcattttggctcttctttagtatagtccagcatctgccttatgtgttaaaaaacacatggaataccaacatcctccgtgttctttttagtttgttgcagtgtatttttagattacaaaaaaagcaaagttttatcagtagtctcattaatcagtaaaacatttaaagtagttcgtttaaaagaaattttatttctagaatggaatgatttggatgtgacctgataaatacagtttgttattgtggtctcattaaattaatcagctttttcacactggggtaaagaaacagatgatgatactagggaatggaaacaaaattggaaacctgggttatttggggatttatattgtactctgcacagttgcccttttttttaggcgtgttccctggaaaagagggacggatgaacctggaagtaagtaaaagacattctaggtgtgtagcatcaaggcagttaatatccaagcatcagctttctctttatacatctacactgcatggcctgcaccaaataaggaactgaaccaggggtatgtttttacctccacagctgcctccttccatcagagcaccttgatgaacttaatgtctagtcacacgtcattggcatgttttctccccagcatttaattacaaagctgggaaacaaaagatgatagatacagttttactactgcatacaaacatttcttttttacattcagtattaacttatcaatataggagatgtgcatactatttcctgagctactgaagtttttttactctctctgttgataagttaatgacttttgctatattatatatttatatatatatatatatatatatttggtaagagaacataaaaacctaaaatttagtaacaaggggaaaataaagcatgatttggagatatgtttcaaatttttaaaaaatgaccataaagatcaacagtacaacttaatactgtttgctatatgtacatggatgccctttaataagaggcattgaatatttcttaacctgtaaaaataactgttgaccatgctaatgtatatatacttgtgcatcttaggacattaagtggtttgctgctttgatggaaattatggttcagtgggttggatacaagagagatgactgttcacagaataacctgtgaactttcacccctctgtatggaaacttgtttcagggccaaatccttgtagctgtcttcttgccccggtcagtgccagccgtactattcacaacactgctgctaccgaggcctaggtatgtaaacatttaaggagttttttaaaagtcttttaacatcaagctaggttttaaaagaattcaaattcattttggcatacttacaggatattttatgtgattgttttctatttgttactgtgtaaatttcaagagtttttttttttttttctgctttagggattttctaagtaaaatatttatacttgctttatagtagaatggggaagaaaactttggatgacaacagtatgcttcttcagtgtctaaactatttctaagtgatttctgggctttattcataaactaggtacacctgggacaattaatatcattgattgttttaacattgccttctttttattttgcaagctaagaagagataccagtgaacctaaatagtggacgaaaacaggagtgttctaattttttttttttgaggggggcacgagggctactgtttcaaaactgccatttacttgtcttatttgacttccaaaatactattacgttaatgtgcaaataatcagaacatacacactacagtatgtataaagtatagaggaatttacatttaattgctataacagatctagaagtaaagtaagattcctctttttagaaagtaaacaatgaatctgtcaccaagttctaactgtaaaatggggacattttacctttctttctttggataggatcagttcttaagagcagccccggtaactggaggaatgggagccgttttgatgagaaaaatgggctggagagaaggagaaggattaggaaaaaacaaagaaggcaataaggaacccatcctagttgattttaagacagaccgaaaaggtaacaagttcttttttggaatgtttattaacgtctcctttaacattacctttaatatatccttttgaacccagtgatactgaactgaaggcacttcttgtatatatacaggtatttgtcagaaaaaacattaaccccttttggggttcacagagcagcttatttttatataactatggatagagacaccagtttgaacttttaaaaggcaccttttgttatgctagttgctaaatatggaaatgtgtatatatctaattttattattacacctccaaattcaactggatttcatgtttagaaaacaggatttccattttattttctcttgacaaggaaccatccttttttctagagtttagtttattttttgttagatattttagcacatcttcattatttcctattacaatactggtttagtctagatttcataaaccctgtttgcttttttcttccaagctcagtagttaagttgggttagagtatagtagaccagctgctgacaataatgttacttcttcctgttgccttgtgttaaggcatcttggaactgttagcattgactgtattttccttttaccttcagatacctgggcagggcagcactgtgtcttctatgtagcttgtatgtagttgctaagtatttaatcattcccacagatgatagctaattggcgtcttttaaataacttcttcccttggaataatgtaagtggaatcatgagaggcttgccagctcagtatgatttttgtatagcttgtttaaacctcatttataaaagctgacaaatgtaaaactgggatttattttcatctttgtaatcaaacagtaagttgaagctaacttcaatagttaaactgtcttaatgaatttggaaatgaactagctctgcaccaaatactttgatgttaagtattgtacaatttcaggaagcattgtccttggaattgtgggacatggcctgactgtaagctctcagagaaccacagatttcccaggataggtttagaaaagcttatattagcatggaattatttagcaaaggttgaaaaatttcctgtaacatacaggatgagcatcccacatctggaaacctgaaatgctttaaaacagaaaactttttgaatactgatatgatgctcaaaggaaatactcattggtgcattttggatttcagcctcttcagatttgggatgcttgaccgctaaatacaatgcaaatatttgaaaacctggaatcaaccgacacacttctggtcccaagcattttggataaggaatactcaacctgtatatgaattgggaaagcagtgtttgggtttagcaatgtagctaatcccctttgtaataagtctatggagagagaggttatgtagaaaggttatgttcatattttgagaacatctcccatttgttaggaagggagaggagagtttgctaggaaaaaagggacctattttatttggagacaaccgttttcacctttttggtggcttaaaatcctaaccttttttggaagagtcttaactgaagcttatttttttaagagacagtaaatctgcagaaatcacttggcaataagctattttttttctttttttgagatggagttttgctcgttgcccaggctgtcagtggcacgatctttactcactgcaaccttcgcttccaggttcaagcgattctcctgccccagcctcccgagtagctgggattacaggcgcgcaccaccacgcccggctaatttttgtttctttagtagagacggggtttcaccatgttggccaggctggtctcagactcttgacctcaggagatccacccgcctcggcctcccaaagtgctgggattacaggcatgagccactgtgcctggccatacttaactttttgttttctgtttacatttggtatttattacaatttctcataccaagatctatgaatattaaatataaatttatatgctgaaaaacagtaaaagagaagaaagagaagattgatagagaaatcgagtgtactaggaatctgctgattttatttgaaggcatacattttgaggttcagactcctacagagggatctttgttttaaagtggtgctttgaaatttatttagtgaacaatttttttttaaaggtcttgttgcagtaggagaaagagcacaaaagaggtctgggaacttctctgctgcaatgaaagatctgtcaggtgagagcacgtttttgaatttcctcttaccctaatcccaccttgaattcattatttgttgcagaagttggtggaaataatttaaaactgggtatttctcccccctgcaggcaaacatcctgtgtctgctttgatggagatctgtaataaaagaaggtggcaaccacctgaatttctattggtccatgatagtggccctgatcatcgcaaacattttctctttagggtaaatatgaatttctgcattaattatatatatttattaatgtgatgacttagagggtgaggggtaaacatgatcacaggattaagattctgttcatgggtggggggtttgtatttgtagttaagtggtggggtttttaaacactgaagggtgctttaatacgacttgtcaatgtcctattttttaaaaaattggaaaagggtaaaatatagtatacaattgttattttctagttgaatgtggggaattaatttaatacttttgtcagtctttttctcaatttggagacctgctctaatttgcagtccctttcccaaatgatttggttcttcgggttgagattataatttgacttacatagtatgggttttatatttttgtaaattatttttctagcatttagtgaaaaaatacaaagctaatagatattaaagtttgatgctgttcttattgtatgtttttcttgaataggtattgagaaatggagcccttaccagacccaattgtatgtttttcttgaataggtattgataaatggaagcgcttaccagcccagctttgccagccctaataagaagcatgctaaagccacagcagctactgtggttcttcaagcaatgggccttgtaccaaaggacctcatggctaatgccacttgcttcaggagtgcctcacgtagatagattgaggttttataataatcatttcagaattttactctgcatcacaatgtatttcctctttaatgttgtaaatatttggcaatttaagacattgtgtaaaaagcaatctgtaaaaacatctccaggctttgatttttgtaccatggaaattgtatttaaccatacagggttttggtatgtttatattgtttaccttagtgatgtatttgtttaagtggctaacatccaaacgactgtttgaaggcatcagagtaatcttcagtgtggaatgttaaataacgcttttatactgtattttgtactatgatgtaactccccttccttatggctaggctactgtaacacttgcctgtaatcagtgaagggctgtgcaccttgtactatttcacaatgggttctgctggacagataatgggccagtgttattgaggtgatcaagatctgttccacagggctaatgccaccatctcccctcaaaattttgtagaggttctaaaaagaaagtggtatgttgtgtgatgatcagcactaagtcctgcattcctgttaaagccacttgggtcataagaagggagtaaaaaatgaagtctgactagaattctattgcagaggccagtacatttagtatggcattgagttgtgatatagttttactttgatgtgcattttgaatttcagctacacctagatagacgtaaaatgataattaaaatgctgtaaccaacttatctaataaaattggcaaccagccactattttgttgactatgagaaagttaaaagtttatgttaatttttagggtctgatagaatatttcatgtgtattacagtggtattcatatgctatgtctctaaactttattttcaaaagcttaaggcccaaatacaaacttctctggaataaacgtggtgttttattttctgggttataaagtgaacaaatacttagatactattatttctttacccaatgcttttgatttttaagcacttttattttaaaaatgtgaattatacagtccccccctacacacacacacacacacacacacacacacacacacacacacacacacacacacacacacacacacacacacacacacacacacacacacacacacacccctataagcacattaaatactactttgccgtgacagctcagtgtacttcacaattcttaacactattctatgtggaatacaaaatgcctttttatctgaattaacatgcatttaaaaagttttagtatatgtgaaaataaaggaattataaatcagtaggaaagatattaaggtagaagcatcaccaatcaactagctcagtagatgttgtctgtatttattttctacctttatgaaacaagaacctgctaacaggtaaatcgtaaagtaacatatttttgccctgatgccattagtcacaatgccatggggtaactgctatgtgatttcccatttgcaaggaagcatattaattcagtttctgctcaatatacaattaggttgtagggatatagatatctcatttgagttatctgagtttttcatctttatatctaaaaatctaatctgaaaatagtaaaacacatttaaaaccttagatgctactgtagtaaaagttatgtttataaacatttcagtatattccttcaacttcaagaatcttgaatttccttgctagaaggcttttttcctcaaagattccttttaggcttactttggtgttcaggatctccaattataaatgtagtctctcagcaccacattccgtaaagatgatttcccaagtaacggtatttgactaagttgctccagagtgttagggtgcaaaccacagttagtaagctccttatgaacaacctcctgtggaaatgtgtgtacaagtcagtaaaaagcacattagtctttaaacacagaagagttaaataattactatggagactgacaaataaatggctgattaatgtgattcatcctattaatagaagttgatgctaagaatttttgtagtgacaaaatcccaaaatattaatggttataagtctagccaactgagatgcatgagacaattttaaaggtcttaattctaactctaaaaaccttaagtatgttcaaaattaaaggcaaatatggttaaatacccacagtgaattgtttccttaaactataaaggaatcaggtactattgagttttggatgcaagaggaaatgaaaaagctgcccctttttggaatgggaagttcttcagtcactgttaaaactatttggactgaggccgggtgccgtggctcaagcctgtaatcccaacattttgggaggccaaggtgggcagatcacctgaagtcaggagttcaagaccagcctggccaacatggtgaaacccccgtctctaataaagatacaaaaaatagccagatgtggtggcacatgcctgtaatctcagctacttgggaggctgaggcaggagaactgtttgaacccaggaggctaaggctgcagtgagccgagactcgcgccgctgcactccagcccgggcaacagcaagactccatctcaaaaaaaaaaaaaaattgtacttggactgaattcatgaaagctacctcacataaacaacttacagacattattccttcctctagtaattcataattaagtaacagtttaattacttgaaacacaatagtgactcagcataaatgactcaatttccctccagctagtttgaggaaactacaactaaaacagtctgctcataggtgtctacttaccatatcaagtactttgtccatttgcaggcagatgttaaatacagcagttggctcgtgtggatacagtactgcagagaaagatccactctgtgaagatttgagcagcatggtcagtgaatgcagagaatgaggcatgataggacctgtaatctccaaactaaattggtctctgtatccagaaagagcttgtgtcttcacattcacactccgtgccttcatgaaaatgtaaagaaaaggaaaattaagatcatctctcaaccttttgcctagccaaaaatatgttcaatatatttccatttggggtttcctctcttttaacaattatggaataaaactatttcccaagacatctaaacaatgttatgtgagtacaaatacttagtaaattttcagcaacctttccatattaagagattttcaggtgaagtatattccagagaataccattttttcatatagtattttatctgatttagtaatacactgtcaatgcagactattggaaaaacaaaaatttaaaatccattcaattttattgctaagatttagcatgtattttgtatttacatatataatttattatgattataatcccagcactttgggaggccaaggtgggcagatcacttgaggtcaggagttcaagaccagcctggccaacatggtgaaacctcgtctctattaaaaatacaaaaaaattagccaggcatggtggtgtgagcctatagtcccagctacttgggaagctaaggcagaagaatcacctgagccccagaggcagaggttgaagaatcgcttgagcccgttaggcagagtttgcagtgagccaaaattgagccactgctctccagcctgggtgacagagcaagactccgtctctaaatagatagatgaatgaatgaatgaatgaatgaatgaatgcagggcggccaggtgcagtggctcatgcctgtaatcccagcactttgggaggccgagggcagatcatgaggtcaggagttcgagaccaccctgaccaacatggtgaaaacccgtctctacaaaaaatacaaaaaaaaaaaaaaattagccaggcgtggtggcacacgcctgggtgagagtgagattccacctcaaaaaaaaaaaaaaaaaaaaaaaaaaaaaaaaaaaaaaaaagcagggcatggcagtcctgtggtccgatactcgagaggctgaggcaggaatttcacttgagcccacatggttgaggctgcagtgagctgtgccactgcactacagcaagaccctgtctccccaaccaaaaaaagaaaataaatgttcgtataatttaaaaagaggccaggagttcaagaccagcctggccaatatggtgaaactccgtctatactaaaaatacaaaaattagctgggcgtggtggtgcccacctgtaaccccagctactcgagaggctgaggcagaagaatcgcttgaaccccagagttggaggctgcagtgagccgagatcgcaccactgcactgcagccggtgacagagtgggactccctcttaaaacaaacaaacaaaaacaaacaagaaaaaaaaaaacaaaaaaaatagctaggcttggtggtgtgtgcttgtaatcccagctactcaagaggctgaggcatggcgcgagaatcacttgaacccgggaggcaggggttgcagtgagttgagatcacgccactgcactccattcagcctggatagcagcgcaagactccatctcgaaaagaaaataaaaaggatttcatataatttatatatttccacataatttctttgatataactgtcttatataatttttgtttctttttttaatgggaggaaagcaaaatgaaaatatgtaccaagtaaaaatgctaggaggtttttttttaaatcaagaatttatcctatcaaagtaaagtacttcttaaaagctaggttatgcagacttttattaccttaagcatttgcattgtggcacctcggaaagcaacaggggacaagagggttggaggaagtcctgcctgtggacctgaggtagcaactaaactcttagagttaatcaaaaaattgagcaatgtaaaggtgttgattccttttaccaacacaacagattcaggtctgtgatccatttgtacttcatgtttctctttacgcctgaagatgacaatcaaggaaattgcaaaagcaaatctcacctaatgtggaaagcagttatcttgattctgaatcacctgagactccttttctccataatgaaatggaaatcctcttgctacctctctttaccgaatcataaggcatatgtttcaatcaaaatgttaacaatctgaatttgctacaaactgacacctaaacctaatttcttctctagtcaaaacacacctattctcccacaatcataattgaacgttttgattaaaaaaggtttaatagttcaccatttgttgatacttaggggcttatttagtattacaatggagaattagttttaatatgacctgaagataatttaagattataatcatataaaactgccaatgttaaacttctcactaacgtcattcaatgaaaattaattctagttaacaacaactgaaaggatacagcttgatagaaagtatgtctggctttttaattttatcttgcacacccatctcttccagccaggaaaaactttcctcttcatcctcatcactgatggcttgctccctaggaaattgctacagttagagtccctatttcacaagctgttcctgtgcaaatctatttcatgagtccataagtcagtggatgatataaagttattttaatcacatactccccatatcccaagcttgttccagatgctgtctccttcttatggccactttcttttattaaaggcagagaaaattcaatacctatatgaggaacaaaaatgtaactgagttgtcatttaaagtatttaacaggcatgctgtacttttagagtgtaaaaaatttgaaatgttagtttttacaaatgatctattaaggcagtagagttttcaagctttcttcacaaacctacaaacatgcataaaacgtattctccttgaaagaggttcgggaaacaacacatacatgtaacactctttcataaatcatattgtattccagttcactttttgaaaaagtactgattgggcccattaagtagatttcatgatccactaatgggtttactcagtttgaaaattttgttattaaaggggtaattggtactatagaagaatttctagaagagtatattcagatagtgactatctggcccaatatgtgttttattttagagatcagagaacactatgtggaaggaacagtttaaatcaggagtccccaacccctggactgtggactggtactggcctgtggcctgttagaaaccgggctgcacagcaggaggtgagcgactgtcgagtgaacattactgcctgagctccatctcctgtcacatcagtggtcgcattagattctcacaggggcacgaatcctactgtgaactgtgcatgtgaggcatctaggttgtgccctccttataagaatgatgatcttgtccgggcgcggtggctcacgcctgtaagcccagcactttgggaggccgaggcgggcggatcacgaggtcaggagatcgagatcgtcctggctaacacggtgaaaccccgtctctactaaaaatacaaaaaattagccgggcatggttgcaggcacctgtagtcccagctactcgggaggctgaggcaggagaatggcctgaacccaggaggcggagcttgcagtgagccgagattgcaccactgcattctagcctgggtgacagagcgagtctccatctcaaaaaaaaaaaaaaaaaaaaaaaaagaatgatcatctgatgtgtaacagtttcatcccgaaaccatcctcctcactgcccatgaaactgatccctagtgccaaaaagtttgcggactgctggattaaataattgtgggggagggaaaaaaagccagaaataaagaaataatatatttcttaatgttgctaatcaactggtaaaaggcattttaaatttaaatagcttttaggccaaaataggtttactatatagtatagtattctcactttaaacctaaacttttaccttcatttctcatagcttctcttaaacctcgagttgttggagatatgagagctgtgattaagtcacttccagctaatcctgctgctcggaacaggacagtaaactgataggtacaaacgtagaaataggggcaaagttttgtcttcagcaaattatatagagaagtaaagctcacagacctatgaagtaaaaaaattttcttaaggtattattaaacatttaatgcaatgtttataattctgaataattcagtttgatacctggtttaaaacacaacacaaatattttagataatggttttaatttttgtggttacgtatgacttagctttaaaggactgaaattggttatgaggactcgctgatgacttctcaatactttaacaaatagtgtataccacttaaacacttattttttctttaaacaaaacttaattgagaattgcctgctgactttctctgagctgctgctaaaaaaggaagcagagactgacaagaagtagcattaaagaattagggctgcgtgtttatatatatatatatatatatatatatatatactttttttttttttttgagacggagtttcgctctgtcgcccaggctggagtgcagtggcgcgatctcggctcactgcaagctctgcctcccaggttcatgccattctcctgcctcagcctcccgagtagctgtgactataggcacccgccaccacaccaggctaattttttttgtatttttagtagagacagggtttcaccgtgttagccaggatggtctcaatctcctgaccttgtgatccgcctgcctcggcctcccaaagtgctgggattacaggcgtgagccaccacacccggcctgcctgtctgtatatatttaaccaacacttatatacattctaccacaattgggtaaagaatgagtaacagctaaaaaaaaaaaaagtaaacagtttatatgttggttattaataggttcagataaaattcacaaggatctagatacccttctgccattaacgtatccagtcacaaatatgatagagaatgctgctaaaataaaattcactattgaattatacaagtttctcttactaatcttaccagtcactcattaaaacatgctgcagggttgcatcatttgaccaaggacttgtctttccagccatttttctatcagctccaatacgagggaacagtggtagccaagacaaagcagggtggagccaatagataaggctctgctggaaggtacaacggagctcagaggagagtttgggatcctaaaatccaaaggtgacagtgggcagtttttgcccattgagaaatagagaattttattaaagacaatctttaccaaacacttaggtctaagaatctttattgctttctataggaaagcattaataattgttataggaacgaaaacatagtttatccttatttgagccagatgtaatggtaagccgtagtatcagaacatttaaacatagatgggaacattttcctgtttctaccatccttaaggacaatgactaccttttttatcatgaggaataggggtgggcatgtgtgtgtaggtaacactacatccaaccctctctccaaaaggctgttttaaaagtagccagtaaacactgatacggcaaatcacaaatcatcctaatctatttattgaaaagatgtataatataccaagacctttttcagggtaatcctttttaacctagtttgagactttaaaaaaatttttttaagatagtctcactctgtcactgaggctagagtacagtggcacaatcagagctcactgcagtcttgacctcctgggcttaaacaatcctcctacctgagcctcccaagtagctgggactacaggcacccaccaccatgctcagctaatttttttttttttttttttttgtagagatggggtctcactacgttactcaggctggtctcaagcaatccccccacctcagcccccaaaatgctgagattacaggcatgggctattgtgcccagcctcctagttttgagttgatgctttaaaataatcaaaatgtatatctctaaaaccattctagaactcacaaactccacaaaattcataaaatttttcttatacaggtaagaaaatctgtaaatccatcagcccttgcaatcccacccaattgcttttcacttctttctttgtattttctttctcaaaaagccttagagaaaaataatttaacaattcttgcctgcaacactgattaatttgcaagacaagtctctaaatgtatgagcagttactcaatctgacttaaaaaaaaaaaaggtatgaaagcaccataagcaccatctgggaaagacaaaacttcctgtctttgtatctttaaatttccaaagaaaaacttaatggaaggcagcatctgctattttgcaaaggagagcatttcacacttaatttgttactttaacacataactattttatttcagagttacctgtatacttttaggcaaagtaacttctgttgccctacaatgctggacaagaccttgagcttcttcctgtgctttcaaatgatctgcccaggtaaagggttgagaagaggtgaaaaggagtcgcgttttaatactccagtccacaggtaactcagtactttttgaggacggaatatcaggctcggagaatgatacatgtgaagtctttagaaaacaaagaatgcaaaaattagtcgagtatcaagaaaaaaccttcaacctaaagattttatcagctaacatgatcactgaaaagtaaaaatcatataagctgtataataaataacatgaaaaatacattacacactgtaaaaaagtctgaaaggagtcacactaaacttttaaccatggttacctatgggaagcgggaatttgttgttgggggtaggggtggtggaggggcagatttcactttttagtttttacagttctttatggtagtatagatgtttgtattgaagtagaaatattccaagtgttaaaacattttggatcttttaagcttctgaaactctgcatccagggctaacaaagcccatatttaagaaacatttcctgacttcaaatatttcccctcaacctgtctgcttcaggtcgacgttctccacaatacaagaatttttttttttttaaattgagacggagtctccctctgtcgcctaggctgagtgaagtggtgtgatctcggctcagtaccaacctctgccgcctaggatcaagcgattctcgtgcctcgtcctcccgagtacctgggactacaggcgtgccccaccacgcctggctaatttttttgtatttttagtcgagacgggggtttcgtcatattggccaggctgttcgcgaactcctgacctcaggtgtgatccgcctgcttcagcctctcaaagtgttgggattacagacatgagccactgtgcccggccaagcattcttttatatcacaataaaatatcagagaagggggaactatcttggatagaccataagaaggtcacttatttacaagagaaactgggtcttggagaactcttctagcctgttcccattaggacaaaccgcatttatcaaactacacagcacaatggtagtagttggggaatggaaacgtgtgtgtgttaggggagaggagcaacgaggttcagtgctatgccacaacctgtggaggtgggccaggagggctggctctgagtgatgaactggagaagtcaactgcccaaagaagagtggtaaaaactgttagagagtaaaagaaaacccccacgtctatcaggcctattttagcgctggctatctttacagtcatcattactgtatcaaaccaactcctttaccttggctgatgcggtattttcatccctggttgagatgatcaagcctctctgtaaaactactttccaagcaaaatgcttctgagaagtataaatgtatttttaaaaataggctcaaatcctatgaaaaaaaagtttatacaaatacacattctaatgatatttaaaaagtattacctgaggtaattcagtaacagttgttctttcaggaaacttctcttcccatagcaaatcattttcttgattagaatctaaaaactgaggttaaatatattctcctttaaaatttaaaggatgctgaagtttgcgttaaatatgtacagagcctcacctggcatacatgtttctcaataaacgcaagtacacctaaattcagaggcaccccatccaatctatgagtttcaacacttcagttttgtgtctgaactttagtatcaaaattgaggggaacagggaccggcgtttcaaaccgaaagatccaaaaggctttgggtaagacagatgctagtgaattctgaccccacgaatcctcgacattcccccatctccagaataatttggagtgcgtgagagaagggaggccctaaatcacgggggaagcagggcttgtcacctgccccatcgaacagcgtccttgcaagatgggggctctcagggtttttcgagctcttttccaagtcacctctaagtcctctccaaggggctcctcgctgccctctggggccccctcactttcctcgggaacgcgtcccgtgagcacagcccgcagcggggtagccaggggagcgctcttcccacaaacccggccttgccagaatcgcggctcccagggcggggtaccctaaggccacgggcggccgaagtcttcgcgcccatttccttgcctcgaacgcgaggactttccatcccccattcacagctggctcaacccacgaaagacaagagccccttggcggccaggctacaagacactcaccgggaccggggcctccggctgctcgcgggccggcccgtcggggggctccgcggcgacccgcggtcggttgtccaggcgggcgaaggggttcctccgagcagcg

SEQ ID NO: 7485 - DNA, 16055 bp, Homo sapiens
atttcttaacctgtaaaaataactgttgaccatgctaatgtatatatacttgtgcatcttaggacattaagtggtttgctgctttgatggaaattatggttcagtgggttggatacaagagagatgactgttcacagaataacctgtgaactttcacccctctgtatggaaacttgtttcagggccaaatccttgtagctgtcttcttgccccggtcagtgccagccgtactattcacaacactgctgctaccgaggcctaggtatgtaaacatttaaggagttttttaaaagtcttttaacatcaagctaggttttaaaagaattcaaattcattttggcatacttacaggatattttatgtgattgttttctatttgttactgtgtaaatttcaagagtttttttttttttttctgctttagggattttctaagtaaaatatttatacttgctttatagtagaatggggaagaaaactttggatgacaacagtatgcttcttcagtgtctaaactatttctaagtgatttctgggctttattcataaactaggtacacctgggacaattaatatcattgattgttttaacattgccttctttttattttgcaagctaagaagagataccagtgaacctaaatagtggacgaaaacaggagtgttctaattttttttttttgaggggggcacgagggctactgtttcaaaactgccatttacttgtcttatttgacttccaaaatactattacgttaatgtgcaaataatcagaacatacacactacagtatgtataaagtatagaggaatttacatttaattgctataacagatctagaagtaaagtaagattcctctttttagaaagtaaacaatgaatctgtcaccaagttctaactgtaaaatggggacattttacctttctttctttggataggatcagttcttaagagcagccccggtaactggaggaatgggagccgttttgatgagaaaaatgggctggagagaaggagaaggattaggaaaaaacaaagaaggcaataaggaacccatcctagttgattttaagacagaccgaaaaggtaacaagttcttttttggaatgtttattaacgtctcctttaacattacctttaatatatccttttgaacccagtgatactgaactgaaggcacttcttgtatatatacaggtatttgtcagaaaaaacattaaccccttttggggttcacagagcagcttatttttatataactatggatagagacaccagtttgaacttttaaaaggcaccttttgttatgctagttgctaaatatggaaatgtgtatatatctaattttattattacacctccaaattcaactggatttcatgtttagaaaacaggatttccattttattttctcttgacaaggaaccatccttttttctagagtttagtttattttttgttagatattttagcacatcttcattatttcctattacaatactggtttagtctagatttcataaaccctgtttgcttttttcttccaagctcagtagttaagttgggttagagtatagtagaccagctgctgacaataatgttacttcttcctgttgccttgtgttaaggcatcttggaactgttagcattgactgtattttccttttaccttcagatacctgggcagggcagcactgtgtcttctatgtagcttgtatgtagttgctaagtatttaatcattcccacagatgatagctaattggcgtcttttaaataacttcttcccttggaataatgtaagtggaatcatgagaggcttgccagctcagtatgatttttgtatagcttgtttaaacctcatttataaaagctgacaaatgtaaaactgggatttattttcatctttgtaatcaaacagtaagttgaagctaacttcaatagttaaactgtcttaatgaatttggaaatgaactagctctgcaccaaatactttgatgttaagtattgtacaatttcaggaagcattgtccttggaattgtgggacatggcctgactgtaagctctcagagaaccacagatttcccaggataggtttagaaaagcttatattagcatggaattatttagcaaaggttgaaaaatttcctgtaacatacaggatgagcatcccacatctggaaacctgaaatgctttaaaacagaaaactttttgaatactgatatgatgctcaaaggaaatactcattggtgcattttggatttcagcctcttcagatttgggatgcttgaccgctaaatacaatgcaaatatttgaaaacctggaatcaaccgacacacttctggtcccaagcattttggataaggaatactcaacctgtatatgaattgggaaagcagtgtttgggtttagcaatgtagctaatcccctttgtaataagtctatggagagagaggttatgtagaaaggttatgttcatattttgagaacatctcccatttgttaggaagggagaggagagtttgctaggaaaaaagggacctattttatttggagacaaccgttttcacctttttggtggcttaaaatcctaaccttttttggaagagtcttaactgaagcttatttttttaagagacagtaaatctgcagaaatcacttggcaataagctattttttttctttttttgagatggagttttgctcgttgcccaggctgtcagtggcacgatctttactcactgcaaccttcgcttccaggttcaagcgattctcctgccccagcctcccgagtagctgggattacaggcgcgcaccaccacgcccggctaatttttgtttctttagtagagacggggtttcaccatgttggccaggctggtctcagactcttgacctcaggagatccacccgcctcggcctcccaaagtgctgggattacaggcatgagccactgtgcctggccatacttaactttttgttttctgtttacatttggtatttattacaatttctcataccaagatctatgaatattaaatataaatttatatgctgaaaaacagtaaaagagaagaaagagaagattgatagagaaatcgagtgtactaggaatctgctgattttatttgaaggcatacattttgaggttcagactcctacagagggatctttgttttaaagtggtgctttgaaatttatttagtgaacaatttttttttaaaggtcttgttgcagtaggagaaagagcacaaaagaggtctgggaacttctctgctgcaatgaaagatctgtcaggtgagagcacgtttttgaatttcctcttaccctaatcccaccttgaattcattatttgttgcagaagttggtggaaataatttaaaactgggtatttctcccccctgcaggcaaacatcctgtgtctgctttgatggagatctgtaataaaagaaggtggcaaccacctgaatttctattggtccatgatagtggccctgatcatcgcaaacattttctctttagggtaaatatgaatttctgcattaattatatatatttattaatgtgatgacttagagggtgaggggtaaacatgatcacaggattaagattctgttcatgggtggggggtttgtatttgtagttaagtggtggggtttttaaacactgaagggtgctttaatacgacttgtcaatgtcctattttttaaaaaattggaaaagggtaaaatatagtatacaattgttattttctagttgaatgtggggaattaatttaatacttttgtcagtctttttctcaatttggagacctgctctaatttgcagtccctttcccaaatgatttggttcttcgggttgagattataatttgacttacatagtatgggttttatatttttgtaaattatttttctagcatttagtgaaaaaatacaaagctaatagatattaaagtttgatgctgttcttattgtatgtttttcttgaataggtattgagaaatggagcccttaccagacccaattgtatgtttttcttgaataggtattgataaatggaagcgcttaccagcccagctttgccagccctaataagaagcatgctaaagccacagcagctactgtggttcttcaagcaatgggccttgtaccaaaggacctcatggctaatgccacttgcttcaggagtgcctcacgtagatagattgaggttttataataatcatttcagaattttactctgcatcacaatgtatttcctctttaatgttgtaaatatttggcaatttaagacattgtgtaaaaagcaatctgtaaaaacatctccaggctttgatttttgtaccatggaaattgtatttaaccatacagggttttggtatgtttatattgtttaccttagtgatgtatttgtttaagtggctaacatccaaacgactgtttgaaggcatcagagtaatcttcagtgtggaatgttaaataacgcttttatactgtattttgtactatgatgtaactccccttccttatggctaggctactgtaacacttgcctgtaatcagtgaagggctgtgcaccttgtactatttcacaatgggttctgctggacagataatgggccagtgttattgaggtgatcaagatctgttccacagggctaatgccaccatctcccctcaaaattttgtagaggttctaaaaagaaagtggtatgttgtgtgatgatcagcactaagtcctgcattcctgttaaagccacttgggtcataagaagggagtaaaaaatgaagtctgactagaattctattgcagaggccagtacatttagtatggcattgagttgtgatatagttttactttgatgtgcattttgaatttcagctacacctagatagacgtaaaatgataattaaaatgctgtaaccaacttatctaataaaattggcaaccagccactattttgttgactatgagaaagttaaaagtttatgttaatttttagggtctgatagaatatttcatgtgtattacagtggtattcatatgctatgtctctaaactttattttcaaaagcttaaggcccaaatacaaacttctctggaataaacgtggtgttttattttctgggttataaagtgaacaaatacttagatactattatttctttacccaatgcttttgatttttaagcacttttattttaaaaatgtgaattatacagtccccccctacacacacacacacacacacacacacacacacacacacacacacacacacacacacacacacacacacacacacacacacacacacacacacacacacccctataagcacattaaatactactttgccgtgacagctcagtgtacttcacaattcttaacactattctatgtggaatacaaaatgcctttttatctgaattaacatgcatttaaaaagttttagtatatgtgaaaataaaggaattataaatcagtaggaaagatattaaggtagaagcatcaccaatcaactagctcagtagatgttgtctgtatttattttctacctttatgaaacaagaacctgctaacaggtaaatcgtaaagtaacatatttttgccctgatgccattagtcacaatgccatggggtaactgctatgtgatttcccatttgcaaggaagcatattaattcagtttctgctcaatatacaattaggttgtagggatatagatatctcatttgagttatctgagtttttcatctttatatctaaaaatctaatctgaaaatagtaaaacacatttaaaaccttagatgctactgtagtaaaagttatgtttataaacatttcagtatattccttcaacttcaagaatcttgaatttccttgctagaaggcttttttcctcaaagattccttttaggcttactttggtgttcaggatctccaattataaatgtagtctctcagcaccacattccgtaaagatgatttcccaagtaacggtatttgactaagttgctccagagtgttagggtgcaaaccacagttagtaagctccttatgaacaacctcctgtggaaatgtgtgtacaagtcagtaaaaagcacattagtctttaaacacagaagagttaaataattactatggagactgacaaataaatggctgattaatgtgattcatcctattaatagaagttgatgctaagaatttttgtagtgacaaaatcccaaaatattaatggttataagtctagccaactgagatgcatgagacaattttaaaggtcttaattctaactctaaaaaccttaagtatgttcaaaattaaaggcaaatatggttaaatacccacagtgaattgtttccttaaactataaaggaatcaggtactattgagttttggatgcaagaggaaatgaaaaagctgcccctttttggaatgggaagttcttcagtcactgttaaaactatttggactgaggccgggtgccgtggctcaagcctgtaatcccaacattttgggaggccaaggtgggcagatcacctgaagtcaggagttcaagaccagcctggccaacatggtgaaacccccgtctctaataaagatacaaaaaatagccagatgtggtggcacatgcctgtaatctcagctacttgggaggctgaggcaggagaactgtttgaacccaggaggctaaggctgcagtgagccgagactcgcgccgctgcactccagcccgggcaacagcaagactccatctcaaaaaaaaaaaaaaattgtacttggactgaattcatgaaagctacctcacataaacaacttacagacattattccttcctctagtaattcataattaagtaacagtttaattacttgaaacacaatagtgactcagcataaatgactcaatttccctccagctagtttgaggaaactacaactaaaacagtctgctcataggtgtctacttaccatatcaagtactttgtccatttgcaggcagatgttaaatacagcagttggctcgtgtggatacagtactgcagagaaagatccactctgtgaagatttgagcagcatggtcagtgaatgcagagaatgaggcatgataggacctgtaatctccaaactaaattggtctctgtatccagaaagagcttgtgtcttcacattcacactccgtgccttcatgaaaatgtaaagaaaaggaaaattaagatcatctctcaaccttttgcctagccaaaaatatgttcaatatatttccatttggggtttcctctcttttaacaattatggaataaaactatttcccaagacatctaaacaatgttatgtgagtacaaatacttagtaaattttcagcaacctttccatattaagagattttcaggtgaagtatattccagagaataccattttttcatatagtattttatctgatttagtaatacactgtcaatgcagactattggaaaaacaaaaatttaaaatccattcaattttattgctaagatttagcatgtattttgtatttacatatataatttattatgattataatcccagcactttgggaggccaaggtgggcagatcacttgaggtcaggagttcaagaccagcctggccaacatggtgaaacctcgtctctattaaaaatacaaaaaaattagccaggcatggtggtgtgagcctatagtcccagctacttgggaagctaaggcagaagaatcacctgagccccagaggcagaggttgaagaatcgcttgagcccgttaggcagagtttgcagtgagccaaaattgagccactgctctccagcctgggtgacagagcaagactccgtctctaaatagatagatgaatgaatgaatgaatgaatgaatgaatgcagggcggccaggtgcagtggctcatgcctgtaatcccagcactttgggaggccgagggcagatcatgaggtcaggagttcgagaccaccctgaccaacatggtgaaaacccgtctctacaaaaaatacaaaaaaaaaaaaaaattagccaggcgtggtggcacacgcctgggtgagagtgagattccacctcaaaaaaaaaaaaaaaaaaaaaaaaaaaaaaaaaaaaaaaaagcagggcatggcagtcctgtggtccgatactcgagaggctgaggcaggaatttcacttgagcccacatggttgaggctgcagtgagctgtgccactgcactacagcaagaccctgtctccccaaccaaaaaaagaaaataaatgttcgtataatttaaaaagaggccaggagttcaagaccagcctggccaatatggtgaaactccgtctatactaaaaatacaaaaattagctgggcgtggtggtgcccacctgtaaccccagctactcgagaggctgaggcagaagaatcgcttgaaccccagagttggaggctgcagtgagccgagatcgcaccactgcactgcagccggtgacagagtgggactccctcttaaaacaaacaaacaaaaacaaacaagaaaaaaaaaaacaaaaaaaatagctaggcttggtggtgtgtgcttgtaatcccagctactcaagaggctgaggcatggcgcgagaatcacttgaacccgggaggcaggggttgcagtgagttgagatcacgccactgcactccattcagcctggatagcagcgcaagactccatctcgaaaagaaaataaaaaggatttcatataatttatatatttccacataatttctttgatataactgtcttatataatttttgtttctttttttaatgggaggaaagcaaaatgaaaatatgtaccaagtaaaaatgctaggaggtttttttttaaatcaagaatttatcctatcaaagtaaagtacttcttaaaagctaggttatgcagacttttattaccttaagcatttgcattgtggcacctcggaaagcaacaggggacaagagggttggaggaagtcctgcctgtggacctgaggtagcaactaaactcttagagttaatcaaaaaattgagcaatgtaaaggtgttgattccttttaccaacacaacagattcaggtctgtgatccatttgtacttcatgtttctctttacgcctgaagatgacaatcaaggaaattgcaaaagcaaatctcacctaatgtggaaagcagttatcttgattctgaatcacctgagactccttttctccataatgaaatggaaatcctcttgctacctctctttaccgaatcataaggcatatgtttcaatcaaaatgttaacaatctgaatttgctacaaactgacacctaaacctaatttcttctctagtcaaaacacacctattctcccacaatcataattgaacgttttgattaaaaaaggtttaatagttcaccatttgttgatacttaggggcttatttagtattacaatggagaattagttttaatatgacctgaagataatttaagattataatcatataaaactgccaatgttaaacttctcactaacgtcattcaatgaaaattaattctagttaacaacaactgaaaggatacagcttgatagaaagtatgtctggctttttaattttatcttgcacacccatctcttccagccaggaaaaactttcctcttcatcctcatcactgatggcttgctccctaggaaattgctacagttagagtccctatttcacaagctgttcctgtgcaaatctatttcatgagtccataagtcagtggatgatataaagttattttaatcacatactccccatatcccaagcttgttccagatgctgtctccttcttatggccactttcttttattaaaggcagagaaaattcaatacctatatgaggaacaaaaatgtaactgagttgtcatttaaagtatttaacaggcatgctgtacttttagagtgtaaaaaatttgaaatgttagtttttacaaatgatctattaaggcagtagagttttcaagctttcttcacaaacctacaaacatgcataaaacgtattctccttgaaagaggttcgggaaacaacacatacatgtaacactctttcataaatcatattgtattccagttcactttttgaaaaagtactgattgggcccattaagtagatttcatgatccactaatgggtttactcagtttgaaaattttgttattaaaggggtaattggtactatagaagaatttctagaagagtatattcagatagtgactatctggcccaatatgtgttttattttagagatcagagaacactatgtggaaggaacagtttaaatcaggagtccccaacccctggactgtggactggtactggcctgtggcctgttagaaaccgggctgcacagcaggaggtgagcgactgtcgagtgaacattactgcctgagctccatctcctgtcacatcagtggtcgcattagattctcacaggggcacgaatcctactgtgaactgtgcatgtgaggcatctaggttgtgccctccttataagaatgatgatcttgtccgggcgcggtggctcacgcctgtaagcccagcactttgggaggccgaggcgggcggatcacgaggtcaggagatcgagatcgtcctggctaacacggtgaaaccccgtctctactaaaaatacaaaaaattagccgggcatggttgcaggcacctgtagtcccagctactcgggaggctgaggcaggagaatggcctgaacccaggaggcggagcttgcagtgagccgagattgcaccactgcattctagcctgggtgacagagcgagtctccatctcaaaaaaaaaaaaaaaaaaaaaaaaagaatgatcatctgatgtgtaacagtttcatcccgaaaccatcctcctcactgcccatgaaactgatccctagtgccaaaaagtttgcggactgctggattaaataattgtgggggagggaaaaaaagccagaaataaagaaataatatatttcttaatgttgctaatcaactggtaaaaggcattttaaatttaaatagcttttaggccaaaataggtttactatatagtatagtattctcactttaaacctaaacttttaccttcatttctcatagcttctcttaaacctcgagttgttggagatatgagagctgtgattaagtcacttccagctaatcctgctgctcggaacaggacagtaaactgataggtacaaacgtagaaataggggcaaagttttgtcttcagcaaattatatagagaagtaaagctcacagacctatgaagtaaaaaaattttcttaaggtattattaaacatttaatgcaatgtttataattctgaataattcagtttgatacctggtttaaaacacaacacaaatattttagataatggttttaatttttgtggttacgtatgacttagctttaaaggactgaaattggttatgaggactcgctgatgacttctcaatactttaacaaatagtgtataccacttaaacacttattttttctttaaacaaaacttaattgagaattgcctgctgactttctctgagctgctgctaaaaaaggaagcagagactgacaagaagtagcattaaagaattagggctgcgtgtttatatatatatatatatatatatatatatatactttttttttttttttgagacggagtttcgctctgtcgcccaggctggagtgcagtggcgcgatctcggctcactgcaagctctgcctcccaggttcatgccattctcctgcctcagcctcccgagtagctgtgactataggcacccgccaccacaccaggctaattttttttgtatttttagtagagacagggtttcaccgtgttagccaggatggtctcaatctcctgaccttgtgatccgcctgcctcggcctcccaaagtgctgggattacaggcgtgagccaccacacccggcctgcctgtctgtatatatttaaccaacacttatatacattctaccacaattgggtaaagaatgagtaacagctaaaaaaaaaaaaagtaaacagtttatatgttggttattaataggttcagataaaattcacaaggatctagatacccttctgccattaacgtatccagtcacaaatatgatagagaatgctgctaaaataaaattcactattgaattatacaagtttctcttactaatcttaccagtcactcattaaaacatgctgcagggttgcatcatttgaccaaggacttgtctttccagccatttttctatcagctccaatacgagggaacagtggtagccaagacaaagcagggtggagccaatagataaggctctgctggaaggtacaacggagctcagaggagagtttgggatcctaaaatccaaaggtgacagtgggcagtttttgcccattgagaaatagagaattttattaaagacaatctttaccaaacacttaggtctaagaatctttattgctttctataggaaagcattaataattgttataggaacgaaaacatagtttatccttatttgagccagatgtaatggtaagccgtagtatcagaacatttaaacatagatgggaacattttcctgtttctaccatccttaaggacaatgactaccttttttatcatgaggaataggggtgggcatgtgtgtgtaggtaacactacatccaaccctctctccaaaaggctgttttaaaagtagccagtaaacactgatacggcaaatcacaaatcatcctaatctatttattgaaaagatgtataatataccaagacctttttcagggtaatcctttttaacctagtttgagactttaaaaaaatttttttaagatagtctcactctgtcactgaggctagagtacagtggcacaatcagagctcactgcagtcttgacctcctgggcttaaacaatcctcctacctgagcctcccaagtagctgggactacaggcacccaccaccatgctcagctaatttttttttttttttttttttgtagagatggggtctcactacgttactcaggctggtctcaagcaatccccccacctcagcccccaaaatgctgagattacaggcatgggctattgtgcccagcctcctagttttgagttgatgctttaaaataatcaaaatgtatatctctaaaaccattctagaactcacaaactccacaaaattcataaaatttttcttatacaggtaagaaaatctgtaaatccatcagcccttgcaatcccacccaattgcttttcacttctttctttgtattttctttctcaaaaagccttagagaaaaataatttaacaattcttgcctgcaacactgattaatttgcaagacaagtctctaaatgtatgagcagttactcaatctgacttaaaaaaaaaaaaggtatgaaagcaccataagcaccatctgggaaagacaaaacttcctgtctttgtatctttaaatttccaaagaaaaacttaatggaaggcagcatctgctattttgcaaaggagagcatttcacacttaatttgttactttaacacataactattttatttcagagttacctgtatacttttaggcaaagtaacttctgttgccctacaatgctggacaagaccttgagcttcttcctgtgctttcaaatgatctgcccaggtaaagggttgagaagaggtgaaaaggagtcgcgttttaatactccagtccacaggtaactcagtactttttgaggacggaatatcaggctcggagaatgatacatgtgaagtctttagaaaacaaagaatgcaaaaattagtcgagtatcaagaaaaaaccttcaacctaaagattttatcagctaacatgatcactgaaaagtaaaaatcatataagctgtataataaataacatgaaaaatacattacacactgtaaaaaagtctgaaaggagtcacactaaacttttaaccatggttacctatgggaagcgggaatttgttgttgggggtaggggtggtggaggggcagatttcactttttagtttttacagttctttatggtagtatagatgtttgtattgaagtagaaatattccaagtgttaaaacattttggatcttttaagcttctgaaactctgcatccagggctaacaaagcccatatttaagaaacatttcctgacttcaaatatttcccctcaacctgtctgcttcaggtcgacgttctccacaatacaagaatttttttttttttaaattgagacggagtctccctctgtcgcctaggctgagtgaagtggtgtgatctcggctcagtaccaacctctgccgcctaggatcaagcgattctcgtgcctcgtcctcccgagtacctgggactacaggcgtgccccaccacgcctggctaatttttttgtatttttagtcgagacgggggtttcgtcatattggccaggctgttcgcgaactcctgacctcaggtgtgatccgcctgcttcagcctctcaaagtgttgggattacagacatgagccactgtgcccggccaagcattcttttatatcacaataaaatatcagagaagggggaactatcttggatagaccataagaaggtcacttatttacaagagaaactgggtcttggagaactcttctagcctgttcccattaggacaaaccgcatttatcaaactacacagcacaatggtagtagttggggaatggaaacgtgtgtgtgttaggggagaggagcaacgaggttcagtgctatgccacaacctgtggaggtgggccaggagggctggctctgagtgatgaactggagaagtcaactgcccaaagaagagtggtaaaaactgttagagagtaaaagaaaacccccacgtctatcaggcctattttagcgctggctatctttacagtcatcattactgtatcaaaccaactcctttaccttggctgatgcggtattttcatccctggttgagatgatcaagcctctctgtaaaactactttccaagcaaaatgcttctgagaagtataaatgtatttttaaaaataggctcaaatcctatgaaaaaaaagtttatacaaatacacattctaatgatatttaaaaagtattacctgaggtaattcagtaacagttgttctttcaggaaacttctcttcccatagcaaatcattttcttgattagaatctaaaaactgaggttaaatatattctcctttaaaatttaaaggatgctgaagtttgcgttaaatatgtacagagcctcacctggcatacatgtttctcaataaacgcaagtacacctaaattcagaggcaccccatccaatctatgagtttcaacacttcagttttgtgtctgaactttagtatcaaaattgaggggaacagggaccggcgtttcaaaccgaaagatccaaaaggctttgggtaagacagatgctagtgaattctgaccccacgaatcctcgacattcccccatctccagaataatttggagtgcgtgagagaagggaggccctaaatcacgggggaagcagggcttgtcacctgccccatcgaacagcgtccttgcaagatgggggctctcagggtttttcgagctcttttccaagtcacctctaagtcctctccaaggggctcctcgctgccctctggggccccctcactttcctcgggaacgcgtcccgtgagcacagcccgcagcggggtagccaggggagcgctcttcccacaaacccggccttgccagaatcgcggctcccagggcggggtaccctaaggccacgggcggccgaagtcttcgcgcccatttccttgcctcgaacgcgaggactttccatcccccattcacagctggctcaacccacgaaagacaagagccccttggcggccaggctacaagacactcaccgggaccggggcctccggctgctcgcgggccggcccgtcggggggctccgcggcgacccgcggtcggttgtccaggcgggcgaaggggttcctccgagcagcg

SEQ ID NO: 7486 - DNA, 16055 bp, Homo sapiens; identical to SEQ ID NO: 7485

SEQ ID NO: 7487 - DNA, 1466 bp, Homo sapiens
ctccatctcaaaaaaaaaaaaaaaaaaaatgaaaccagtagtcaaattactatttggtaatacatttttgacatgaacttgcagctcccttggtaagtctgttgaagagtaaatgaagttttactacctcaggaaaaacatagttgtaattttatttaaatatcaaggttgctataataaaattcctttcagaatcatgagtttaatatgaaacactaagatttgaagagtttcattctggggataaatggtgaggcatttaggttaaacgtttaataaaggctaagagagaagaacattcgcaggtgtaatagtttgctttccacttggaaagaattagttttattctagaagttatattttagagccatctgaatagatgagtagctaatttatagttggaaattagggatcaggagttgggatagtgggtagacacattttccccagtatcctcagattttagccttgttagaataaaagcctattatttatgcctaagcaccctaacacttagatttatagagactgctaggaaaagcaaagtaagtgtgagaaggttaatgagacagtacttgtcgcatcttgtgtgccttcaaaaattaccttgataatcctacctgacaaaacatcttaaggtaggcctagggggacatgaattttcacctgaaatatctgcattctcattaaagtcccaggaatcaaacagacttaagtgaaagatgacatactaagtttcttagtgtttcaatctcactttgcttagattaatatttctaataggtcttagaattgttctaatttgtgtgatgatttacttaaatcaacttagcgaaattacagttgagagattcaatttgaaagatgcattctgcagttgattagactgtttatagatctctagaaagatttatatattaacataaacagtcttaattacagaaaggattaattttgttttcattttaagaaggcattgtatcagaatccatacttaaagaaaaaccttgagttagctaaaggaatattagtttattagcaaggtaactaagaattatggaggattaggggttctgaaggtaagaaagatttgtgaatccttatgcatgagttataattattctcatagtcatacagccttctctactagacaggtcttattcttaagagaagtcttttatacatgatacatagtcttaattacagctagcctctacttgtaaaaaagaaaatccttagccgttagctatttactgacttccccgtatttgttatgttcatgcagtgtctacttattctttgtatatgaaaacagcaaaatcttccatgtcagataagcattttacaaaaatgaattttcttgtgtgagataactaggaaataataataatgttaaaagaaggacaaaaaccaagaaatgagttgataaaaatcaactcgagcttttaattttagaacaaaaaaaa

SEQ ID NO: 7488 - DNA, 218 bp, Homo sapiens
gccaccgcctctgccccccgcagcagggaaagggcgaagaggcagccccgccaccagggcggctcggcgggccgccggctccgtcagctcacggggcggggaggcggcagctccacggctccgggcccttttccgtcggagccgcactacctcgggcggctttcggaagcccggtgagtagccgggcaccgaaagggccatgacgcgcggcggctgag

SEQ ID NO: 7489 - DNA, 218 bp, Homo sapiens; identical to SEQ ID NO: 7488

SEQ ID NO: 7490 - DNA, 218 bp, Homo sapiens; identical to SEQ ID NO: 7488

SEQ ID NO: 7491 - DNA, 147 bp, Homo sapiens
gcacatgcctgtaatcccagctactcaggaggctaaggcaggagaattgcttgaacccaggaggcagaggttgcagtcagccaagatcatgccactgcactccagcctgggctacagagcaagactccatctcaaaaaaaaaaaaaa

SEQ ID NO: 7492 - DNA, 13970 bp, Homo sapiens
aggtcctggcggacaccaaggagcttgtgtcgtctaaggtgtcgggggcccaagagatggtgtctagcgccaaggacacggtggccacccaattgtcggaggcggtggacgcgacccgcggtgctgtgcagagcggcgtggacaagacaaagtccgtagtgaccggcggcgtccaatcggtcatgggctcccgcttgggccagatggtgttgagtggggtcgacacggtgctggggaagtcggaggagtgggcggacaaccacctgccccttacggatgccgaactgggtaagtgtggccagcgggctgctctgggacccctccccaggccccctgaccggaagccgctgtcggcctcctggggtctgtgccgacactcactgccgcctcgtccctgccacttctcccgggcatcttggaatctcatcactaacgcagtcccctctgtcctgctcaccagctcccgccctcatccaccacagtctcctccccacagcagccaccagagggcgcctgtgaccacctgagtcagaacccgtccctctgcccacagccctccatggaccccacctcccctggggtcaaagcccaagtcctcgtcacagcccacaaggtcctgcacaacctcccctgtcctctccccgccctcctcctcttcccccttcgccactccgctcctgcataaatacgtgactaaacttgagatctcactgaactgtgacaacaatgctggtgttcccgccaggccagacatcccactccagtcatctcggtcacatattcgcactccctgcactgtttatttgatattcttctttaattaatttatttatttatttagagacagagtctcgccctgtcacctaggctggagtgcaatggcgtgatctcagctcactgcaacctctgcctcctgggttcaagcgagtctcctgcctcatcctcctgagtagctgggattacaggcacctgccaccacacagctaattttttgtatttttagtagaaacggggtttcactatgttggccaggctggtctcgaactcctgaccttgtgatctgcccacctcggcctccccaagtactgggattacaggtgtgagccaccatgcccggcccttttttatttatttgttttagagatagagtctcactctcttgcccaggctgaagtgcagtggtgcgatcatagctcaatgcagcctccaactcctgggttgaggcgagcctcccatctcagcctccgagtagctgggactacaagcacacaccatcacgcccaactaatttttctttatttaatttttggtaaagacggggtctccctctgtcatcccagctgatccagaactccttggctggagtgatcctactgctttagccccccaaagtgcggggattgggatttttgcaaataagtagcttaggatataggcagggcgcggtggctcagcctgtaatcccagcactttggtgggccgaggtgggcagatcacctgaagtcaagagtttgagacaagcctggccaacatggtgaaacccggtctctactaaaaatacaaaaattaggccgggcacggtgggtcacgcctgtaatcccagcactttgggaggccaaggccgggcggatcacaggttcaggagatcgagaccatcctggctaacacagtgaaaccccatctctactaaaaaaaaaaaaaaaaaaaaaaaaaaaattagccgggcgtggtggcgggtgcctgtagtcccagctactcgggagactgaggcaggagaatggcatgaacctgggaggcggagcttgcagtgagccgagatcatgccactccactccagcctgggcaatagagctagacgccgtctcaaaaaaataataataataaaataaacattagccaggtgcggtggcaggcgtctgtaatcccagctacttgggaggcagaggttgcagtgagccaagattgggccgctgcactccagcctgggcgacagagtgagactccatctcaaaaaaaaaaaagcatgggtacagtaggagcaggattaaataaatacatgcagctgggcgcagtggctcatggctgtaatcccagtactttgggaggctgaggcgggtggaggttgaggtcgggagttcgagacaagcctgaccaacataaagaaaccctatctctactaaaaatacaaaattagccaggcatggtggcgcatccctgtaatcccagctaactcgggaggctgaggcaagagaatggcttgaatctgggaggcagagcttgtggtgagccaagactgcgccattgcactccagcccaggcaacaagagtgaaactccatctcaaaaaaaataaaggccaggtgtggtgactcatgcctgtaatcccagcactttcggaggctgaggcagctggatcacatggtcaggagtttgagaccagcctggccaacatggtgaaaccccatctctactaaaaatacaaaaattagccaagcatggtggcacattcctgtaatcccagctactcaggaggctaaggcaggagaatcacttgaacccgggaggcggaggttgcagtgagccgagatcatgccattgcactccagcctgggcaacagagtgagactctgtctcaaaaaaataaataaataaataaataagtaaataaatacatgcatatacacatatgaacctacgaacatgggatgaggccaggcgtggtggctcacacctgtcatcccagcactttggtgggaggattagttaagcccagtagttccagaccagcctggacaacatagaccccatctctacaaaaaatttaaaaattagctgggtgtgctagtgcacgcctgtagtcccagttgctatttgggagctgagacaggaggatcacttgagcctgggagttcaaggctacagtgagctatgattgcaccgctgcactccagcctgggcaacagagcgagactgtacttcaaaatataaaaaccgacaaaacaaacagatctaaacatagaaaaggtacaggaagccaggtgcaatggctcacacctgtaaacctagcactttgggagtctgaggcgagcagattgcttgagtccaggatttcaagaccagcctgggcaacatagtgagaccccattcctacaaaaagtacaaaaattagccaggtgtcttgccgtagtcccagctttatgtagtcccagctactcgggaggccaaggttgaaggatagcttgaagctgggaggttgagcctgcagtaagctgaggtcgtgccactgtactccagcctgggcaacagaccgagaccctgtctaaaaaaaagaagaaaaagtacaggaaaaatacggtatatatggtattataatcttatgggaccactgtagtatatgcagtccattgttggctgaaatgtcattattctcttttttttttgagacggagtctcactctcacccaggctggagtgcagtggtgtgatcttggctcactgcagcctccacctcccgggttcaagcgattctcctgcctcagcctcctaagtagctgagattacaggctagtgccatcacgcctggctaatttttgtatttttagtagagatggggtagtgccatgttggccaggctagtcttgaactcctgacctcaagtgatctgcccgccttggcctcccaaagggctggcattactggcatgagccactgcacccggcctacggtattataatcttatgggacctctgtagtatatgtgatgtattgctggctggaatgctgttattctctgcaggactgcataatgaacattcaggcctatattcacaggttgtccaaggcaggtctggcctgcaggccatagcttgagaccctcctgctagtctaaggtctctgattcctgtgaggtttaattttccttatccccgttttgcagatagggaaaaccaaggcagaatcctttgctcccaggccttcgaggtttataagaagtagaactgggttataaactggacagcatggccaggtgtggtggctcacgcctataatcacagcacttttggaggccagttcggatgaatcactggagatcaggagttcgagaccagcctggccaacatggtgaaaccccgtctctactaaaaatacaaaaattagctgggcatggtggcgggcgcctgtaatctcagttactcgggaggctgaggcaggataatcacttgaacccgggaggcagaggttgcagtgagccgagatgacaccactgcactccaacctgggcgacagagcgagactccatctctaaataaataaataaataaactggacagtgtgattcttgggactgtctgcatgggacgagcccagctgtgtgttctggtcttcacagagacccttctccttttccttgcagcccgcatcgccacatccctggatggctttgacgtcgcgtccgtgcagcagcagcggcaggaacagagctacttcgtacgtctgggctccctgtcggagaggctgcggcagcacgcctatgagcactcgctgggcaagcttcgagccaccaagcagagggcacaggaggctctgctgcagctgtcgcaggtcctaagcctggtgaggttccagggggtcggggccctgagccagcagccttcaccccgcagcagacacccacccagagctcagtggcttattgctcacccctctgcaggctggcagggccattcccgcttgctcctggcactgtatctggttgtacactcatttgctcaggatgctgccacaaaccacactgtctggggccgggcacagtggctcacacctctttgtgtgagtccctcaagtgctttgggagcccaaggcaggaggatcgcatgagtccaggggtttgagacccacctgggcaatatagcaagaccccatctctacaaaaaataatttaaaacaattagctggctgtggtggtgcgtgcctgtaatctcagctacttgggaggctgaggtgggacgattgcttgagcccaggagttggaggctgcagtgagctatgattgtgccactgcactgcagcctagtcaacagagcaagaccccatctcaaaaaaaaaaaaaaaatcgtggccaggtgcggtggctcatgcctgtaatcccagcactttgggaggctgaggcgggtggatcacgaggtcaggagttcaagaccagcctggccaacatggtgaaaccccatctctactaaaaatacaaaaattagccaggtacaatggcaggcacctgtaatcccagctactcaggaggctgaggcaggagaatcgcttgaacccgggcggcagagattgcagtgagccgagatcatgctactgctctccagcctgggtgacaagagtgagactccatctcaaaaaaaaaaaaaaaaaattcgtactgtctgggaaatgtaaacaacagatatttattttctcacatttctggaggctggaagtccaagatcagagtgtccttctggggcctctctccttgactcgtagacagccatcttctctctgtgtattcacgtggtcgtcccttccctctgtgtatgtctgtgtcctaatctcttttttttctttgaacggagtctcgctctgttgcccaggcgggagtgtagtggtgcaatctcagatcactgcaacctccacttcccgggttcaagtgattcttgggcctccacgtcccgagtagctgggatcacaggcacttgccaccatgcctggctaatttttgtatttttagtagagatggggtttcactatgttggccgggctggtctcaaactcctgacctcaagtgatccacccacctcagcctcccaaagtgctgggattacagacacgagccaccacgcacagctctaatctccttattgaaggagaccagccctttatggattggagcccaccctaatggatagcttcatttacctttatgacgatttttttttttttttttccagagacaggggctcactctgttgcccaggctggagtggatgatcatggctcactgcagcctcttaggtgcacccatcttggagcatatgtctgccatcattcctctttatttatttttcttttctttttgtggcgcgatctcagctcactgcaagctccgcctcctgggttcatgccattctcctgcctcagccttctggtagctgggactacaggcgccggccaccatgcctggctaattttcttttctatttttagtagagatggggtttcacagtgttagccaggatggtcttgatctcctgacctcttgatccgcccgcctcggcctcccaaagtgctggaattacaggcgtgagccaccgcgcccggcctttttttttttttttttgagacggagtctcgctctgtcacccaggctggagtgcagtggcatgcagtctctgctcactgcaagctctgcctccttggttcacaccattctcttgcctcagcctcccgagtagctgggactacaggcgcccaccaccacgctgggctaattttttgtatttttagtagagatggggtttcaccgtgttagccaggatggtctcgatctcctcacctcgtgatccacccgcctcggcctcccaaagtgctgggattacaggtgtgagccactgcgctcggccgactatttttcttttctcttaaactttatgtaatatgtagagatgagatgtcactgtgttgcctatgctgttctggagctactgagctcaactgatccaacccccttggcctcccaaagcgctgggattgcagaagtcagcctgcttcgttcctttggaaggctgagtcatatttcattacaagcacttttttttgttttttgttttttgttgttttgagatagagtctggctctgtcacccaggctggagtgcagtggcgcaatctcagctcactgcaacctccgcctcccaggttcaagcgattctcgtgcctcagcctcctgagtagctgggactacagatgtgcaccaccacacctggctaatttttgtatttttagtagagacggggtttcaccatgttggttaggctggtctcgaactcctgaactcaggtgatccacccacctcaacctcccaaagtgctgggattacaggtgtgagccaccatgcccagcctacaagcactttttaagcctttgctggttccatctgctcatgtcccattggccaaagccagccacgtgtccaggctcccttgcaagcgcaggagaaattgacacaatgggaagagctacaggggatgtgcagcccttctttgcaccaaccacacagagcctgagtatgtcaatgattaaaccaaaggccccagagctcaccgtagccaggaaacccttcctccctccctccctttctcttttctagactgtcatgtaagtcagatgctggaaggattccttgggttccttctggaatcccgtctctcccaggggagcctccttccctcacttctctctcccctgccccagatggaaactgtcaagcaaggcgttgatcagaagctggtggaaggccaggagaagctgcaccagatgtggctcagctggaaccagaagcagctccagggccccgagaaggagccgcccaagccagaggtacccatgaggggactggggggtggcctagggtacttggagtcccgatgccactctctacacctctgcttcatgggcctacctgcttcgaatgatttccctagcctcacctgcttttggaagctaatgacacctccttcaggaagcctgccttgatttctcctcttgggcatgcataggtatggcttctgttttttgttttgagatggagtgttgctctgtcacccaggctggagtacaatggcatgatcttggctcactgcaacctccacctcctgggttcgagtgattctcctgcctcagcctccctagtagctgggattacaggcgctcaccaccacgcctggctaatttttttgtatttttagtagagacagggtttcaccatgttggccaggctggtcttgaactcctgacctcaagtgatccgccctgcccagcctcccaaagtgttgggattacaagcgtgagctactgagcccggcccctagcagcaacttctgactagtattctccggccccctccactctatctcaagccttggcctcttgtgttctctaatgggtctcgctgcctgtcccaccacccacttaagctccccaggggcaaaggaagtttgcagtgagccgagatcgcaccactgcactccagcctgggcaacagaaggagattctgtctcaaaaaacagaaaatgtcctgaaattagatgaaggtagtatttgcccaaccttgtgaatgtattaaaaaccaatgaatcgtacacttcaaagggcgagttttagggtgtgtggattatatatcaatttttgaaatagttgtttatttatctttgagacagggtctcactctgttgccctggctggagtgcagtgatgccatcacaggtcactgtggcctcgccattgcaggctcaggcaatcctctcgcctcagcctcccaagtagctgggaacacaggcgtgtgccacgatgcctggctaattttttttttaatttttagtagagacaggatctcactgtgttgcccaggctggtcttgagctcctggtgtcaagcaatactcccacttcagccttccaaagcactgggattacaggcatgagccaccacacccgaccccagatcaattatttatttatttatttatttatttattttttgagatggagtctcgctctgtcacccaggctggagtgcagtggtgtaatctcagctcactaccagctctgcctcccaggttcacgccattctcctgcctcagcctcccgagtatctgggactacaggcgcccgccaccaggcccagctaattttttttgtatttttagtagagacgcgatttcaccgtgttacccgggatggtcttgatctgctgaccttgtgatccgcccgcctcggcctcccaaagtgctgggattacaggcgtgagccaccgcaccctgcctatttatttatttattgctctgttgcccaggctggagtgcagtggcacaatctcagctcactgcaacctctgcctcctgggttcaagtggttctcctgtctccacctccccagtagatgggattacaggcatgcgtcaccacgcccggctaatttttgtactttttagtagacacggggtttcgccatgttggccaggctggtctcaaactcctgaccgcaggtgatccgcccacatcggcctcccaaagtgctggtattacaggcgtgagccaccgtgcccggacccagatcgattttttaaaaactgaaatgagatcatatcaaaagcacatagtaagggctacaaaagtgacatgcataaagatatggtgaatatctctataaatgcaaattgttcgggaggcagaactagaccacctgctgcctaaaactgtctcctgtttccccgactgctaagcacagcagccagaatgacttttcaaatgaaaaaaccagatcttatctctctcacgtgggcactctcccgtaatccctcgctcaagtccagagtcctccagctgccagggctctgggcaaaaccctacctcccagtgtgtgccttttttttttttttttttttttttgagatagagtctcactctgtcaccctggctggagtgcaatgtcatgatctcggctcactgcaacctctgcctcccgggttcaagcgattctcctgcctcagcctcccgagtagctgagactacaggcacctgccaccacgcccagctaatttgatttatttatttatttttgagacagagtctcactccgtcacccaagctggagtgcagtggcgtgatcttgactcactgcagcctccacctcctgggttcaagcaattttcctgcctcagtctcccaagtagctgggattacaggcgcctgcaaccacacccagctaatttttttgtatttttagtagagacagggttctgtcatgtttgccaggctggtctagaactcctaacctcaagttatccacccgtcttggccccccaaagtgctgggattacaggcctgacccactgcgcccggcctaatttttgtatttttagtagagatggggtctcaccatgttggccaggctggtctcgaaccctgtctgtgctcatctcactctctggccaaggaaattttcaaggacctgatttcaactatgttctccccggatggtttacaacttctgcctagaaagttcttccaggctgtcccagcctggcttccactttttgttttttaacagcttttttttttcttttttttttttttttttttttgagatggagtctcgctctgtcgcccaggctggagtgcagtgacgcgatttcggctcactgcaagctccgcctcccggattcacgccattctcctgcctcagcctcctaagtaactaggactacaggctcccgccaccatgcccagctaatttttttgtgtttttttagtagagatggggtttcaccatgttagccaggatggtcccgatcgtcctgacctcatgatccaccctcctcggcctcccaaagtgctggggattacaggggtgagccaccgcacccagccttttttttttttttaacagttttattgagatctcatttgcataccatacaagtcacgcatttaaagcatacacatcgctggttctcagcattgtgcaactatccctatctcatctcatgcccctaaaaagaaacccttttcccatcagcagtcactgccccatttcctcctcctcccaaccacgtatcccctcctgtctctggatgggcctgtcctggacatttcatagaaatgggatcacaccctgtttggccttttgtgtccggcttctcgcgctgagcgtgacgtccttagggctcacccatgctgtggcctgggtcagagccccatgacgttccatggctgagtcacattctgttgtatgggtggatcacattctgttcacccatttatcaaccgaaggacacttgagtcgtttctactttttgctgtgcccctgtgtgcatgtctttgtgtgtggacgtatgtttccgtttctcttgtgcacacacccacaactagaattgccgagtcatatgatgattctatggtttaacattttgagtaaccgctagactgttttccaaagtaactataccaccagcaatacacgaggcttccaatttctccgcctcttgactgacagtgggtatcatctgatagcctctggggtttttgtttgtttgtttgtttttgagacagagtctcgctctgttgcccaggctggagtgcaatggcatgatcttggctcactgcaacctccgcctcctgggtgcaagcagttcttctgcctcagcttcctgtgtagctgggattataggcacatgccaccacacccggctaattttgtatctttagtagaaatgcgggtttcgccatgttggtcaggctgaactcctgacctcggtgatccacgcaccttggcctcccaaagtgctgggattacaggcatgagccaccatgccaggcctccttatggttttgatttgcatttcctcaatgacttataaggtcaaacagcttttcatgtgctctccctatatcttctttggtgatttgtctatgccctttaaagaatttgactagtggccaaatgcagtggctcgtgcctgtaattccagcattttgggaggctgaagtgggcaggtcacttgggcccaggagtttaagacctgggcaacttagtgagatcctggctctacagaaaattttaaaaatgtagctgggcgtggtagtgagtgcctgtagtcaggcaggctgaaatgagaggataacttgagctcaggagttacaggctgtagtaagctatgatcacgccactgcactccagcctgggcgacaaagtgagatcctgtttctaattaaaagaaaagagtctgggcgcggtggttcatgcctgtaatctcagtactttgggaggccaaggagggccgatcacttgaggtagagttcaagaccagcctggccaacatggtgaaaccccatctgtactaaaaatgcaaaagttagacgggcgtggtggcacgcgcctgtagtcctagctattcgggaggctgaggtaggagaatcgcttgaacctgggaggcggaggttgcagtgagccaaaatcatgccactgcacgccaacctgggcaacagagcaagactctatctcaaaaaaaaaaaaaaaaaaaagggccgggcacggtggctcacgcttgtaatcccagcattttgggaggccaaggcaggcggatcacgaggtcaggagatcaagaccatcctggctaacacggtgaaaccccgtctctactaaaaatacaaaaaattagcctggcgtggtggtgggcgcctgtagtcccagctactcgggaggctgaggcaggagaatggcgcgaacctgagaggcggagcttgcagtgagttgagattgtgccactgcactccagcctgggcgacagggcgagactccgtctcaaaaaaaaaaaaaaaagtttcgcctatggaaagcgtttgccccaaggtcagtggtagaacccctcttcccctctttccctggcttcagctccgatcgcctttcctgaaacaaatggtcctgattggtgtccccatctcccttctcagcaggtcgagtcccgggcgctcaccatgttccgggacattgcccagcaactgcaggccacctgtacctccctggggtccagcattcagggcctccccaccaatgtgaaggaccaggtgcagcaggcccgccgccaggtggaggacctccaggccacgttttccagcatccactccttccaggacctgtccagcagcattctggcccagagccgtgagcgtgtcgccagcgcccgcgaggccctggaccacatggtggaatatgtggcccagaacacacctgtcacgtggctcgtgggaccctttgcccctggaatcactgagaaagccccggaggagaagaagtagggggagaggagaggactcagcgggccccgtctctataatgcagctgtgctctggagtcctcaacccggggctcatttcaaacttattttctagccactcctcccagctcttctgtgctgtccacttgggaagctaaggctctcaaaacgggcatcacccagttgacccatctctcagcctctctgagcttggaagaagcctgttctgagcctcaccctatcagtcagtagagagagatgtccagaaaaaatatctttcaggaaagttctcccctgcagaattttttttccttgttaaatatcaggaatataggccgggtgcggtggctcacacctgtaatcccagcactttgggaggctgaggcgggcggaacacctgaggtcaggtgttcgagaccagccaggccaacatggtgaaaccccgtctctactaaaaatacaaaaaaaaatgagccgggcatggtagcaggtgtctgttatcccagttaggaggctgaggcaagagaatctcttgaacctgagaggcggaggttgcagtgagccaagatcgcgccattgcactccagcctgggggacaagagtgagacttagtctcaaaaaaaaaaaaaaagaaaaaaaaatcagggatatagttcatatcccacttctttgtttacaccgatgtccctgaatatcagcctgtagctaatggacttgggatttctggtctaagtgggcctcctggggatggggtggtacactgagcttctgagcctcattgtagagtagaaaggtactggggcctgtgtggtaagccttgttgaaatgctctggtattcagtattgccttaataaacttcacccacaactgcatacaggc

SEQ ID NO: 7493 - DNA, 3921 bp, Homo sapiens
cccccagaggtcatgctgaaagtacgtctaatagacaggtaagtatgtttatattttactcttaaccatttcgtttttaaattataaacaataaaaattcagagttatgtagatttgcaatggccagtaccttccaagaaaatccaagaaaataaataattcaagggaggcaagcttactgactacaccctatggggactaaagcagccttgccgaattctatccgaaatcaccaacttgtttgaaaaaagtttattatttgaactttcatttattaagaaaaatttctgagtttccttgtttggtagatcttttttttttttttttttttttttttttttttaagagaaggggttctgccatgttgcccaggctagtttcgaactcacaggctcaagcaatccacctgggattacaggcatgcgccaccgtacccggctgaattttttcaagcaattgtctgagtgtttgtaatttggttcctccattttgtcagggaggttgcaggaacaggaggcatcctgcataagcaggtgcatttctgcttcttttggggtcccagcaagacaagtgttgggctccaaaaggggctttcggctcctgctgtgtgttcacaaacatgtgttgtgtttctggctctccctctcaatttgcaagtaaaggatgcaatggtggtgtcctccagacccaaagccacaacccatcgcaagtcaagaacactttccagaagataaacatgagtgggttcatgtctctctccttcaaagccaggacaaaatccccacttctttgctgccgcgagtcaatttgtgatttattttgtctgcacctgtttgatgccaggtcgacatttcctaaggcaagcccctgtatttgttgtggatttaagtggaggcggccagcacacaccttggatgtaatttaaaaccatttcctgaggaaagatgtgtgatatgctttcctttgtttagcaaatgtttatggttttaactttaaatctcaccgcaaatcacttacacttgaaaacagggctggtctgaaagtaattaccctccctgagtgccaagacctccagaagttgttttcattcccgaatggcaatcactgtactcatgcgctccacgcatcttaaataaactcagttcaaagcacatgcctcctgcttcagctcttttttccaaaaagagaaacagaagcaggttccccctccttttatagtgcctgcgtggacacgcggacctccatgcctttcatgctgtggctatgtcagcaaactacgatattgggatgatcctaacgggcaagccagctgcggctcctaccggccgtggccattgaaggccaccatgttgctttgaaacatctcaaagaataacatagtgccagccagcaagggtttcaccatatgcatgacccagacaggaactatcaaaagaagggatcacgggaaggtgcatgatgctaatgtggaatccagaggagctctttcctgatctcttcagcttccgctgccactccagaatcatcagagctgatattaaataagttaaaatgttagtccaccgtctcctcctgcaatcctaaccatcttttgagactgttagaatactttgacgggttgtctttctgtgcaactaatttaaacctcaagtttagtgtaggagatgggtttgtcttctcacctcttcagatctttatcaagggggaataaaagccaacccagaaacctaaactttaaaatttaattatttgaaataataaaacagaagaagggatcaacatttgtcggaattggcactcttggaaaactaagtctaggagatcatatattgctttttttttttcattctaaattacttttaattgaaagtcaagatgctgagttacagttgtttatcattataataagcaaactttttaagttggatttcttcttaaagaggtaaactagtgaacaaaaaagataaaaaggaaaattaagaatcaactatgcctttatcaaatttgaagcataagttatattattaaaattatttttgtataatcaaggtgataagacattctggaaaacatttaatgtatttagtacttagaatatttacagtggatgttacttttttgaaacgatatatttttcccaatttttctatcatgtcaaggaaggaaactgttaagaagttaccagtgtccaaaatgtcttcattgtttcttactcatacttacacctcacatgacctgcccagccctctttggttcagttcattcccagaagccaagccttagtcttcacagatgagcgacacacacctctgaatataatgtctcttttttgttttttccttttcagccaaggaaacaaggataaatggctcataccccgaaggcagttcctagacacatgggaaatttccctcaccaaagagcaattaagaaaacaaaaacagaaacacatagtatttgcactttgtactttaaatgtaaattcactttgtagaaatgagctatttaaacagactgttttaatctgtgaaaatggagagctggcttcagaaaattaatcacatacaatgtatgtgtcctcttttgaccttggaaatctgtatgtggtggagaagtatttgaatgcatttaggcttaatttcttcgccttccacatgttaacagtagagctctatgcactccggctgcaatcgtatggctttctctaacccctgcagtcacttccagatgcctgtgcttacagcattgtggaatcatgttggaagctccacatgtccatggaagtttgtgatgtacggccgaccctacaggcagttaacatgcatgggctggtttgtttcttgggattttctgttagtttgtcttgttttgctttccagagatcttgctcatacaatgaatcacgcaaccactaaagctatccagttaagtgcaggtagttcccctggaggaaataatattttcaaactgtcgttggtgtgatactttggctcaaaggatctttgcttttccattttaagcttctgttttgagttttgccctggggcttgaatgagtcccagagagtcgttcggatggtgggaggctgcctaggaggcagtaaatccagtcacagtgcctgggaggggcccatccttccaaaatgtaaatccagtcgcggtgtgaccgagctggctaacaggcttgtctgcctggttttcctcctacacgtggacattattctcctgatcctcctacctggtccaccccagggctaccggaaggtaaaatcttcacctgaaccaattatgagcagtctccttactgaaggtacagccggatacgtggtgcccccggggctggtgttggcagccggggggaggtgcctgagggtccccacggttcctttctgcttttctgaatgcatcaagggtacgagaacttgccaatgggaaattcatccgagtggcactggcagagaaggataggagtggaatgcccacacagtgaccaacagaactggtctgcgtgcataaccagctgccaccctcaggcctgggccccagagctcagggcacccagtgtcttaaggaaccatttggaggacagtctgagagcaggaacttcaagctgtgattctatctcggctcagacttttggttggaaaaagatcttcatggccccaaatcccctgagacatgccttgtagaatgattttgtgatgttgtgatgcttgtggagcatcgcgtaaggcttcttgcttatttaaactgtgcaaggtaaaaatcaagcctttggagccacagaaccagctcaagtacatgccaatgttgtttaagaaacagttatgatcctaaactttttggataatcttttatatttctgacctttgaatttaatcattgttcttagattaaaataaaatatgctattgaaactata

SEQ ID NO: 7494 - DNA, 5958 bp, Homo sapiens
ttcctggtggtcagatgaaagggcagattaaatggactcatcagggtaagaggaataatatgggtaaaacaagaaatggcccgatagtttcacactattcctatacctccaggtccggaagacaggtaaaaaattctataatgtaagaatggaggtagttaccctgatttgaccctgtgtgggaaatgctgaaagcaccaggaggaagccggttcccgtgagataagttaacccggcctgacagaatcaagaaaattgagatgagatttgaaaggacccgaaaatgcaggggttggctttctgactgggaacttaaaaatcactcttcatgcttccctggtcctatgtgataacagagttagagacttgagtctgatttcagtcatcttcagggaccagtctgatgttgtagcaagaagactccctttaaaagtgttactgttcaaatcatatatcaggttgaatcacattcaacagagatatattctagaatacttttttagaagaggctaataaagggaagaattatattgaatggaattatttttgataatgagaattatttgggtagattcactgaggctatgtcaacatgatatttagaccaacaggtgatcaatgtttggaaaatacaacaatgacttatttaaaaattacccttcctgctatttagacaaaaacaactgatcagtggttctgttatgtcagctgactttgttagtatcatgttgaaatagcttgaagtaatatcttttatccccttgcaaattcttgtcttccaatcatctcccatatattttcataattagttgtttatgacacctttgtttttctccctctgttcagtatttcaaggaaaattatggatgccagtcttggctgcacaagatatccattacgtacttatacattttaaaatgagtactaattttcactgctaataattctgtaaggacacatcaaagctggccaaaataatgaattttttttaaaaagcaatacctggtttccaccttggactgactttgatcctgttccacttttgaaattttatttgttccttttccatcgtggatgttcctctactttggcaattgtggagggctaatcaatcttatgttagcaggacaacccatgaaaaacaagtcagagagtgaaggctttttcccctaatcctggcagagcagggcgtagaaaagagaggatgtccgtgcttaattctagatacttttgagacaacaccttcagaaaacacataatttaatctttgccatccttagatagagaagggctatagatcacatacgttatcaaaaactactcccttggaaaaaatatctttcgaaaatcaaatttaaacatttcactctgtgctgcatatttcttttaccattgaccattattatagggacccatgaagtaaatgtcacaatcatcttactagctctctctctctcagcaaaataaaactgtgatgtgtcttctttgtaaaagtttaggtataaaatgctatgcaactttttctttatagtaagagctttattttctttaataatatagcccaacttatatgttttaatctcccttgtccctcagaataagcagaaaatataactgcagctgtatgtcgtagacacaagaattgaaactgtgcagtcagtagagctgaacttagctatgaattaatttaaattaattctaaagtgactctggtttccattttagtctattagctagagggttttggctgttgctttttttaaagttaggtccacacagtgaagggaaaagagtctgtgaaggtgatcagtgtagcagtaagacatctaaaatcaagacaatgacatgggggctttgtgtacttagctggataattcccttctactgtcctcttccccttggctgtgtagataaaattgtgcattcaaatgatggtactttgacttttgagggtttttatttctgttattcacaaaatactcattctcatttatgtatattgtatgtttaacccccagtgggatttctggctgctgaaaccactttgggccaggaagaacaaggatgaagaggttcctgtcatttcttatggggttcacagaattatttggggcttaaatggtacaatggagacagtcatgtgcaatgcttaagatggtctgacagggtcccttttgctggaggtgttcctgaagagattgaacctagtaacaggctttattttcaccttgtgtacaacatggcaaagactgctaagattaaaatccgtctcccatttgttacagcctcacctgcaccaggatagaaagcacgtgatggaatctgtgatgtctaatgtgtcttatgaaaattgccaaacaactgtccctggggattctgctttgattggcatttttagtcatgggaatgtatatttgctgatatatctgctctgtgtttgggcctctcttgctgtcattatgatgtattttgagatgattagtcaagagtcaaggttgcgagtacaggccaagaccatgggaaaaaaagccatgctcactggccaataaagagcttgatgctgcctggccaaatgaggtgactcagatagaatctgatcccattcagagcttggtaaatgtcactgtacagaagacattgaaaaggaagaggcatagtcatgatcaaaaggatatattgacagttatctatagccagggtagttgttaatacctgcttgtttggggagatatgtttgattatagagagactctgggccaccctcaaacaccgtcagatgcattagcagcccactgcatgggacaatcgcaggcagatacgaggaatgtatcccctgcctattttccttgtgtaacaaatggaaaacattctcccctgtgagaaataatgcaatttctaattatctggatgttcgttgaaaatatattagacattctccctgaggttaaaaacaaaaagtacgtgaccagtttggtaagaagtattaatgaagtagctaatattacagcttcattttctactaccacctatcataatggtcttagtcatttcacacaaatcagaacttccttccccaccagggaggacaacatcttcatgctgtgattgaagcatccattcagaacacgaggcaatattgcagtccacagggaatggatgcttcacttgatctccggaccttggctgcagaggccatcgcagcttttgaaaagtgaaggggttaattcccattggtgtctttgcttatagcatttttctctaacctataacaaggagacattacattttactttagaacatgagaatagcagttttgctcatgacttaccattccagctgcatgggaaagcaaagcagaaaacagtgccccaaatggaaaaaagatactcacacagaacaaaacagttcttggtcttgttcttggtcttgtcaaaccttgcctgatgctctttctaaagtcaaaatatgaatgctaagaaggcataacctacatccttctctgatttcttcagcagggtcaaaagacagttactagcaatggggaatgcttgtcactgtggagaaagagttttgtatatgtctgataccgttgttataacaaaacaaatttttttactatagttttttgttttctacctgcacacccaccagaagagcacaaagcaaggccattgcaacaggcatttaaaaattattatcaaacatgcacatgcttgtacacacacacacacacacacacaaacaggggcatttgtaaaggtgtccctggaatgtaagatttataatgtttaaggcaaggtgaaggcattgccaagtgtgtgtcgctcataggactagtgtatattcactgaaagttaacctgatgatttgttattgtttgaaccatatgctgatttgcttctggtttctgtttagtgtgttctctctgataaggggctgaaagattctgcatcacacatcctctgagacctaccatgtcgcacactttgttaatgacaaacttcactctacactatacagtaccttgttgatatattcagtaaagtcttattttaaaagaaaaccacattgtgtttatctgagtaagttcattgggatacagtcaatacttgtgctgttaatgtagaagaaatgacgcaggagggcaggaataaaagaggtaataggactttcgtattctcctatcatgaatatgacttgcatttctaaaggccatttgatcctttttgtgtgaggagtttatatgaaatcctcatgttcttttaaatttcccaactaaattgtgtgttcctacgaataccttttaggtatgcacacatacacagagcatcttattttatactggtgaaatctatgttgtttaggatacagataatgtcattgtatttatcctatcagaataggcttttcccctatttcaaaatagatgctattggctttattttttatttttaaattttttttaaacacggtcttaccatgttgcccaggctggtctcaaactcctagatgcaagcaatcatcccacctcgatcacccaaagtgctgggagtacaggcagaggacaccatgcccagccacgctattggttttaaatgtcagatttctttaagaattctcatagtacttttctgccgcagaatttatagcacatctgtccatcctttcaataggcactcaaggaaatgtatctattcatatgctcaacttcaattgattagtctcatatgatttttcagaaccccttttgctaacccctcttggccatttcattaataatgtatttgacagagattgaatcaggaaataaattcatgacatttcagttaactagtattacctgtttgtagaatctctgttggaacattgactatgaaagacagtgctaacaagtaattcatattacttttggggattttatgtaaagtaacatctatgctattcttgggtacttttgccaagagttacagaccttattctatacagactaaaccattagtcaaaaaataccattcattcaaaataattcattaatgtcctcctactctgttccaaacactaggctgagttcagaggcctcacagaatagtgaaatgcgttcttagccaaatcaggcaaatcttctccctcactatgtccctgaagaaatctcttcatctgatatatttactattcatctactttctacagcactatgttagggtcttccggggattcagagaaaagtgtctgtgagccattaagaaactcacagatcaggtaataaacactttttctaatgcattccagtgtctcagagcctgcataatcactttatactacttcattaaattgacaggacatctaaggtgacaaaagagatgtttctacctgttggtaaggttgatgcaactgtcataattagatgttcttggtttttaatagatgcagcaatgagagagtacattgctaaagtcagaacttaatttgaattaaattttcaagtttccaccaagtatttgaaaacttagaaattgtatttcgtaattacacatgcagacatttaaatttttattaagcaccacgatggaactcaatctaaaggaataatggcacctgataattactaacaacctttgtttatataagaccttgtgcaaactgtgtgataacgtatgtttgcattctgtctttaaaataaccctgtaaggtgcgttattttaatttttagattttaaaacttagcttcaagagaaattaagtgattagtctatagctacaaatcctgtaaatggcagagtcaggaattaccactgagcatgactccatggactcttaattgttttcctgcctcttaataaattgaccatccttgagactgactagccttcagatttttcatgatggagctatcataacttctcagtggatacatatattatcatttatggcaaataaagggaacattttagaagcctc

SEQ ID NO: 7495 - DNA, 2545 bp, Homo sapiens
ttgggcttgtgttgacacggctgataacttgccatcacctgttgccagtgtggaaaaattctccctgttgaattttttgcacatggaggacagcagcaaagagggcaacacaggctgataagaccagagacagcagggagattattttaccatacgccctcaggacgttccctctagctggagttctggacttcaacagaaccccatccagtcattttgattttgctgtttattttttttttctttttctttttcccaccacattgtattttatttccgtacttcagaaatgggcctacagaccacaaagtggcccagccatggggcttttttcctgaagtcttggcttatcatttccctggggctctactcacaggtgtccaaactcctggcctgccctagtgtgtgccgctgcgacaggaactttgtctactgtaatgagcgaagcttgacctcagtgcctcttgggatcccggagggcgtaactgtactctacctccacaacaaccaaattaataatgctggatttcctgcagaactgcacaatgtacagtcggtgcacacggtctacctgtatggcaaccaactggacgaattccccatgaaccttcccaagaatgtcagagttctccatttgcaggaaaacaatattcagaccatttcacgggctgctcttgcccagctcttgaagcttgaagagctgcacctggatgacaactccatatccacagtgggggtggaagacggggccttccgggaggctattagcctcaaattgttgtttttgtctaagaatcacctgagcagtgtgcctgttgggcttcctgtggacttgcaagagctgagagtggatgaaaatcgaattgctgtcatatccgacatggccttccagaatctcacgagcttggagcgtcttattgtggacgggaacctcctgaccaacaagggtatcgccgagggcaccttcagccatctcaccaagctcaaggaattttcaattgtacgtaattcgctgtcccaccctcctcccgatctcccaggtacgcatctgatcaggctctatttgcaggacaaccagataaaccacattcctttgacagccttctcaaatctgcgtaagctggaacggctggatatatccaacaaccaactgcggatgctgactcaaggggtttttgataatctctccaacctgaagcagctcactgctcggaataacccttggttttgtgactgcagtattaaatgggtcacagaatggctcaaatatatcccttcatctctcaacgtgcggggtttcatgtgccaaggtcctgaacaagtccgggggatggccgtcagggaattaaatatgaatcttttgtcctgtcccaccacgacccccggcctgcctctcttcaccccagccccaagtacagcttctccgaccactcagcctcccaccctctctattccaaaccctagcagaagctacacgcctccaactcctaccacatcgaaacttcccacgattcctgactgggatggcagagaaagagtgaccccacctatttctgaacggatccagctctctatccattttgtgaatgatacttccattcaagtcagctggctctctctcttcaccgtgatggcatacaaactcacatgggtgaaaatgggccacagtttagtagggggcatcgttcaggagcgcatagtcagcggtgagaagcaacacctgagcctggttaacttagagccccgatccacctatcggatttgtttagtgccactggatgcttttaactaccgcgcggtagaagacaccatttgttcagaggccaccacccatgcctcctatctgaacaacggcagcaacacagcgtccagccatgagcagacgacgtcccacagcatgggctccccctttctgctggcgggcttgatcgggggcgcggtgatatttgtgctggtggtcttgctcagcgtcttttgctggcatatgcacaaaaaggggcgctacacctcccagaagtggaaatacaaccggggccggcggaaagatgattattgcgaggcaggcaccaagaaggacaactccatcctggagatgacagaaaccagttttcagatcgtctccttaaataacgatcaactccttaaaggagatttcagactgcagcccatttacaccccaaatgggggcattaattacacagactgccatatccccaacaacatgcgatactgcaacagcagcgtgccagacctggagcactgccatacgtgacagccagaggcccagcgttatcaaggcggacaattagactcttgagaacacactcgtgtgtgcacataaagacacgcagattacatttgataaatgttacacagatgcatttgtgcatttgaatactctgtaatttatacggtgtactatataatgggatttaaaaaaagtgctatcttttctatttcaagttaattacaaacagttttgtaactctttgctttttaaatcttaaaaaaaaaaaagttgctgaagtactgtacagggttgtac

SEQ ID NO: 7496 - DNA, 13862 bp, Homo sapiens
ttcagaaccaggagaggaagcacaggacgtatgtctatgtgctcattgtcactgaagtgctggaagactgggaagattcagttaacattggtaagccatctccagacagcctggaaagggttcctcacaaccagcccttgccatgccacaggtcatgaccagaaccagaaacaagagcgtaccaggctcagtggctcacacctataaccccagtactttggaaggccaacacaggaggatcacctgagcccagagttctagaccagtcttggcaacctagtaagacctcatctctacaaaaatcagaagacttagctcggcgtggtggcacatgcctgtggtcgcagcttctcaggaggctgaagcaggaagatcatttgtgcttgggagtttgaggtcacattgagccataatcatgccactgcactccagcctaggcaacagagtgagactctgtctcaaaaacaaacaaaaaaacagaacaacaagagctggataaagaatagaaataattgaaggatgtgtataataaaacaagcatgtacattttgaacctgatagtattttgaaatgtttaaatggaatctgaagtgagtacatggtccacaaatagaagcatgacccctaaaaataagaaatgttgcttctaaaatcaaactgggtccttgccaaaagggctatacttctgcacctcctgagcagatactgattgagggcctccgccatgccaggctcactgctggccatggggaccataagtgagagcaggaccctggtcttgttcctcatgacatttatattgttgagaaaactgttggtttggtggtgtgagtccctccagaaatcatttagtagatacagaatagtgcaggtggtttctagttttattcttataaaatatgaatatatctataatatatatttttatattttttcatattttatatgaatataaaaatgataaaatttatgaacttttacaaaaggtgctgtgtgtaccctttaggtacacccaactttctcccaaaggagccattttctttgatctcagatggctgttacgtttacatctttggaactataaactgtggtggtacaaaggttggttcatggtttgattgtttacttctgaaggaaagtatattctagaaaggagaacactaatttccattacaaattggcagacagataaaatttatttgccaacattctcactttaatgttagtgtttgccttgccgccatgcccctcacattgttactctgggcagttcgtagccctttggctcttgatggctttgtgtctagtaataatgcagggtgctcaaggaaataaattcagtgtggatatactgaaaacagactccctaacaggtgtgctagagcttgaaaaggagactgcggtggatgtgtggtgtggccctatcctcagagcactctctgtcaggcaggagtcatacacttgtgatactaatttttttaggtaccattgctctattaatattcaaacaagcctttcaccttgtactcccacttctgagaattgaccctaatgaaataatctaaaatatgacaagctatggagccttccttcagatgatcttactaccattattcttactggttaaaatttgcatcttaaatatataactcaatgaatgacaaatcaatgaatgacatgtgtccgatggaatgttatacagctgttaaacaccatagtttaacaccaccctgttaaactgcagttgcagtggctcacgcctgtaatcccagcgctttgggaggctgaggcaggcgaatcacttgaggtcaggagttcgagaccagcctggccaacatggtgaaaccccatctctactaaaaatacaaaaattagccaggcatggtggcacacacctgtaatttcagctactcaggaagctgaggcaggagaataacttgaacctaggaggtggaggttgcagtgagccaagaatacaccaatgcactccagcctgggcaacagataagactgtttcaaaaaaaaaaatttttgtcaatgttaaagaaaagctaatattggcaggaatgtggtgagactgacatcctgacatacacaagcaggactggggatcagtgtcgcctttctgtaaagcacttttgcagtataaatcaggagcccttgaaagttcagaagctctatttttgtagttcttgtgctagatatctttccctagaaggttaaaaagaaagaaaaaacggggaacgttttaaaaaaatagcattatttataataattaaaatcactgggcatggtggatcacgtttgtaatcccagcactttgggaggccaaggcgggtgaatcacttgaggtcaggagttcgagaccagcctgtccaacatgctgaaaccccatctctactaaaaatacaaaaattagctgggcgtggtggtgtgcacctgtagtcccagctacttgggggctgaggcaggagaattgcttgaacccgggaggcggagattgcagtgagctaagataacgccactgcactccagcctgcatgacggagtgagcctccgtctcaataaataaacaaaaattagctgggtgtggttgtgggcgcctgtaatcccagctacttgagaggctgagccatgagaattgcttgagcctgggaggcagaggttgcagtgagccgggatcacatcgctgtactccagcctgggtgacagactgagactctgtctcaataataataataataataatcacagacaattgatgtccagtgatatggaaatgcttaagtgaatgataatacatccatactagatactatgacataatgcagccataaatgtcttaaaaaaaaagacagtctcactctgttgtccagactggagtacagtggcatgatcacagctcactgcagcctcaacctcctgggttcaagcagtcctcctgccttagcctttctagcaatggcaatgtctcatatttttttcataatatagattgcttaagaaatagtgtgacataggacaggtgtggtggctcatgcctgtaattccaagtactttgggaggctaaggcaggaggatcacttgaggccaggaatttgagacctcatttataccaaaaaaaaaaaaaaaaaaaagaagcagcagcaggtgtggcacgtgcttgtagtcctagctacttggaaggctggggcaggaagatccctcgtgttcgggagcttgagtttgcagtgaactatgatcataccactgcaatccagcctgtgagatcctatctctggaaaaaaaaaaaagagagaaagaaaaagaaaagaaaaaataacatgaagtaaaaaccagtaacaaaaattaaaaagcaaattcagcagcacattcttttagcagccagttactcttcaggtgctttccatactaatagtcataacagacttgtgagataggccctatttattgtctgttttatagatgaggaaaatggagcaggaacacagctacctgaggctgcacagctcattggagccatttatgtgattggagcccagcactttggcttcagagtccttgttcctgaccataacactctagcagagctggtcaggattcagagtacctgaaagcatgatccaattttggttgtctcaagattgtttctttttcaagtatatgaaaaaagggcagttgtgctagggtattgagagtggttttttctggtttataagattatgggtagttattacttttataagataaaaaatataaaggattttaaagcatggactagaaaagagtaagaaaatagactgaaaaataaaagtgtgattgtattgagattatttttacttcttttaagaaatattttctattatgtagataaattcactcttataagaaaacttttaaatgaattactgattacaaaccagccatcctagtaattctggaagctgatgctcgtgttgatttttccccccttgggacagggtctcactctgtcaccctgctggagtgcagtggcgcgatgacagctcactgcagccgcgaccttccgggctcaggtgatcctcccacctcagcctcctgggtagctgggagtacaggcacatgctaccatgcccagctaatttttgtattttttgtagagacagagttttgccatgttgctcaggccagtctcaaactcctgggctcaagcgatccgcccaccttagcctcctaaagtgctgggattgtaggcgtgagccacctcatccggccctcatgtcagtttttacaggagatggggatgctgctgggctttgatccctatgtatgtgcaagcaaggaaagctcagagacgcaggagggcaggaggaaaacactagccgtagttctctctggagggcaggttttacacaattactcttagctctttggttttcaggtttctcacctttctgcattagacattgatataatatttgaagcatatgaagtgtgcttgagttatttttgtaaggaaaaaaagtgttaagaaacattgctttaatgttttctatattttctcaaaagttctaggctcagaaaccttattactcttgtactagtttcttttctctctgcctccacaggaaggaagagggaatggtttaaaatagaagacgccataaaagtgctgcagtatcacaaacccgtgcaggcatcatattttgaaacattgaggcaaggctactcagccaacaatggcaccccagtcgtggccaccacatactcggtttctgctcagagctcgatgtcaggcatcagatgactgaagacttcctgtaagagaaatggaaattggaaactagactgaagtgcaaatcttccctctcaccctggctctttccacttctcacaggcctcctctttcaaataaggcatggtgggcagcaaagaaagggtgtattgataatgttgctgtttggtgttaagtgatggggctttttcttctgtttttattgagggtgggggttgggtgtgtaatttgtaagtacttttgtgcatgatctgtccctccctcttcccacccctgcagtcctctgaagagaggccaacagccttcccctgccttggattctgaagtgttcctgtttgtcttatcctggccctggccagacgttttctttgatttttaattttttttttttattaaaagataccagtatgagatgaaaacttccaataatttgtcctataatgtgctgtacagttcagtagagtggtcactttcactgcagtatacatttatctacacattatatatcggacatataatatgtaaataaatgacttctagaaagagaaatttgtttaatttttcaaggtttttttctcttttaatttgggcatttctagaattgagagcctcacaattaacatacctttttgttttcgatgctagtggctgggcaggttgccctgtcctttctctatttcccagtcattgactgtagatatgggaagagtttagctaccttcatagtgctcccaggactcatggcctttccttctttaagctgtatttccctgcccagaaagaaacaggaagaaacctttttttatttttttatttttttttaaccaagcaaggagcaaatggcctcagcccagatctgtaaaaacaatgatagaaattgaattctgccccacatgttgacagtagagttggaactggattcttgggattacttatctaaaaaactggagcatcaggtccatttctgttctgctggtttggaatcttttccgtaatgctatttattgccaacaatggcctctctttgtgtccatatatgccttacaccgtgctgacctgggtatcgtccatgtgctctgaagcatccaactttactttgcaggtgcatcaatgtagtcctgtccctgaactgagtaaccgtgttcctgaaaagtacactagggaaattcacctgcttgcttgtctttgtattggcatggcacttgtgattgcaccatggagcatgctcagagctattaaattggtctcccatctcccaccaggatatgaaaggtccatatgggaggccacgtaatcacttattacagtggttacataatacactggctcactgcagactctcttgttttttgatacagtttcgtgctggcttcatttgccaattgtgttgtttagttcggaagtaagagggtcttgagattgaggggtagggagggctacactgactgatccgtggcttaagacaggagattatctctgtactccagtggcatctccttagccaagatgtgaaattaaaatcatagttcgcctcatttaaaaattctaataaagcactcaaactttgaaaagcttttacttttccctcctactaaaagaaatgtatgtacctcatagccctgtgtcatttagtgttcagcacttttgggaacatcagttggtgaactttaaattttgctgtctactcactgggcacggtggctcacacctgtaatcccagcactttgggaggctgaggcaggtggatcacctgaggtcaggagtttgagaccagcctgaccaacatggtgaaaccccgtctctactaaaaatgcagaaattaggtgggcgcctgtaatcccagctacttgggaggctgaggcgagataatcgcttgaacctgggaggcagaggttgcagtgagccgagattgcaccactgtcgtccagcctgggtgataagagtgaaactccatctcaaaaaaaaaaaaaaaaaattttttttttttttttgctatatactcttagtttacatcctctcccccaatcttcacacacagagccaaagagcagttatattcttgggataccatgatacctctgggaaaggaattatattcccaaggagaggtcccattggataagaacaataccatgggacttgagtctgaatgccaacttactattcacacatccttcttaaaaacgaacacactgtttcttttcctgacctagagcattctaaagttctgttcaaataaataaagggcaaaataaagtagatttaaccaagtgccaggtggaattcaaaaaacacattcttccagataaattctacctttatggtatggatttgaaagtactttgcaggaaaacagtcagtactctttaaaaagggactgcagggctgggtgtagtggctcacacctgtaatcccagcactttgggaggccaaggcaggtgggtcacttgaggccaggagtttgagaccagcctgaccaacatggcaaaaccccatctctactaaaatacaaaaattagctgggcatgatggtgcactcctgtaatcccagctacttggtaggctgaagcatgagaattgcttaaacctgggaggcagaggttgcagtaagccaagatcatgccactgcactccagcctgggcaacagagtaagactctgtcttaataaataaataagaaaataaaacggaactgcagtgctaacagtaatttatacatttttaaatgttctgagtatgttttgactgggctagtgtaacaatatactaccctgaaagtgcagttttgattgttgttggtgtctttgggtcaggaaagtgaactgtgccaagaagtatttttcagtgacatgaatggattcctgttaatgcaattgactgagagattgtgcttacgctttcttaactgacaaaaagaggctttgtccaacatcagaattgttgaaactggtgctgttttctgttgcactgggattctgatgatctgggattttccctccttggcacagtaaacaccatgactgtctttattgagaatgtcgtcacagtcctttagtgatagattagttagacccatggttgcaatacctttatctccccaaagaaaataatcaaaagaaagcacaaaagctaccctgtttgcagaatatttcactgacattgatttgtcattaattctaccagagctgacctcattcaggcttgatagaaacaggttcctatgtttagggcagatccctagcctctcgctcacagtgagtctgcatgtcctagattctggttattgctggagcatccattaaagtctaccaaactcaggacagaagaagatagcagtggatttgtaaaaatttttagtttataaattacagtcattggggaaacactagtaaggtcatgtgatcttttggaccaggattttctctctgtcttctctctgggtgtgtgtgtgtgtgtatgtacagaagggctaccaggaagtgtcaaccatgttagattttctgtagtcttccagaaacagtgcagcccatacaacaggaatcttaattttcctcacagcaaatataacaggatggaacagttagtgttttgttttcacaagtgtccaccactccatctgccctgcatggagagggctctctcactgctagatctaggctgagccatctggaaggatcaaagggtgtgggagtatcaccccctctcaggctgcagaaggtctcgagggtggcgtcacagcaggatttccgccttctgcattgcactgcacagccccatggaacatgaggcacttgaggccttgcttcttggagcctctggggagcagagtaggtcactgccctctgggagtgttttgcagtagttttgtaaatgtgttgctacatagtcaagttcctttgtggcaaagaaatattttgttttgatattaggagccagcccatgtaatgcctctcaggcttgcttgcttagaagaaaaaagtcaccctttgtggtttttaagaaaaaaattctgtgcagatctgttcctcctcctgctccttcccttttctctacatacagtgctcattggaggctcctgctaaaccttcttaaccagagaaataataggtatttgttagacctgagtgtacatttcacatgttatccttcacatatttctcattttcatctagtactttcttaatgcctttgttggagtccgcatcctcatctttaaaaaaaaaaaaaaaaaaacagcttagcctaagccacattcactttttttagttcacaaaaaggatttaatagccacaatgtgatttttgccacaactgtgtgattttaatattctctaatatcaagggcggatttagaattgcaggaaatacctggagaaatcacagtggaatgaatttttgctttaagagaaatgagagttggctgtctctgtaattgataatacagcttcatcctagtcccatctgcatttcagaaaataaccctcatctttacaaaacacaggacacttgtgggacagttaactcaagcagctatggggagggaggagattattgaatggtgattaaataatgcaaatggctcttctgtttcttaaagactgtggaagaggtcagactgcccagttgaggtgggcagttcatactgctcagttgaggtggcagtcatttattctgagtcctgttggatagagcctatctcctcaaggctacagaggcttccaggatatggagctgtgcatgttaatggctcagccttgcctccatcagggcacctgcctaacttggagcaagtgggagagcaccctagagtcatcctctgtgctgtttcgtgagttttgcagcggagacttcaccatccggaggagctgtgtttctgtgtcacttgggatatcacctaaaaatgaaacatttgatattttaaggtataaaaaaaaagtaaattggggaacattggctgcagtccctaaaagatactgttgtctgtgcatcaggttagcttgaggtcaccacaggtcctgggagcccagagagtttaggcatactctcctttggaggccagcagcctttcacaaaccctgcctctaaaagggcggtttcacatttgaccatgtttttgcattagcctcagaaactcttgtctttagctgataacctttgagggatgtgagaagcctagttggagcatctgagaaaatgatacctctcaccttcaaattaatcaaatagtttgtccttctagtccccttataaattaataaatggagggctggtcatggtggctcacgcctgtaatcccagcactttgggaggccgaggcgggtggatcacaaggtcaggagttcaagaccagcctgaccaatatggtgaaaccccatctctactaaaaatacaaaaattagccaggtgtagtggcacgctcctgtagtcccagctactcgggaggctgaggcaggagaatcgcttgaacccaggaggtggatgttgcagtgagccgagatcccgccactgcactgcagcctaggcgacagagcaagactccgtctcaaaaaaaaaaaaaaaaaaaagaaaagggaagggaatcccattttgtgatgatttgggcacactacttgagctgaggctagcagtcacatgattttggctgtctctgacctgaagcttttgaagtaaggttatgtctcttccctgaagctttgtttatagtggtaatttggtgagtttgagctttgagcttgtcttagaaaataagactgtccacctggggaggggagcttatagggaacccgtgttaactcagaatgctgaagaaagtgcttttagccaacaaaagtaagattactatctagaaggtggaaagaagtcattgcttctgttcctccagcagtcagttgactctaggtttcctttggtttatatccccagttcttaatactaaaacttatttgacttcctatcaggaagcacacaaaaaaagcgtcatttaaaaccctggatataggctttaaaggatacaaaaacagcagcattgtcgttttgccaggttcatcaccattttgatgtgctacccatccttccaccctccctttcctgcccccaagcctcccagccaggccagatgtgaagattctattaatcactgtttcagagaacattaattcttgtatagaataattatctactaaattgcttattatctgtgactaccttgcagagaacatctcaacagtgcagtaaaatagctctcctagacttgagcttccagccaggcatttagatcactcttaagcctttgtggaattctgaggaaaaaaagcaagatgcctcaatgccaatgctgggccataagattctactcccctccctgtagggtggggcgcgtggctcagctttggaaaatcattttgccagtaatattgcctgtgaatccctttaagaagtcgtcctgatctgagcctgtctttctgagcactttggtgctgaattgaaaatggtaagctaaagcagtgacagatccacgtagcctctttaacctctttattatcttgccaaaaaaaaagtttctcaggttaaacctttgtctttaacctccctttgttgtggagaaaatgtgtcactaatcagtggtccaagggatatctagctttggttactcagttcctgcagcataacagatatgacttatgccagggaaggtagaggctgattatggagacacccaggaacaggaataagaagggataggtctgctccacgtagaacctccccagatcggaagttaagtcttggagagtttccaaagtgctgaagtaaaaaggagacttggagggcctttgcttaatgagcaagaggcttgtgtcctcccaagaacatgagggagttcagaagggagctatagctcacagacagaaacctgcccgctcaccccatccctcgtgactgggagcatgtttgctcagaattttctaagaggactctcccttcaaaaatccaatttgctcccagaatgttgtttagcctctgagaatctcactctttcatttccatctgtgaatggacatagatgtgttgctcagggatcagaaacatcagagtccagggcccagtggcatggtgttgcattagtagttagaaaagtaattggtcagctctactgtaaaagaaataagtatgtagtacagttttgtaaatgtcaggtctgttctattgttttgtgatctgaagactgtcaaactggttgataatcaaagaaaaggttggtggttagaataagtaaaatttcagttagaaagatatagcttaccagttttccatgtgcttaaggaagtcaagaatatttcaggttgttgagaactgttgtaaaatggaattgaagctagtgtctctcaccttcttaggtgtatcagagagaggaagtggaaggccagtagtagcatcttcatacttacttttgccagcccagcctccatttcaaagactttgtcttccatcctatccaatgacatggtcagggatgggctctgaggaggcagtgaggccccaccttggtttgctccactgtggtgtgtagtctccaaacagcttaagggtttttaagttttctcacgattacctccactccactcatctactatcagcatcagaaaggttaacatccctgggaccattctacttataaaagagatgaactagtgtgctttctccccttttccaggtgtgccatccatatacaatctcctcttggccaagttcaacaaatgtttccagggaaccccgtgggttgaggcaaagtagccaagatgtattgagttaagtttttctagaggacaaaagtatttcttgtcccttttccctcatgctcatatgttttagctgaggcgtaaatggccaagttgagtaatatctgtggaactgagacagagagccagggacccatgtacccagggaccagtcccctggggaatcacacagtggctcagactagactgctctatcccaccagaactctgctgctgttcatttccatcaggaccacccaggaaagcaaataagttagccttctcatcattaggtcacctaatctcttgggttgcaggatgagagcatatatagatctcctgtttagagagtgtgttcataattgtagaaagggatagaaaatggaataaccaagaggctgtgtcattttttaagaggatggcaaggatgacctcaaatgagctcaacaaaactgggaatccaaggaatggtgcttgtagggaaagagaggtcagttgtggtccttaaacctcttggcaccttgtgcgggttataaaacaaggagctggagtaaaattgcccttacccccaatccaaatgctgtccaggatttaggagctacccaacctgtggttatatggtgttggtttccattttttgtttgtttgcttgtttccaaaatagccttgcttggtactgcatggaaagttcaagcttttcttcttgcccgctcagggctggcctcttccccgtgtcttcacagcgtccctaaggaagatttttgcagcactctctggagctgaggggagtgaaatttggtccagagaaggcggaaggaaatagttttcctgtttccttttctcgaggtggatgtcctcaggcttccttcacacctccttctcatgggtgcggctggcagtacagtcaggctgtggaggagggctgagaagaaaggggcactggtccagccccaggtttggtctgagacaggtacacagcagataccatcccaccttcctctctaaagaacaggccagccacacatataaccctttccctactttactaatgtatcccttatgtggtaccagcaatggaggacaggcagacttaccccctgccatctagagagaatgttgttattacccgtaaaacttgaccacccccatatcccactcctttttgtaaaaacaaatgcttaaacctgtgagcctgccgttcctttctatgtgttaatcagtttccttccatttgagctgtgtgggagggaagggcattgaaattgtaggttgtaatcttgtgccaaccaataaaaaccagtatttcacacacat

SEQ ID NO: 7497 - DNA, 13186 bp, Homo sapiens
aggctggagtaaaagggacattgggaagattagttggaatttttgaggtaagtctgttaaaatctttggtacaaatgatatgtattaataaccacacagatattaacataggaaaaatgccatttctgtttcagcgagtttttttttttttagttatttttaactttttgagacaaggtctcactctcgcccaggctggagtgcagtggcacagtcatagctcactgcagccttgaactcctgggctcaagcagtcttctgcatcagcctcccaggtaggtgagactacatggatacaccaccatccttctaaatttttaaattttttgtagagacagggtcttgccatgttgcccaggctggtctcaaactcctgcgtttaagcgatcctcctgcctcagcctcccaaaatgccaggattacaggcttcagccaccatgcccaacctcggtgagttttttaaagaaagcaacaccaacagagaataacatgctttaaaaaaaaaagaaagaaagaaggaaatcccatagtcttgtcccctaaactactagaattatttttaaatattattttaccccattcctacttttctttgtctcctaccaaggtaggaggaaaggtagctaagtgtagagagagagaagaaaaatagaagataagtaactataacaaagagaggaaaaacaaggaaataagctgtgatacaaatttgaaagaaggcagggaaaagtgagaaatcaggagaaatcaagatgagcagatgctgggcgtggtggctcacacctataatcccagcgttttgggaagctgacacaggaagatctcttgagggtagaagttcaagaccaacctgagcaacagagtgagactctatctctacaaaaagtttacaaaataaaaatgtcagaagaaaggtctctgatgaaaaaatagatatgtaaataaatcttttttttttttttgagacagagtcttgctctgtcacccaggctggagtgcaatggtgcgatgtcggctcaccacaacctccgcctcccaggttcaagtgattctcctgcctcagtctcccaagtagctgagattacaagtgcccgccaccacatctggccagtttttgtatttttagtagagacaggtttcaccatgttggccaggctggtctggaactcctgacctcaggtgatccacccaccttggcctcccatagtgctggaattacaagcatgagccaccgcccctggcaataaataaatttttttaaaaggtggctgggcactgtggctcatgcctgtaatcccagcattttgggaggccaaagtgggaggatcacttgagcctaggagtttaagaccagcctgggcaacatggtgaaatcctgtctctacaaaaaaatacaaaaattggctgggtgtggtggctcacatatgtaatcccagcactttcccaggcctaggcatgcggatcacttgaggtcaggagtttgagaccagcctggccaacatggtgaaaccctgtctctactaaaaatacaaaaattagcagggcatggtgatgtgcacctgtaccagctactcaagaagctgaggtgagaagatcacctaagctcaggaaggtcaaggctgtggtgagccatgatcatgccactgcgctctaccgtaggtgacaaagtaaggctctctctcaaaaaataaggtaagtggggttagtgggaaaaggggtgtgggtgggaagaggggtgtgggtgggtgtgtgtgtgtgtcacactcagcttgtttgccttgctggggtcactgaagtttgagacctctgtggtagcccacccatccacagtcctctccctggtggtctagctagttaaatttacatgatgcctttttcttctcatagtattcctgttaagttgtatttaggggaaggggaggaaaaaccaatataattacttggttttagaagtccagccaaagagcacaccctcaaattcaagtgtggcctgctttaaatcatgtagctataactgtaggaccataaaaagtaaaagtttagaatctttgtgtctgagctctctggacatatgcataagagtgtgtttcatttaagtaattccagctttctaaggaaaaactctctctatccttctctctttgcccttcagaaccaggagaggaagcacaggacgtatgtctatgtgctcattgtcactgaagtgctggaagactgggaagattcagttaacattggtaagccatctccagacagcctggaaagggttcctcacaaccagcccttgccatgccacaggtcatgaccagaaccagaaacaagagcgtaccaggctcagtggctcacacctataaccccagtactttggaaggccaacacaggaggatcacctgagcccagagttctagaccagtcttggcaacctagtaagacctcatctctacaaaaatcagaagacttagctcggcgtggtggcacatgcctgtggtcgcagcttctcaggaggctgaagcaggaagatcatttgtgcttgggagtttgaggtcacattgagccataatcatgccactgcactccagcctaggcaacagagtgagactctgtctcaaaaacaaacaaaaaaacagaacaacaagagctggataaagaatagaaataattgaaggatgtgtataataaaacaagcatgtacattttgaacctgatagtattttgaaatgtttaaatggaatctgaagtgagtacatggtccacaaatagaagcatgacccctaaaaataagaaatgttgcttctaaaatcaaactgggtccttgccaaaagggctatacttctgcacctcctgagcagatactgattgagggcctccgccatgccaggctcactgctggccatggggaccataagtgagagcaggaccctggtcttgttcctcatgacatttatattgttgagaaaactgttggtttggtggtgtgagtccctccagaaatcatttagtagatacagaatagtgcaggtggtttctagttttattcttataaaatatgaatatatctataatatatatttttatattttttcatattttatatgaatataaaaatgataaaatttatgaacttttacaaaaggtgctgtgtgtaccctttaggtacacccaactttctcccaaaggagccattttctttgatctcagatggctgttacgtttacatctttggaactataaactgtggtggtacaaaggttggttcatggtttgattgtttacttctgaaggaaagtgtattctagaaaggagaacactaatttccattacaaattggcagacagataaaatttatttgccaacattctcactttaatgttagtgtttgccttgccgccatgcccctcacattgttactctgggcagttcgtagccctttggctcttgatggctttgtgtctagtaataatgcagggtgctcaaggaaataaattcagtgtggatatactgaaaacagactccctaacaggtgtgctagagcttgaaaaggagactgcggtggatgtgtggtgtggccctatcctcagagcactctctgtcaggcaggagtcatacacttgtgatactaatttttttaggtaccattgctctattaatattcaaacaagcctttcaccttgtactcccacttctgagaattgaccctaatgaaataatctaaaatatgacaagctatggagccttccttcagatgatcttactaccattattcttactggttaaaatttgcatcttaaatgtataactcaatgaatgacaaatcaatgaatgacatgtgtccgatggaatgttatacagctgttaaacaccatagtttaacaccaccctgttaaactgcagttgcagtggctcacgcctgtaatcccagcgctttgggaggctgaggcaggcgaatcacttgaggtcaggagttcgagaccagcctggccaacatggtgaaaccccatctctactaaaaatacaaaaattagccaggcatggtggcacacacctgtaatttcagctactcaggaagctgaggcaggagaataacttgaacctaggaggtggaggttgcagtgagccaagaatacaccaatgcactccagcctgggcaacagataagactgtttcaaaaaaaaaaatttttgtcaatgttaaagaaaagctaatattggcaggaatgtggtgagactgacatcctgacatacacaagcaggactggggatcagtgtcgcctttctgtaaagcacttttgcagtataaatcaggagcccttgaaagttcagaagctctatttttgtagttcttgtgctagatatctttccctagaaggttaaaaagaaagaaaaaacggggaacgttttaaaaaaatagcattatttataataattaaaatcactgggcatggtggatcacgtttgtaatcccagcactttgggaggccaaggcgggtgaatcacttgaggtcaggagttcgagaccagcctgtccaacatgctgaaaccccatctctactaaaaatacaaaaattagctgggcgtggtggtgtgcacctgtagtcccagctacttgggggctgaggcaggagaattgcttgaacccgggaggcggagattgcagtgagctaagataacgccactgcactccagcctgcatgacggagtgagcctccgtctcaataaataaacaaaaattagctgggtgtggttgtgggcgcctgtaatcccagctacttgagaggctgagccatgagaattgcttgagcctgggaggcagaggttgcagtgagccgggatcacatcgctgtactccagcctgggtgacagactgagactctgtctcaataataataataataataatcacagacaattgatgtccagtgatatggaaatgcttaagtgaatgataatacatccatactagatactatgacataatgcagccataaatgtcttaaaaaaaaagacagtctcactctgttgtccagactggagtacagtggcatgatcacagctcactgcagcctcaacctcctgggttcaagcagtcctcctgccttagcctttctagcaatggcaatgtctcatatttttttcataatatagattgcttaagaaatagtgtgacataggacaggtgtggtggctcatgcctgtaattccaagtactttgggaggctaaggcaggaggatcacttgaggccaggaatttgagacctcatttataccaaaaaaaaaaaaaaaaaaaaaagaagcagcagcaggtgtggcacgtgcttgtagtcctagctacttggaaggctggggcaggaagatccctcgtgttcgggagcttgagtttgcagtgaactatgatcataccactgcaatccagcctgtgagatcctatctctggaaaaaaaaaaaagagagaaagaaaaagaaaagaaaaaataacatgaagtaaaaaccagtaacaaaaattaaaaagcaaattcagcagcacattcttttagcagccagttactcttcaggtgctttccatactaatagtcataacagacttgtgagataggccctatttattgtctgttttatagatgaggaaaatggagcaggaacacagctacctgaggctgcacagctcattggagccatttatgtgattggagcccagcactttggcttcagagtccttgttcctgaccataacactctagcagagctggtcaggattcagagtacctgaaagcatgatccaattttggttgtctcaagattgtttctttttcaagtatatgaaaaaagggcagttgtgctagggtattgagagtggttttttctggtttataagattatgggtagttattacttttataagataaaaaatataaaggattttaaagcatggactagaaaagagtaagaaaatagactgaaaaataaaagtgtgattgtattgagattatttttacttcttttaagaaatattttctattatgtagataaattcactcttataagaaaacttttaaatgaattactgattacaaaccagccatcctagtaattctggaagctgatgctcgtgttgatttttccccccttgggacagggtctcactctgtcaccctgctggagtgcagtggcgcgatgacagctcactgcagccgcgaccttccgggctcaggtgatcctcccacctcagcctcctgggtagctgggagtacaggcacatgctaccatgcccagctaatttttgtattttttgtagagacagagttttgccatgttgctcaggccagtctcaaactcctgggctcaagcgatccgcccaccttagcctcctaaagtgctgggattgtaggcgtgagccacctcatccggccctcatgtcagtttttacaggagatggggatgctgctgggctttgatccctatgtatgtgcaagcaaggaaagctcagagacgcaggagggcaggaggaaaacactagccgtagttctctctggagggcaggttttacacaattactcttagctctttggttttcaggtttctcacctttctgcattagacattgatataatatttgaagcatatgaagtgtgcttgagttatttttgtaaggaaaaaaagtgttaagaaacattgctttaatgttttctatattttctcaaaagttctaggctcagaaaccttattactcttgtactagtttcttttctctctgcctccacaggaaggaagagggaatggtttaaaatagaagacgccataaaagtgctgcagtatcacaaacccgtgcaggcatcatattttgaaacattgaggcaaggctactcagccaacaatggcaccccagtcgtggccaccacatactcggtttctgctcagagctcgatgtcaggcatcagatgactgaagacttcctgtaagagaaatggaaattggaaactagactgaagtgcaaatcttccctctcaccctggctctttccacttctcacaggcctcctctttcaaataaggcatggtgggcagcaaagaaagggtgtattgataatgttgctgtttggtgttaagtgatggggctttttcttctgtttttattgagggtgggggttgggtgtgtaatttgtaagtacttttgtgcatgatctgtccctccctcttcccacccctgcagtcctctgaagagaggccaacagccttcccctgccttggattctgaagtgttcctgtttgtcttatcctggccctggccagacgttttctttgatttttaattttttttttttattaaaagataccagtatgagatgaaaacttccaataatttgtcctataatgtgctgtacagttcagtagagtggtcactttcactgcagtatacatttatctacacattatatatcggacatataatatgtaaataaatgacttctagaaagagaaatttgtttaatttttcaaggtttttttctcttttaatttgggcatttctagaattgagagcctcacaattaacatacctttttgttttcgatgctagtggctgggcaggttgccctgtcctttctctatttcccagtcattgactgtagatatgggaagagtttagctaccttcatagtgctcccaggactcatggcctttccttctttaagctgtatttccctgcccagaaagaaacaggaagaaacctttttttatttttttatttttttttaaccaagcaaggagcaaatggcctcagcccagatctgtaaaaacaatgatagaaattgaattctgccccacatgttgacagtagagttggaactggattcttgggattacttatctaaaaaactggagcatcaggtccatttctgttctgctggtttggaatcttttccgtaatgctatttattgccaacaatggcctctctttgtgtccatatatgccttacaccgtgctgacctgggtatcatccatgtgctctgaagcatccaactttactttgcaggtgcatcaatgtagtcctgtccctgaactgagtaaccgtgttcctgaaaagtacactagggaaattcacctgcttgcttgtctttgtattggcatggcacttgtgattgcaccatggagcatgctcagagctattaaattggtctcccatctcccaccaggatatgaaaggtccatatgggaggccacgtaatcacttattacagtggttacataatacactggctcactgcagactctcttgttttttgatacagtttcgtgctggcttcatttgccaattgtgttgtttagttcggaagtaagagggtcttgagattgaggggtagggagggctacactgactgatccgtggcttaagacaggagattatctctgtactccagtggcatctccttagccaagatgtgaaattaaaatcatagttcgcctcatttaaaaattctaataaagcactcaaactttgaaaagcttttacttttccctcctactaaaagaaatgtatgtacctcatagccctgtgtcatttagtgttcagcacttttgggaacatcagttggtgaactttaaattttgctgtctactcactgggcacggtggctcacacctgtaatcccagcactttgggaggctgaggcaggtggatcacctgaggtcaggagtttgagaccagcctgaccaacatggtgaaaccccgtctctactaaaaatgcagaaattaggtgggcgcctgtaatcccagctacttgggaggctgaggcgagataatcgcttgaacctgggaggcagaggttgcagtgagccgagattgcaccactgtcgtccagcctgggtgataagagtgaaactccatctcaaaaaaaaaaaaaaaaaatttttttttttttttttgctatatactcttagtttacatcctctcccccaatcttcacacacagagccaaagagcagttatattcttgggataccatgatacctctgggaaaggaattatattcccaaggagaggtcccattggataagaacaataccatgggacttgagtctgaatgccaacttactattcacacatccttcttaaaaacgaacacactgtttcttttcctgacctagagcattctaaagttctgttcaaataaataaagggcaaaataaagtagatttaaccaagtgccaggtggaattcaaaaaacacattcttccagataaattctacctttatggtatggatttgaaagtactttgcaggaaaacagtcagtactctttaaaaagggactgcagggctgggtgtagtggctcacacctgtaatcccagcactttgggaggccaaggcaggtgggtcacttgaggccaggagtttgagaccagcctgaccaacatggcaaaaccccatctctactaaaatacaaaaattagctgggcatgatggtgcactcctgtaatcccagctacttggtaggctgaagcatgagaattgcttaaacctgggaggcagaggttgcagtaagccaagatcatgccactgcactccagcctgggcaacagagtaagactctgtcttaataaataaataagaaaataaaacggaactgcagtgctaacagtaatttatacatttttaaatgttctgagtatgttttgactgggctagtgtaacaatatactaccctgaaagtgcagttttgattgttgttggtgtctttgggtcaggaaagtgaactgtgccaagaagtatttttcagtgacatgaatggattcctgttaatgcaattgactgagagattgtgcttacgctttcttaactgacaaaaagaggctttgtccaacatcagaattgttgaaactggtgctgttttctgttgcactgggattctgatgatctgggattttccctccttggcacagtaaacaccatgactgtctttattgagaatgtcgtcacagtcctttagtgatagattagttagacccatggttgcaatacctttatctccccaaagaaaataatcaaaagaaagcacaaaagctaccctgtttgcagaatatttcactgacattgatttgtcattaattctaccagagctgacctcattcaggcttgatagaaacaggttcctatgtttagggcagatccctagcctctcgctcacagtgagtctgcatgtcctagattctggttattgctggagcatccattaaagtctaccaaactcaggacagaagaagatagcagtggatttgtaaaaatttttagtttataaattacagtcattggggaaacactagtaaggtcatgtgatcttttggaccaggattttctctctgtcttctctctgggtgtgtgtgtgtgtgtatgtacagaagggctaccaggaagtgtcaaccatgttagattttctgtagtcttccagaaacagtgcagcccatacaacaggaatcttaattttcctcacagcaaatataacaggatggaacagttagtgttttgttttcacaagtgtccaccactccatctgccctgcatggagagggctctctcactgctagatctaggctgagccatctggaaggatcaaagggtgtgggagtatcaccccctctcaggctgcagaaggtctcgagggtggcgtcacagcaggatttccgccttctgcattgcactgcacagccccatggaacatgaggcacttgaggccttgcttcttggagcctctggggagcagagtaggtcactgccctctgggagtgttttgcagtagttttgtaaatgtgttgctacatagtcaagttcctttgtggcaaagaaatattttgttttgatattaggagccagcccatgtaatgcctctcaggcttgcttgcttagaagaaaaaagtcaccctttgtggtttttaagaaaaaaattctgtgcagatctgttcctcctcctgctccttcccttttctctacatacagtgctcattggaggctcctgctaaaccttcttaaccagagaaataataggtatttgttagacctgagtgtacatttcacatgttatccttcacatatttctcattttcatctagtactttcttaatgcctttgttggagtccgcatcctcatctttaaaaaaaaaaaaaaaaaaacagcttagcctaagccacattcactttttttagttcacaaaaaggatttaatagccacaatgtgatttttgccacaactgtgtgattttaatattctctaatatcaagggcggatttagaattgcaggaaatacctggagaaatcacagtggaatgaatttttgctttaagagaaatgagagttggctgtctctgtaattgataatacagcttcatcctagtcccatctgcatttcagaaaataaccctcatctttacaaaacacaggacacttgtgggacagttaactcaagcagctatggggagggaggagattattgaatggtgattaaataatgcaaatggctcttctgtttcttaaagactgtggaagaggtcagactgcccagttgaggtgggcagttcatactgctcagttgaggtggcagtcatttattctgagtcctgttggatagagcctatctcctcaaggctacagaggcttccaggatatggagctgtgcatgttaatggctcagccttgcctccatcagggcacctgcctaacttggagcaagtgggagagcaccctagagtcatcctctgtgctgtttcgtgagttttgcagcggagacttcaccatccggaggagctgtgtttctgtgtcacttgggatatcacctaaaaatgaaacatttgatattttaaggtataaaaaaaaagtaaattggggaacattggctgcagtccctaaaagatactgttgtctgtgcatcaggttagcttgaggtcaccacaggtcctgggagcccagagagtttaggcatactctcctttggaggccagcagcctttcacaaaccctgcctctaaaagggcggtttcacatttgaccatgtttttgcattagcctcagaaactcttgtctttagctgataacctttgagggatgtgagaagcctagttggagcatctgagaaaatgatacctctcaccttcaaattaatcaaatagtttgtccttctagtccccttataaattaataaatggagggctggtcatggtggctcacgcctgtaatcccagcactttgggaggccgaggcgggtggatcacaaggtcaggagttcaagaccagcctgaccaatatggtgaaaccccatctctactaaaaatacaaaaattagccaggtgtagtggcacgctcctgtagtcccagctactcgggaggctgaggcaggagaatcgcttgaacccaggaggtggatgttgcagtgagccgagatcccgccactgcactgcagcctaggcgacagagcaagactccgtctcaaaaaaaaaaaaaaaaaaaagaaaagggaagggaatcccattttgtgatgatttgggcacactacttgagctgaggctagcagtcacatgattttggctgtctctgacctgaagcttttgaagtaaggttatgtctcttccctgaagctttgtttatagtggtaatttggtgagtttgagctttgagcttgtcttagaaaataagactgtccacctggggaggggagcttatagggaacccgtgttaactcagaatgctgaagaaagtgcttttagccaacaaaagtaagattactatctagaaggtggaaagaagtcattgcttctgttcctccagcagtcagttgactctaggtttcctttggtttatatccccagttcttaatactaaaacttatttgacttcctatcaggaagcacacaaaaaaagcgtcatttaaaaccctggatataggctttaaaggatacaaaaacagcagcattgtcgttttgccaggttcatcaccattttgatgtgctacccatccttccaccctccctttcctgcccccaagcctcccagccaggccagatgtgaagattctattaatcactgtttcagagaacattaattcttgtatagaataattatctactaaattgcttattatctgtgactaccttgcagagaacatctcaacagtgcagtaaaatagctctcctagacttgagcttccagc

SEQ ID NO: 7498 - DNA, 187 bp, Homo sapiens
cacgcctgtaatcccagcactttgggagactgagatgggcggatcacgaggtcaggagatcgagaccatcctggctaacatggtgaaaccctgtctctactaaaaaatagaaaaaattagccgggcgtggtggcgggcacctgtagtcccagctacttgggaggctgaggtgggagaatcgcttgaa

SEQ ID NO: 7499 - DNA, 15360 bp, Homo sapiens
aaggagggaaataccctttattttttaatttttatttttcggagactgagtctcattatgttgcttagactggtctcaaactcctgggctcaggcgatcctcccacctcagccccttgaatagctaggattacaggtatatgcccctgtacccaaaatgcccttttttgttcctgggactaaacgggaaaaggagggcaacagggagctctggctgcagcaccagaggaacccactggaagggaaagggcagatagttttgtttctttattatttaaaaaatattaacagcaattaaaaacaacaacaacaacaaaaaaaacattcacaacctgtcacagagtcctataagctttggccatttattcccaacggagtctttcatccaaaggcaggtggggaatttcagccaaaaggccccttcatggttttcatgggtgggtactgctgctccatcggcatggccccaaagcagtcagagggattacagtggccagccttgcctggctggcccatgggacccgggggcccagggatgccagggatgccttgctggcccattggtcctgttgcacccatcttgccatagcctggaggaccttgaggacctagggagggaagggccacagagggaaaatcagaagacccagatcataagggaaaagaagccataatggcatcaaataataccttacatttgatgactgtttctcaagttaccacatgttttcatgaagacctagtctgatcctcacgttgatttaacaataacaatactgctggcaagttttatttagaacttccatgtgccaggcacagggctgagtgcttttgatgcattattcattgaatctgcacaatttcctgagaaagaagctattgtctaattttgtagatgaggacacaggctcagagaggttgcacctctggtaagttgtgatgctgggtctcagagccaggtcatcaggctttggccatcctctttcaggctatatagccaaacattcatcgtagagagcacttccaaagggcttaagtggcctcttcaaggtgtacagccagtgaggtgctgagtagaacttgaactcgagttcctcatccccacctccatgcagctctctcctactgcatcatgctagcccagtttaggacttaaggacaggtactgagtcttccgcccccacatccccacaggccctggcagagtgtcttgcacacagtggcattcctataaatgtggttgactggcctgtcgttatttggagtttgacacagctgtgtcatagaagaaacagaaagaaaaggggtctctgctgctctggattcatggtctcaaatggtggtatttcctacctggggggccgggaagaccattttctcctgcaatgccaataccaatgtcccctttttcacctttggtaccaggcaatcctggaacaaaagaaataaataagtcctatccctgagcagaaaaatgacacagccagtcagattacttgaaacacacacacacacacacacacacacacatacatcccatattcacaacagacctcatggaatacttaggcctgccccaaagaattacatgtgtcccttgggaactgtagggcagagctacctcttactcctggcaagccctgccgtccttctctgccaatctgaccagggagcccaggtgaccctggagcacctggcctgcccggagcaccatccttccctggaggccctggtcgtcccggagctgccgccatctccatggggaactgcatcctggaggtgtagtaagccattctctctgtaaaaaaaggacaaggacagggacaggtcagagggtcccccagggactcagaatgactgcagatgctgcatataggccaccagcatgaagtccacagcagccttccttcacagggatgtcagggcaaggagtatgggggtgggtctcgcaagggggttcccacgtcctggcctccacgtcgctccccatggagatccttccaaagcacagatctgactatggcatctctgctccaacacccctcattagttcaccgctggcttcagaataaagtccgcattccttgcttggcattcaaggtctgcttcccaagcaagacgtccagccctttcaggacagggcctgtgttttccccagtccctggcacatcaatgttggatgaacaaatgaacagaaaaaaacacttcaaataaaccaccccagccatcttacagtgccgctcgcccctgtatttagagctcacttcaggcagactcgtttaataccaattttcttgtctgtctcctttgctcaagtgggggctcggggaatgcaggagggaatcattttatctctgaacagaacaggagacaaggaaggtctgaaggataattgaacatctgcctgtcaaccccaggcctgtgagtgtgtggagggtgagagcaggaggacattgagcgttaaggagaaagaggccaaggcagggcagagaagtcacaaggaagggcagacagcacccactgccacccagctggctgccagttaccatcaaacattttaatgatctcttgtctgatgaacctcttgatttcatcataattcaccatgtctccctgaagaaagagaagaaaacctgcctcaattatacttccaagcctggcattttcccctatggaaataaaggatggggaggaaggcaaaggtcccaggagcctcccacagattcttttttttttttttttttttttttttttctgagacagagtctcactttgtcacccagactggagtgcagtggcgcgatcttggctcacagcaacctccgtagattctcaatccaaagtcctaaccacccagatatgatacaaaacattttgttcttaagtgcatttttctggggagagggtcctatcatccccacccttccgcacacagttaagagctgccctctatgggagccaggctctttcccacagaatgtcagcaggagcttggaagatgatccgagctccaccccacatgcctgctctatgggacagtgcccacagctgccagccttcccccttaccatggagccaggcacaccaggcaagccagggctccccgaaggccccggagctccagggtggcctctctctcctgcagggcccggtggcccaacaggccccatggaaccactcttgccaggtccaccaggcatgccggctctccccttctctcctgcctggcccttctgtcctgcagctcctggatcaccctacaaagatagatacttagtgctgtcaaatttacatcatgatgtctcaccaatctgctcttttctctccaccctcccaccaggcccccagcgtctccctctagactgtggccacagcatcctgacaggtcactccacctcactgccccagagtggtccttctagaagacagttctcctggtgttactccctgcttagaaattctgatggctcccaaatgtcctcaggataaagcactcattcgttggccgggcatgcaaggccattcattatgtggtcctgatcgttccttcctcagcctcctctccccaccctctgcctcccaccagacctcactggtgatgattctctgattctgccatgttgttatggtcctgaatgcccttcccctcatctctctctatccagtgcacccctcctgagctgaagtgttcctgttctctctgcagcctctccgactccccaggctgggttgggtgctcctccctctcatcccacagcgctatgtctcatgtcttctggaaaacttgccaatccctagtgtaagtgtgactggtctattgtgagcacctattgttcagggacctctgtttacctgaggccaggacaagggcctggaatgtgagcaggagcaagggagtgctcgggaaatggaaacaatgaatgaatcaatcagtcaatcagtgagtaaatgaactggagatttccttccccccaaccacagctaatgaccccatgtgagaaattttcagacactatcctgctccaagttctgcatttttgccccctgcccactggccttcctgtgtctcctctctgtggctaaagccgtaacttgcagctgggcttcatccactcgtgagcttctcctctcaagcccagccagtgcccactcaccttgggaccaggaggtccatagaatccctgctttccagggggtccctagaggaaagcaaaagtcagaggtgaagtccgggcagcatctctgaggctccctggggaggcaggtgcagtgaagaggccccttccacagcctgaggcccccaggtgtgtccagcccagctctgtgtgagaaaggagcgcagcctccctgcccagctggaagggaaaataatgtcctctggggcatggccttgtttaagcatgttggctgggcccccatcacagatgaagagaggcgagaagtcagaatgagagggccagtctgtggcatactggggggcctggaaagacctggtacccaggagatgtttgtttggaatttattattatcattattattgttgttgttgttgtttctttttgaccaggtacagggtttaaaaaaaaaaaaaaaaaggtaaaacaaatctcactcccatccttggcctcaagtctctaattcctctccccaggacaacagggttaacaatttccagagacagcccgtacatagaaggaatgtttactgaaaaaaatgaagaggggtcagggcaaggcgaggagcaagaagcacccccaaggaaacagagaagaccagtacaactgtacctctttgccagctgcaccatccgtaccaggttcgccctggggagtagagagcaatggagacatgaggagctccaacccagtttggtgtcagatgcctcactttgtacatggggcaagcccagccccctgttccacccagaggccacgatcctccagccctcaccctctgacaatctgggcacaggccgtggaaacttagacccccaccccatactccagcgtgatcccagagccccaacagctcccagcccccgtctacaagagctttacaagggaagaacagaccgtgcctgccttgctgtgtgcttggatcctggcaccttgcacactccctggctctgaatctatgttaaacgtttgctgaatgaacacatgaacagcctgagccggccccctccctgagaccagcaaggcagcctctcttctggtggctgctggggaagaggactctgattgctaggcaagtgggagattcatccaggggccatggaggctcctgagcctgcaaggagggaggcagggtccttggcaggaatcagagcgaataggcgtggtgagactgggcccgcctggcagatgggctgactggagtcaaacaccccagcccaggccaccagccccacggtcactgctgctgccccccagaaaaagtctgcgttgatggaaagcatcctgatgggtcccaggagacctgggtccctgcctctgctctcccaggagacttttcatccctgaccctggcaatcagttgcacctgttagggttcacctgtctggaacttttgagagaggtagatttgcagagtggctaaggacatgagttctggaatcaggcaggctgggatcaagtcagagctcttccactcactagctatgtgactccgagcaacctgcctaaccttgcggagcccccgtttcctcatctgtaaaatggggacaatcagatccactaaatggggctgcggcacagattaagataaaatgcacagcaagcacttagtccaccattcggcacacatcggtgaccgatatatcagcgctcttagtgttaaacgtgagctgagaccaagtcctggtttccgaggacctcaggaagttacagtaacagcactgcatttctggttcctgacatttagcaagattttctgtggttactgacaagctcccctggggaaggggaagaggcagaacagggacacgtagccaaggggtctgcagaaggttgatgctgaggcaccgtcatgggcagtgacctcatgtgcagcctggcacagcactgcagggcctatccttccaaattcagcatgatcctcaggcccgaacgccacgctgccatcctgccatgctgacagcctctccttccttagagaccccagatatgttgtgctgtgctcaacaggccttgagccaattgactctttccccctgggctatgctgtagaatgtgggatcttactggggggccagggtgtccaggggggccgggctggcctgggaggcctgcaaggcccctttctccggtggctcctcggtctcctttcagaccctagagaataggaagggggacagtgagaggggaggaaagcaggcaaagtggactcccatatagccagagacagacaccccatcgtgtgccagggactacagggagaggtggcactgcctgaacttgcagcaggactctgagatgacctccagccctctccaaagccctctgccacatcctggaaggcgagatctttggaggcaggagaggctgacaccagggaaggaggggatgagacaaactgttctccatccccccagcttcctctgaatggagcccacagtcaagcagggcaaaactcctgggagggaggaaggagtggagcatgttactcaccactgcagagatcccagctggtcctggctggcctggaggccctggtggcccctaaagagagatgagtcagtgggatagaaacaggttctaatagtaagacccctgggaggcacagggcctgacagcagaaacaagctctaaacttcagcagctccatttcctctggaaaccttccttcgctctggtcttgcacttgagcttcggacaagatttgcgcccagagctgaggcctgggggtcctgggcacacaggaccctccctccaacccaggctgagtggagcatctggggctgtgctgagggggatgatctgaaagccgtggccagaggccaagtgcagaggacaaaggcctgggggagttactccctggcctaggtggctactgagacccttgcttccctaaaggcagtctacttcctgctgttctatggaggagggaagaccagaagctgggggtccgtgtagcagggggtgaggggcaggggcttggcactgaccccgacatccatagtgacaaggagctaacacttgctggccaacactggagcgcacgggactccaacacccagacagtccctgctgctgcactagggctgcgtctgaaatgcccttccctagctctgatgcctacatccatgcctctgtggtgcaaaagatcacctccctgatcagagtgacaccttctctgaacccccggggcacttgggtctctcttatagtgcttccctcaacacccccaggtggcacgttccagagccatagcctctgttctattcatctccagtctcctggggtggaagtgtccagcacagagactgccacactgcaagacgaaggggctggacacacggaagagagaggcggaaccctgcaccccctcaacctcagccctattgagtctccaatggggccacgcttgtgagtgcacctccccgtgtcatctgtaatgtgagggggaaccaggcttgatatggcattcccaatccagggcctctggaccccttgagatgcataaaaatagtgatgggggcctgagagttctttttttttttttttttttttggtcatgaactatttttaacatttccgaaagcctcctggaaattattatgcagccagccacaacagggctgcaacaaaatgccagtatcttcgcttttctctggagtcccatcagctcagtgccgtcacactgatcaaaggcactgcctggcagtcatctatgttagtgatgagtaaagtagacaggaaattcattgttgcttgataaatgtcctctccaagtcaccccatcttgggaaacacaccacctatttacccagttgcccaagtcaaatgcaggagtcacccctggttcttctctttctgtcactctgtctccccaaccccaatccagctcatcagcaagtcccccaagcctggcatggcacaggggctccacaattatttgttgactgaatgacctccatctgataagtgaacttgaatgtgcccagaaaataagaaaataacgaaaagcctggaaaccacagaaggagtggcccccgtgctcccacggctggggcagcccctatggcaagttctctcaggtcatgacagcctatgcaccaccaaccaccccgccaaaatgctaactcttatggagacagagacaaaagtggttcaactcacaacgtgtcccgggggaccgggtcttccctggggtcccatggcaccaggttcaccctgcaggagccagaaaaaggaaaaaatgacactgaaactgacttgcttgcaccatgtggctgtcggatgggagggggctgggcagaatacatggtaatgccaatggccaaaggagctgggccaattcccagcctccagacccaagtttcccggagagttaggtagagaaggcggatcctcagcctgagcaggccaggccctgcctttttaggttggtgacccagtaacctccagggagcagaaccagttacaacccttaataggagggagaaagttcaagacgtgcagtgttgggtgacacccctcccagaaggctgaggacagaaagcagccactttgccagtgagcaggaagaagcggctgcatcccagactctgcagagtctgaaggcaaactgaaggcagccatgtggatccctggccctcacctctgcgccaggccggccagtgctgccagggggacctggtttgccacagtcaccctagaagagagaggagcagctggagcttaccagaccttcacttgacatccctaccccaagtcaacctcacatcagagggaccctgccacctgccccagctttggccagaggccctctgatgccctccagctggtagacagagaagccctgacccagtctgccaggcaccagtggccccaggaggctctgatgctgggatggcctctctgcccaggataggctgccatgtatgcctgggggcaagccttcaggagagcagagataacctgcttggcagaggtcaccagcccttaccttaggtcctgggaggccaggatgtcctgttttccccttaaagccctgaaagaaaaagcagggagttctcatgtccctcatgtcagctgggggcctcttcccactcctccttcctcagttcaaacaattcaaaccaatccaaagtcataacacggtccacggaggatctggatttgagctgttgcagccacccaggcagaagctgcaacttcgcagcttccaactccttcctgcagctcaacttaccggtggtcccatgagtccaggggggccagcaggaccagggtccccctagggaaagagacgaggaggattgagacaagagttttgcccagcttgtatccaactcatacctctgtcctcccctctctccagccctccccagctatcctaagatggagggaagaatccaagcctggctcagcctctgactggctgtggatcctcagtgacttccagcccctctccgggccttagctttccttctttgggatatataagggggttgactttgatgttctaccctgtcctgtggccccagccctttcagattccccagcaaaaccccaggagccagggcttgctcaagtccttccatgtccacaccctcattcttcctgaagcccagcctggtttcctcagctgtcttgagtttctgcatacatcatgccttcaccatcctgcctttggtgagacctagctcgcctaacctgcttaaggccactaggagaactgggaagccaaggggctgtggtgccatcggggagctggggtagagggagacagaccgagggagggcatgggtgccccctgacaaagacggggatacttcggttctttccatcagggttcccttgactttggctcctctggcaaaaaggagaggaaggggtgcccgccctcccagcccatcatctcaccctcaagccaggcttgccgtccttcccatccaaaccatccagaccggcggggccctggaaacaggaaagaggcatttctacatgctggtgcgggagccctaggaggtgggaggcctggcccaacccctcaattctctccacccctcccctgactcccacctcagcacacacacacaggtgcacacacacacatgcaccacacacatgcgcatgcatcgcacacgtctgccacgctgaaagggcacacactcacctgaatcccaggaggtcccggtggcccaggggagccaggcaggcctgatgggcctcgaatcccttcgctgccctggaaaccagcgccgccccccccccccgccccacaataaagtcagcagggctttgccccacccatggagaccaggccctgggtcaagggtcctggtgactgctggaaacaggacagctggcttctgggcccaatctgtccctgtctaactgcatatgtgccacacgtcgcctccccaggaggatctgtcttcatctgcaaagcatcccctttccttgctgccccatgaggaagggacagggcatcttctccagtgctgacccaggggctggcatggcaggggctcagtagcatgtgctgaactgaaagcacagcttcaatccactgtgaaagctgcctgttgtattctactccatcagaccccctgcctcctccccacctacctccctacctttccccccatcccagcagacatgggcccgggctgcacagaggcctcaacagcgcacgcagcaccatgtgggctctgattccccaagatgaaaaagtgggtgcccctgtcctcaaggagctcacagtccagtgagggtcatgggcccaacacaaccaggggcaatacaacagtctaagtgttctgtgtggaaaggggctcagggagctcaggagcggggagcagttccctctggctggggatcagggaaagtgtcacagaagtgtcaccagatgctagactctgaggatgtctgggattgggcaggtggaggagaaaagtgcatgccagagggaacctaagagaaggataaagacttgcaagtgggcacatgcctggcctggccagggcatctgggggagcctgtgggatgggctggcaggcagaagaggctggaagagtcaccatgatgagtgggggccctgaacgctgtgctaaactttatcgaacagtcagtggtttttaagctgtacttctcagagcactggggcttctgggggagcctagaagctgggggcatgaagtggggactgaagagagggactctaggacccccaccgttgtcttagccagggaatctccgcttgtatttgttttatagattgaggtttttacatttgcttttatgtgataaaaagactctgggactacaaaataaagtctgaaaacccctgctacaggcactggggagccattgaatgttcaaagcagaagagtgatgagaactgatgcatggattggaatgtttaccagaaaaggcggggggaggcaagcagcatagcggggaaggtggctgcattctcccagtgtggagagggtggctgccctggatcagtggctgtagggtggtcaagggaaggaatcccgctagagagacccagcaaaggggaaaatgaactcgggggctctgtaatgccaccagccaccaggaggggtcagcagagccccaaccaatgttggcccccactggcagttgggatgaagaaccactggccagaggtttgggattctctgcaatgaccagcctaaggagagcaggggctgccactcaggtcctggggaggggaaggaaggggaaggggaaggggaaggggaaggggaaggggaagggggctagcaaccaccactgtcccaagcatggctgatcagcatgggctctggggaggtagtgaggtgcccgggtcctcctggagctgggaaggaagtctcagctctgctgctaacaccactgtgtgcctctgggctgccccaagccttgtgggtgtcagtttcctcacctgcacagtgagacgttcatgcgtgtgctctcaggggaaagaggctctccacaaggctcaggggaaagaggctcccacctgtccctctgaacccaggtcccccgaccccaagctcagaagtcaatcttcgggcttcttacaccacccactcagcacatctagggagcccagaggttgggccgagacagggatgtcagccccaagccaaggcagagccatgtctccagcatttatcaagccaaagtcaagagcagccagcataggagctccgccaactgctgctcccccaacccttgtcaccaggcaggacacgggccacccctgccctctctgggcccttggggacaactggagcacggctacccaggaggagcccattccccttccacgttggtgtcctccttcaggacgtgcttcccccttctctcagctcctcgctcatcctcccgcccaggagacgaaggtggcctgggctgcctatcacattctactcctccatcagaccccctgcctcctccccacctacctccctgcctttccccccatcacagcagacaagggcctgggctgcacagaggccgcaggcatcctgggccaagcagacatcccgaggagcccactggtccactgcaagccctgtcggcctccagtagtcactgggcccatcctggaggcctcttttcccagcctcagtgcaactgggtcagtcttggaatttcctgaaagcctgatgctaggggtgggacaggggcatgggagctgcatggctcagatctgtgactttgccaacccagggtcctgctcaccttctctgcttgagggccaggtgggccaggtgatccaactttgcctgggaatccagggggaccctgtatcaacaaaggggcaggcaggaatgaaagtggggctggagggggagctccccttctttattcttcctgtgcatgatgcactgttgttaatgcaattcattttgacttcctagaagcaccacttgggagcattacgtctgcctggcctgctgggctggggcccacacaagaggctgggctctccaggtcctggttcctggaatcaggcctggccacccaggccgttctcccctgcctctcccctcttctccccaggaccatcctaccccagcctggcctggtcaggcctgcccctcccgatgagaccacatcagacagagctggctttgtgtcttcttcactcaccggtgggcccggaaagcctggctggccttgaaatccctagggtgagaagcaaggggcagtgtgctgtgccaccccctctctcctgcctggctgcccaggtggaaagagtgacggggggggcaccctcaaacccatggctttgccctcccctctgcccaccatggctggcaggtgaggctctgggcatgaggtaggtcacaacccaaggacaggtagggtggggagactagagctggtgatcaccagggacccagctccttccctgcctccctgcagccaggtcccagtcgtcactcacctggtcgcccttctcaccggagttaccttggggtcctcgctctcctctgggaccctgtcacccacagagaacaatgcagccgaaacctaatcttcctgccctcagaccccaggacaagaccaggaccacatctccccatgccctccttcactcaccgctgggcctggggggcctgggaggccttcagatcctggggggccctaaggatacaaaggaacagaatcagtcactcctcctggggaggtgaaggatgaggtagggggatgtgacaggggactgcccagaacagaggtggcatgtgctgggaggcccctgggctggcaggccccctctgcctgatctgctcaggcttccctgctcttgcccgagctactgaaccagcctcctaactcgtcctgccacctcctggctcactgcaagccagccagcaaatggctgccctcttctcctccagcatagctctgattatgtcactctcttgctcaaacaccttatgcggctccctctgcctctgagtggggcgcacactttccaccaacgctggtctttgaggcagcctgtgatctggcaccagccaccccttcccacttctcctccctctctccttctcatcttccgccttgctcagtcagactgctgttctctgacacactctataccctcacacccccaggcctttgcacccttagcacagctttctcttctacctagaatgcccccttccccccttcctaggtcccctgaacccttgccaaatcatctgatggctggaagctgttcctgcagtgccccacccagcctctccctctggaattccccagtacagacagccacagggatccctccctcctgctagtcagctctcagctcatatgccacctgctcagagaggccttcctgcccctccgcttcgatggtgcccaaacacctctccagccccttcccctgtcccatttcctccatgagtcccagtcctcatcgttcctaggcacttgtttattcatctggcagctccctcccccacggcagggcaagagggcaactgcgctctgttcatggagacatcctcagaggggagcctggcaccccacaggcccctgagaaatatctattactgagtaaatgcctgatggagtttgctgaatcccactggggcctcactgaaactggtgaatctgtaaggctgcagtcccagtttggctgatcctagatctgaggtttgtgaggtttgtcaccagatagatgtgtgttcaagcccaggttccaccactacctcactcactagcttcaggagcctgggtgagtctcagctttgtcactctgggggccccagtgtcctcatctggtcacagcccaactcctgtgctcaacgtggggcctggcaggccttggctctggagggtggctctggggagctggggtccactgggggtctataatcccaggtcctcctttgtaggaggcggaggagtgcttctgcggctgcctcctggcaccctccccttggcagccctgcggggattctcctcacagcctccacctccacagcacccagcctgtgctgcaggcttgggggcaggggggcagcaggggtcacgatcctccccttcacaggctgctgccaagtctccagcccgagactgtgtggctccacgtgcagccctgcatccagccccacgccgctgggactcaccggctctcctttctctcccgctgacccggtgta

SEQ ID NO: 7500 - DNA, 8667 bp, Homo sapiens
atgccagggatgccttgctggcccattggtcttgttgcacccatcttgccatagcctggaggaccttgaggacctaggagggaagggccacagagggaaaatcagaagacccagatcataagggaaaagaagccataatggcatcaaataataccttacatttgatgactgtttctcaagttaccacatgttttcatgaagacctagtctgatcctcacgttgatttaacaataacaatactgctggcaagttttatttagaacttccatgtgccaggcacagggctgagtgcttttgatgcattattcattgaatctgcacaatttcctgagaaagaagctattgtctaattttgtagatgaggacacaggctcagagaggttgcacctctggtaagttgtgatgctgggtctcagagccaggtcatcaggctttggccatcctctttcaggctatatagccaaacattcatcgtagagagcacttccaaagggcttaagtggcctcttcaaggtgtacagccagtgaggtgctgagtagaacttgaactcgagttcctcatccccacctccatgcagctctctcctactgcatcatgctagcccagtttaggacttaaggacaggtactgagtcttccgcccccacatccccacaggccctggcagagtgtcttgcacacagtggcattcctataaatgtggttgactggcctgtcgttatttggagtttgacacagctgtgtcatagaagaaacagaaagaaaaggggtctctgctgctctggattcatggtctcaaatggtggtatttcctacctggggggccgggaagaccattttctcctgcaatgccaataccaatgtcccctttttcacctttggtaccaggcaatcctggaacaaaagaaataaataagtcctatccctgagcagaaaaatgacacagccagtcagattacttgaaacacacacacacacacacacacacacacatacatcccatattcacaacagacctcatggaatacttaggcctgccccaaagaattacatgtgtcccttgggaactgtagggcagagctacctcttactcctggcaagccctgccgtccttctctgccaatctgaccagggagcccaggtgaccctggagcacctggcctgcccggagcaccatccttccctggaggccctggtcgtcccggagctgccgccatctccatggggaactgcatcctggaggtgtagtaagccattctctctgtaaaaaaaggacaaggacagggacaggtcagagggtcccccagggactcagaatgactgcagatgctgcatataggccaccagcatgaagtccacagcagccttccttcacagggatgtcagggcaaggagtatgggggtgggtctcgcaagggggttcccacgtcctggcctccacgtcgctccccatggagatccttccaaagcacagatctgactatggcatctctgctccaacacccctcattagttcaccgctggcttcagaataaagtccgcattccttgcttggcattcaaggtctgcttcccaagcaagacgtccagccctttcaggacagggcctgtgttttccccagtccctggcacatcaatgttggatgaacaaatgaacagaaaaaaacacttcaaataaaccaccccagccatcttacagtgccgctcgcccctgtatttagagctcacttcaggcagactcgtttaataccaattttcttgtctgtctcctttgctcaagtgggggctcggggaatgcaggagggaatcattttatctctgaacagaacaggtgacaaggaaggtctgaaggataattgaacatctgcctgtcaaccccaggcctgtgagtgtgtggagggtgagagcaggaggacattgagcgttaaggagaaagaggccaaggcagggcagagaagtcacaaggaagggcagacagcacccactgccacccagctggctgccagttaccatcaaacattttaatgatctcttgtctgatgaacctcttgatttcatcataattcaccatgtctccctgaagaaagagaagaaaacctgcctcaattatacttccaagcctggcattttcccctatggaaataaaggatggggaggaaggcaaaggtcccaggagcctcccacagattcttttttttttttttttttttttttttttctgagacagagtctcactttgtcacccagactggagtgcagtggcgcgatcttggctcacagcaacctccgtagattctcaatccaaagtcctaaccacccagatatgatacaaaacattttgttcttaagtgcatttttctggggagagggtcctatcatccccacccttccgcacacagttaagagctgccctctatgggagccaggctctttcccacagaatgtcagcaggagcttggaagatgatccgagctccaccccacatgcctgctctatgggacagtgcccacagctgccagccttcccccttaccatggagccaggcacaccaggcaagccagggctccccgaaggccccggagctccagggtggcctctctctcctgcagggcccggtggcccaacaggccccatggaaccactcttgccaggtccaccaggcatgccggctctccccttctctcctgcctggcccttctgtcctgcagctcctggatcaccctacaaagatagatacttagtgctgtcaaatttacatcatgatgtctcaccaatctgctcttttctctccaccctcccaccaggcccccagcgtctccctctagactgtggccacagcatcctgacaggtcactccacctcactgccccagagtggtccttctagaagacagttctcctggtgttactccctgcttagaaattctgatggctcccaaatgtcctcaggataaagcactcattcgttggccgggcatgcaaggccattcattatgtggtcctgatcgttccttcctcagcctcctctccccaccctctgcctcccaccagacctcactggtgatgattctctgattctgccatgttgttatggtcctgaatgcccttcccctcatctctctctatccagtgcacccctcctgagctgaagtgttcctgttctctctgcagcctctccgactccccaggctgggttgggtgctcctccctctcatcccacagcgctatgtctcatgtcttctggaaaacttgccaatccctagtgtaagtgtgactggtctattgtgagcacctattgttcagggacctctgtttacctgaggccaggacaagggcctggaatgtgagcaggagcaagggagtgctcgggaaatggaaacaatgaatgaatcaatcagtcaatcagtgagtaaatgaactggagatttccttccccccaaccacagctaatgaccccatgtgagaaattttcagacactatcctgctccaagttctgcatttttgccccctgcccactggccttcctgtgtctcctctctgtggctaaagccgtaacttgcagctgggcttcatccactcgtgagcttctcctctcaagcccagccagtgcccactcaccttgggaccaggaggtccatagaatccctgctttccagggggtccctagaggaaagcaaaagtcagaggtgaagtccgggcagcatctctgaggctccctggggaggcaggtgcagtgaagaggccccttccacagcctgaggcccccaggtgtgtccagcccagctctgtgtgagaaaggagcgcagcctccctgcccagctggaagggaaaataatgtcctctggggcatggccttgtttaagcatgttggctgggcccccatcacagatgaagagaggcgagaagtcagaatgagagggccagtctgtggcatactggggggcctggaaagacctggtacccaggagatgtttgtttggaatttattattatcattattattgttgttgttgttgtttctttttgaccaggtacagggtttaaaaaaaaaaaaaaaaaggtaaaacaaatctcactcccatccttggcctcaagtctctaattcctctccccaggacaacagggttaacaatttccagagacagcccgtacatagaaggaatgtttactgaaaaaaatgaagaggggtcagggcaaggcgaggagcaagaagcacccccaaggaaacagagaagaccagtacaactgtacctctttgccagctgcaccatccgtaccaggttcgccctggggagtagagagcaatggagacatgaggagctccaacccagtttggtgtcagatgcctcactttgtacatggggcaagcccagccccctgttccacccagaggccacgatcctccagccctcaccctctgacaatctgggcacaggccgtggaaacttagacccccaccccatactccagcgtgatcccagagccccaacagctcccagcccccgtctacaagagctttacaagggaagaacagaccgtgcctgccttgctgtgtgcttggatcctggcaccttgcacactccctggctctgaatctatgttaaacgtttgctgaatgaacacatgaacagcctgagccggccccctccctgagaccagcaaggcagcctctcttctggtggctgctggggaagaggactctgattgctaggcaagtgggagattcatccaggggccatggaggctcctgagcctgcaaggagggaggcagggtccttggcaggaatcagagcgaataggcgtggtgagactgggcccgcctggcagatgggctgactggagtcaaacaccccagcccaggccaccagccccacggtcactgctgctgccccccagaaaaagtctgcgttgatggaaagcatcctgatgggtcccaggagacctgggtccctgcctctgctctcccaggagacttttcatccctgaccctggcaatcagttgcacctgttagggttcacctgtctggaacttttgagagaggtagatttgcagagtggctaaggacatgagttctggaatcaggcaggctgggatcaagtcagagctcttccactcactagctatgtgactccgagcaacctgcctaaccttgcggagcccccgtttcctcatctgtaaaatggggacaatcagatccactaaatggggctgcggcacagattaagataaaatgcacagcaagcacttagtccaccattcggcacacatcggtgaccgatatatcagcgctcttagtgttaaacgtgagctgagaccaagtcctggtttccgaggacctcaggaagttacagtaacagcactgcatttctggttcctgacatttagcaagattttctgtggttactgacaagctcccctggggaaggggaagaggcagaacagggacacgtagccaaggggtctgcagaaggttgatgctgaggcaccgtcatgggcagtgacctcatgtgcagcctggcacagcactgcagggcctatccttccaaattcagcatgatcctcaggcccgaacgccacgctgccatcctgccatgctgacagcctctccttccttagagaccccagatatgttgtgctgtgctcaacaggccttgagccaattgactctttccccctgggctatgctgtagaatgtgggatcttactggggggccagggtgtccaggggggccgggctggcctgggaggcctgcaaggcccctttctccggtggctcctcggtctcctttcagaccctagagaataggaagggggacagtgagaggggaggaaagcaggcaaagtggactcccatatagccagagacagacaccccatcgtgtgccagggactacagggagaggtggcactgcctgaacttgcagcaggactctgagatgacctccagccctctccaaagccctctgccacatcctggaaggcgagatctttggaggcaggagaggctgacaccagggaaggaggggatgagacaaactgttctccatccccccagcttcctctgaatggagcccacagtcaagcagggcaaaactcctgggagggaggaaggagtggagcatgttactcaccactgcagagatcccagctggtcctggctggcctggaggccctggtggcccctaaagagagatgagtcagtgggatagaaacaggttctaatagtaagacccctgggaggcacagggcctgacagcagaaacaagctctaaacttcagcagctccatttcctctggaaaccttccttcgctctggtcttgcacttgagcttcggacaagatttgcgcccagagctgaggcctgggggtcctgggcacacaggaccctccctccaacccaggctgagtggagcatctggggctgtgctgagggggatgatctgaaagccgtggccagaggccaagtgcagaggacaaaggcctgggggagttactccctggcctaggtggctactgagacccttgcttccctaaaggcagtctacttcctgctgttctatggaggagggaagaccagaagctgggggtccgtgtagcagggggtgaggggcaggggcttggcactgaccccgacatccatagtgacaaggagctaacacttgctggccaacactggagcgcacgggactccaacacccagacagtccctgctgctgcactagggctgcgtctgaaatgcccttccctagctctgatgcctacatcatgcctctgtggtgcaaaagatcacctccctgatcagagtgacaccttctctgaacccccggggcacttgggtctctcttatagtgcttccctcaacacccccaggtggcacgttccagagccatagcctctgttctattcatctccagtctcctggggtggaagtgtccagcacagagactgccacactgcaagacgaaggggctggacacacggaagagagaggcggaaccttgcaccccctcaacctcagccctattgagtctccaatggggccacgcttctgagtgcacctccccgtgtcatctgtaatgtgagggggaaccaggcttgatatggcattcccaatccagggcctctggaccccttgagatgcataaaaatagtgatgggggcctgagagttctttttttttttttttttcttaggtcatgaactatttttaacatttccgaaagcctcctggaaattattatgcagccagccacaacagggctgcaacaaaatgccagtatcttcgcttttctctggagtcccatcagctcagtgccgtcacactgatcaaaggcactgcctggcagtcatctatgttagtgatgagtaaagtagacaggaaattcattgttgcttgataaatgtcctctccaagtcaccccatcttgggaaacacaccacctatttacccagttgcccaagtcaaatgcaggagtcacccctggttcttctctttctgtcactctgtctccccaaccccaatccagctcatcagcaagtcccccaagcctggcatggcacaggggctccacaattatttgttgactgaatgacctccatctgataagtgaacttgaatgtgcccagaaaataagaaaataacgaaaagcctggaaaccacagaaggagtggcccccgtgctcccacggctggggcagcccctatggcaagttctctcaggtcatgacagcctatgcaccaccaaccaccccgccaaaatgctaactcttatggagacagagacaaaagtggttcaactcacaacgtgtcccgggggaccgggtcttccctggggtcccatggcaccaggttcaccctgcaggagccagaaaaaggaaaaaatgacactgaaactgacttgcttgcaccatgtggctgtcggatgggagggggctgggcagaatacatggtaatgccaatggccaaaggagctgggccaattcccagcctccagacccaagtttcccggagagttaggtagagaaggcggatcctcagcctgagcaggccaggccctgcctttttaggttggtgacccagtaacctccagggagcagaaccagttacaacccttaataggagggagaaagttcaagacgtgcagtgttgggtgacacccctcccagaaggctgaggacagaaagcagccactttgccagtgagcaggaagaagcggctgcatcccagactctgcagagtctgaaggcaaactgaaggcagccatgtggatccctggccctcacctctgcgccaggccggccagtgctgccagggggacctggtttgccacagtcaccctagaagagagaggagcagctggagcttaccagaccttcacttgacatccctaccccaagtcaacctcacatcagagggaccctgccacctgccccagctttggccagaggccctctgatgccctccagctggtagacagagaagccctgacccagtctgccaggcaccagtggccccaggaggctctgatgctgggatggcctctctgcccaggataggctgccatgtatgcctgggggcaagccttcaggagagcagagataacctgcttggcagaggtcaccagcccttaccttaggtcctgggaggccaggatgtcctgttttccc

SEQ ID NO: 7501 - DNA, 347 bp, Homo sapiens
tcgtagtgtccctagaaggtgacccgtaatgggtgtgctccagcaggatgactggtggaggtgtgaaccccacatatgggtgcctctcaggaggatacccttcaagatagataactatagagatatgccctccagcagaggtgactctgggagggtatctctcaggtgcccgtcgctggtatgccctgccatggtaactgactggcgtacacctttaggaaggtgatggatcagatgtgtgcttattctgaggggcaactgtcaggagaggtaccccagatggatgctgccaccaaagtgtatcatatcatcagatacccaacacttacctgtccaagtcccccacc

SEQ ID NO: 7502 - DNA, 53163 bp, Homo sapiens
attgtaagattgtgaagatatataaaattgatgaattaagagaaattatgccactttcctatagtttctgtgttctgtttattgtatggtgtattcactcttggaaaatatgtaatagttgtgtatccagaatatgtgtcttcacctgaatatttaatctttatatttacaaaaaaataagttccacaagatggacaaaaatggtccatgatatttagcttaaattgtaaccttttgttgtgtatataaaacttccttggaagaaaataaccttattgttttcttaaagctaaacagaataggattggtactcattaattatgtcttgcaaatattttctaaaaattcaaccactctcctaaaatggtgtttaaatattttgtagggcagaatatgcatattgcctgttagcaagtaataattcattctcatagagaaatgggtttttacccatggaagtaatcttttttttttcttttttttttttaattttttttttaatatactttaagttttagggtacatgtgcacattgtgcaggttagttacatatatatacatgtgccatgctggtgcgctgcacccactaactcgtcatctagcattaggtatatctcccaatgctatccctccccactccccccaccccaccacagtccccagagtgtgatattccccttcctgtgtccatgtgatctcattgttcaattcccacctatgagtgagaatatgcggtgtttggttttttgttcttgcgatagtttactgagaatgatggtttccagtttcatccatgtccctacaaaggacatgaactcatcattttgtatggctgcatagtattccatggtgtatatgtgccacattttcttaatccagtctatcattgttggacatttgggttggttccaagtctttgctattgtgaataatgccgcaataaacatacgtgtgcatgtgtctttatagcagcatgatttatagtcatttgggtatatacccagtaatgggatggctgggtcaaatggtatttctagttctagatccctgaggaatcgccacactgacttccacaatggttaaactaaagagcttctgcacagcaaaagaaactaccatcagagtgaacaggcaacctacaacatgggagaaaattttcgcaacctactcatctgacaaagggctaatatccagaatctacaatgaactcaaacaaatttacaagaaaaaaacaaacaaccccatcaaaaagtgggtgaaggacatgaacagacacttctcaaaagaagacatttatgcagccaaaaaacacatgaaaaaatgctcatcatcactggccatcagagaaatgcaaatcaaaaccactatgagatatcatctcacaccagttagaatggcaatcattaaaaagtcaggaaacaacaggtgctggagaggatgtggagaaataggaacacttttacactgttggtgggactgtaaactagttcaaccattgtggaagtaatcttttaatgatattttcttattatattgctacaggcaacatcagtagaagcctatctagttacactaaactaaagatcacattcaccattcttacagccaagtggttgctggtcccctcataacttttagttacttaagttgagtaaatgtctaattgtttacaaactaaattgactaaataaggtcaaggataatgtttttcattgattaaccatttattatacatataatctattgaatataaaaagattcaccttgaaataatatttgactatataggtacatatctgtaaaagatgaccaccttaactaaatcagattttacatttataaattttatatttaattagtcaaatcaatttttaaatcataactccttaatctcataagaagcaataaatgcataaagcattatattaaaataccagggttacttatgtcattgacagggaaaagactttgtataaacaattatgcaccatctatttttgtactcttactcatgatccatttaaaagtctactcagctctagattagataccagaagaccctctaagtaactgataactgagattcgggaccatgtcttgtttgccattgtgcccttggaatttaatacaagtgcctaacccacagtagggttgattgattcactgattagttttactgccatgtgcctataactataggttattctctttccttttctatgttgtgtttattctatttattctctacaatatataaaatgtatttgttctctacaataaatgtgtttattctctacaatatataaaaacatattggactactattacataattaaattactcttttatttgcttaaagagggtgattattttttcacttaccgttccactgagcagcaaccgggactggtcaatagatggaaatcaatcccaatttagagacaatacctggccctgctttgacaatcctgtttcacgtttgccagagtcatgcacttccttacttttgtatataggctccagagaagtttccattaagtgaaacagctatattaattttttaaatatatctttatttaaataattggatgtctggactttatcccaacgtttatttatcaatttttatagttgtcttccaatatatcttttatcatttattttgtaacacattctttggaggtctgtgatttatagtactatgataattcccttattgactcattattcaaagttagatgcagtcttctaatcttagctatttggcataagaagcaatagccaaggggatgtatcctgtactttatgtttaatttgttcttcagtaactacatatcatttatatcagattatcttaagtattaacaggattcacctggatcaaattctccagtgaaagagcttgtatcggtatttctagtaagtgccgacaaatgagatacataattaaccaagtttgggaatcactgagctacatcaatcattacactagtttccctttgttgtgctgaacatagaatcataaaatactaaaggtaattttcacatgcttcctttccctgctgacattgccttatcctgaattgctaaaacaagcctctcgatgtcacggaattaattgccttagttcatcataaaggaaacattgtttaacgaactgaatcttagctgagaagttaccacaacagggactcaaagacttattttctttagttttgttgtgtaatcagcaacaaaggatctgaagataaaactttttccacaaagatgcaaagtgtttcaaacattaattgtatgtgtatgtgaccaatttgagatttcactattgatgtttcacaatatggaaggaaggtaaattatctgtgatgattattctctttcccatcttatgttttttgcaagtctcatcattgctgatatataaaggctgatatattcattttacatatctaataaatgggatttaagttatttttttcctatggacagtagcaaattgcccttagccagtcacactatggtcaccagtgccctacttctaaaatgacaaagataaagggagccatatctggctaaataagttaattagccataaggaatggactctatgactcagtgccaccaaccatcacagaccatcaccaattacacactccatattcatgaccaagagtttcgttttcaggccattatttttgctaatctgcccactgtgtaaaataagtagcttggtggctggcaagatggccaaataggaacagctccggtctgcagctcccagcaagatcaatacagaagggggatgatttctgcatttccaagtgaagttcctggttcatttcattgagactagttagacggtgggtgcggcctacagagggcaagccaaagaagggtggggcgtcacctcaccagggaagctcaaggggtgggggaactccctccccagccaagggaagccatgagggaccatgccgtgagggatggtgcacttcggcccatatactatgcttttcccatggtcttcgcaacgtgcaaaccaggagattccctcgggtgcctatgccaccagggccctgggtttcaagcacaaaactgggcagccgtttgggcagacaccaagcttagctacaggagtttttttttatcataccccagtggtgcctggaacgccagtgagacagaactgttcacttccctggaaagggggctgaagccagggagccaaatggtctagcttagcagatcccggccccacagagcccagcaagctaagatccactggcttgaaattctcgctgccagcacagcagtctgaagttgagctgggacactccagcttggtgggaggaggggcgtccaccattactgaggcttgagtaggtggttttcccctcacagtgtaaacaaagctgctggaaagttccaactgggcggagcccaccacagttcagcaaagcctctgtagccagactgcctctctagattcctcctttctgggcagggcatctctgaaagaaaggcagcagctccagtcaggggcttatagataaaactcccatctccctgggacagagcacctgggggaaggggcagctgtcacacagcttcagcagacttaaacgttcctgcctgccagctctgaagagagcagtggatcttccagcacagcgctcgggctctgctaagagacagactgcctcctcaaatgggtccctgacccctgtgcctcctgactgggagacacctcccagcaggggtcaacagacacctcatacaggagagctgcagctggcatctggtggtgcccctctgggatgaagcttccagagaaaggaacaggcagcattctttgctgtcctgcagcctccactggtgatacccaggcaaacagggtctggagtggacctccaccaaacttcagcagactgcagctgaggggcctgactgttaaaaggaaaactaacaaacagaaagcaaaagcatcaacatcaacaaaaaggatgtccacaaagaaaccccatctgcaggtcaccaacatcaaataccaaaggtagataaatccacgaagatgaggaaaaaacagcacaaaaaggctgaaaattccaaaatccagaacgtctcttttcctccaaaggatcacaattcctcaccagcaagggaacaaaactggacggacagagaatgagtttgacgaatcgacagaagtaggcttcagaaggtgggtaataacaaactcctccgagctaaaggagcatgttccaacaaaatgcaaggaagctaagaaccttgaaaaaaggttagacgaatggctaactagaataaccagtttagagaacataaatgacttaatggagctgaaaaacacacaagagaacttcgtgaaacatacacaagtatcaatagctgaactgatcaagcggaagaaaggatatcagagattgaagatgaacataatgaaataaagtgtgaatacaagattagagaaaaaagaatgaaaaggaatgagcaaagcctccaagaaatatgggactacgtgaaaataccaaacctacatttgattagtgtacctgaaagtgacagggagaatggaaccaagttagaaaacactcttcaaggtattatccaggagaacttgcccgacctagaaagacaggccaacattcaaattcaggaaatacagagaacaccacaaagatactccttgagaagagcaaccccaagacacataatcatcagattgaaccaaggttgaaatgaaggaaaaaatgttaagggcagccagagagaaaggttgggttacccacaaagggaagcccatcagacaaacagcggatctctctgcagaaaccctacaagccagaagagagtggggggcaatattcaacattcttaaggaaaaacaacccagaatttcatatccagccaaactaagcctcataagcaaaggagaaataaaatcctttacagacaagcacatgctgagagattttgtcactaccaggcctgccttacaagagctcctgaaggaaccactaaatatggaaaggaaaaaccagtaccagccacttcaaaaacataccaaattgtaaagaccattgacagtatgaagaaactgcatcaactaacagccaaaataaccagctagcatcataatgacaggatcaaattcacacataacaatattaaccgtaaatgtaaacaggctaaatgccccaattaaaagacatagactggcaaattggatgaagagtcaagacccatcagtgtgctgtatttaggagacccatttcacgtgcaaagacacacataggctcaaaataaagggatggaggaatatttaccaagcaaattgaaaggaaaaaagcaagggttgcaaccttcgtctctgataaaacagactttaaaccaaaaaagattaaaaaaagataaagaagggcattacatgatggtaaagggatcaatgcaacatgaagagctaactatcctaactatatatatatgcaccaaatacaggagcacccagattcacaaagtaagttcttagagacctacaaagcgagttagactcccacacaataatagtgggagactttaacaccccactgtcaatactagatcaacaagacagaaaattaacaagaatattcaggacttgaactcagctctggaccaagcagacgtaatagacatctacagaactctccaccccaaatcaacagaatatacattcttctcagcattacatcacacttatcctaaaattgagcacttaattagaagtaaaacactccgcagcaaatgcagaagaatggaaatcataacaaacagtctcccagaccacagtgcaataaaattacaactcaggattaggaaactcactcaaaaccacacaactacatggaaactaaacaacctgctcctgaatgactactaggtaaataacaaaattaaggtagaaataaatgagttctttgaaaccaatgagaatgatgacacaacgtaccagaatccctgggacacagctaaagcagtgtttagagggaaactgatagcactaaatgcccacaagagaaagcaggaaagatctaaaattgacaccctaacatcacaattaaaagaaccagagaagcaagagcaaaaaaattcaaaagctagcagaagacaagaaataactaagatcagagcagaactgaaggagatagagacacaaaaaaacccttcaaaaaaatcaatgaatccaggagctggttttttgaaaagattaacaaaatagaccactagccagctaatgaagaagaaaggagagaagaatcaaatagacacaataaaaaatgataaaggggatatcatcactgatcccacagaaatacaaactaccatcagagaatactataaacacttctacacaaataaactagaaaatctagaagaaatggataaattcctggacacaaataccctcccaagactaaaccaggaagaagatgaatccctgaatagaccaataaaaagttctgaaattgaggcaggaattaatagcctaccaaccaaaaaaagcccaggaccagacagattcacagctgaattctaccagacgtgcaaagaggagctggtaccattccttctgaaagtattccaaataatagaaaaagagggactcctccctaactcattttatgagaccagcatcatcctgatatcaaaacctggcagagacacaacaaaaaaagaaaatttcaggccaatatccctgatgaacatcaatgtgaaaatcctcaataaaatctggcaaaccgaatccagcagcacatcaaaaagcttatccaccacgatcaagtcagcttcatccctgggatgcagggctggttcaacatatgtacatcaataaacatgatccatcaaataaacagaaccaatgacaaaaaccacataattatctcaatagatgcagaaaaggccttcaataaaattcaataccctttcatgctaaaaactctcaataaactatgtattgaaggaatgtatctcagaacagtaagacctatttatgacaaacccacagccaatatcatactgaatgggcaaaagctggaagcattccctttgaaaacttgcacaagacaaggatgccctctctcaccactcctattcaatacagtattggaaattctggccagggcaatcaggcaagagaaagaaataaatggtatttaaataggaagagagaaaataaaattgcttctgcttgcagatgacctgattgtatatttagaaaaccccatcatctcagcccaaaatcttcttaagctgataagcaacttcaacaaagttgcaggatacaaaatcaatgtgcaaaaatcacaaacattcctacacaccaataataggcaaacagagagccaaatcatgagtgaactcccattcacaattgctgcaaagagaataaaacacctaggaacacaacttacaagggatgtgaaggacttcttcaaggagaactacaaaccgctgctaaaagaaataagagaggacacaaacaaatggaaaaacattccatgctcatggataggaagaatcaatatcgtgaaaataaccatactgcccaaggtaatttatagattcaatgccatccctatcaagctaccattgactttcttcacagaattagaaaaaactactttaaagttcatatgaaaccaacaaaaaaaaagctcgtatagctaagacaatcttaagcaaaaagaacaaagctgtaggcatcacactacctgtcttcacactatactacaaggctacagtaaccagaacagcaaggtactggtaccaaaacagatatagaccaatggaacagaacagaggcctcagaaataatgccacacatctacaaccatctgatccttgacaaacctgacgaaaacaagaaatggggaaggattccctatttaataaatggtggtgggaaaactggttagccatatgcagaaaactgaaactggatcccttccttacaccttataaaaaaattaactcaagatggattaaagacttacacgtaagatctaaaaccataaaaatcctagaagaaaacctaggcgataccattcaggacataggcatgggcaaagacttcatgactaaaacaccaaaagcaatggcagcaaaagccaaaatagacaaatgggatctaattaaacttaagagcttctgcacagcaaaagaaactatcatcagagtaaacaggcaacctacagaatgggagaaaaattttgcaatctatccctctgacaaagggctaatatccagaatctacaaggaacttaaacaaatgtacaagaaaaaaacaaacaaccctatcaaaaagtgggcaaaggatatgaacagacacttctcaaaagaagacatttacgtggccaacaaacatgaaaaaaaggtcatcatcactagtgattagagaaatgcaactcaaaatgacaaggccatagcatctcatgccagttagaatggcaataattaaaaaggaaacaacagatgctggagaggatgtggagaaataggaatgcttttacactgttggtgggagtgtaaattagttcaaccattgcagacaacaacgtggtgattccttaaggatctagatccagaaataccatttgacccagcaatcccattaatgggtatatacccaagagattataaatcgttctactataaagacacatgcacccgtatgtttattgcagcactgttcacaatagcaaagacttggaaccaacccaaatgcccatcaatgatagactggataaagaaaatttggcacatatacaccatggaatactatgcagccatcaaaaaggatgagttcatgtcctttgcagggacgtgggtgaagctggaaaccatcattctcagcaaactaacacaagaacagaaaaccaaacactgcatgttctcactcataagtgggagctggacgatgagaacacatggacacaggaaggggaacatcacacaccagggcctgttggggggtgggggttaggggagggatagcattaggagaaatacctaatgtagatgaggtgttgatgggtgcagcaaaccaccatggcacacatatctatgtgaaaaaatctgcatgttctgcacatgtatcctagaacttaaagtaaaaaaaaaagaattaaaggtcatcagtgtacaatgaaaaaaaagatggtggagaaatagtttccacctcttaatgggagaatagtaagcacatgcaggaattgaaggaattgatggcagccattttgcaggcaagctaccacaactactatggactgggagatttgagggaagtagcaagaaacattattttctaaccacctaaaaggtacaaacgaccactgagggttcactttttgttcattcctcaatgcttcttttcaggtcctctctactgcatagagacaaatgtaagttttgaagtccaaaataattgagttgcttaatgctataagaagttgcatttattcaaaatacaaacacaattcagcttttggtgggattttttatgttttattgtttgattattcactttttacctaccaaattgcaaaacttaaaaatcatattcaaaattgaagagtgtactataaaggagatattttcatattttatagttggaaatgtaaatctacaatactgcaatgtgacagtgagtgtaagtgacattaactaggccaagcacggtggctcatatctacagtcgtagcactttgggaggctgcagtggaaggattgctcgaaaccagaagttcaagactaacctaggcaaaaaggcaagaccttgtctctacgaaaataaaaatttttaaataaaaaattagctgggctgggtggtgcacacctgtagttccagctattcaggcagctcaggcaaaaggatcccttgagcgcaggagttagagactgcagtgagccataatggtgcctggactccagaacaagactctatctctaaaaaaataaataaataaaagaaagatatcaactaaaaaaaaataagtaactcgttcgtatatatcaacagtgcaactttgatgcagtagcttaatgctatttcattcccatctttctctaaaagaatgattaaagtatgtactgtttatacaacattatcagttattattaagtgaaaggccattgacctttaatattatcagagccaagtggatttaggccagctctttgatatctaggccagctccttgactcacagtagtttgagttttctgtttcaacactcatgaagtaaaaagtaatttttaaaattcttaaactttttcagacagccaaaatgttcatcagttatttgaacttggacgtaaacagaatttccagctatttgaatcaattaaactgtctgttaaatctattttataggttacaacctaaacctatcctccaacccctcagtacgtgtgtgtgcactgcatgcacacacatatacactcacattttagcttaacttgctgccttaaataaggctatagttggtatgaaactttatatcactaatgcatagataaatgcaggtagttaaaatagatggcataaagagaaatattcttacagtaatctgtaagtgtatctttcagacctaaatcaccttagaaagaaatttcacttctaaatagatcataaaatgtgtttccagtgatatgagattcagcccttcttctttattttatttatgtattttgagacagagtcttgctctgtcgcccaggctggagtgcaatggcacgatctcagctcactgcaacctcagcctcccaggttcaaataattctcctgcctcagcctcccaagtagctgggactacaggcatgtgccaccatacccagctaatttttgtatttttagtagagatggggtttcgccatgttggccaggttggtctcaaactcctgacctcaggtaatccacccgccttgggtgtaatccctcccaaagtgctgggattacaggcgtgagccaccgcactcggccaacctttctttttaaactaccctttaagatagcactggcaacatcttgctgggttacagtgaagaggctctttttagttcaatgaaaggatgataatgattgtcatgaaagctgttgaactgggcatctatgaaaagtggttgtctccctactaggggatgctgtgtgaaaataaactttggttatttcatcttgattgataatttgttgaatatctgctgtgttcatctttgagtaacaaaatataattcagggatattatttgttggtgtagtgcatagctatgtagtatatttaaaataatataaaatcttaagaaataagtatctttattatacttgctttacagatgagaaactgaggctaggatttaaatgatttatccccaaatcactgatttaaattctgaccatctgactctagaaactatccttttaaacagcatggggtaggtgtggagaggaggttggtattgaaatgttatatctgcactggaatctaggaaaagcagaattatgagatctcagggaaagtgaggactgggacctgtctagggacagtccactccctcaattccaactccctgtctctagtttctcgtttttcttctgccccattcttatccctgcctacttctttctcacctttatgaaccattcctatccctaagactaaatcttctggcttctcagtccacaactatctccatttctcagattgtctatttcaaagtatcaagcaaagaatctaccttgtgcagctcatcttttaatcttatacatgacaaagacaactgtgcattacacatcactttgggtcaggagtctacctctgacctaagaagctgttgtcaggtagtatatgccggttgggagtaatgaggagaaactagcacagtctagagagtgatgtgaaagcaagaaggcaaacacaaatcacaaccagtagttccaaaaaaagactaatgagactgggctggctactgattattttcctttgagggaaaaaaaaaagagattgagagaggaaaaacctttcctctatcacataagcactaaaatgagctgttgtctaaaacccttggcctttcgtctcatgttctctcaacctatctttgttccagagaaagggaaagtctaaagaaggctgtacttttcttttaaaacatgaaaacaaaacaaaatctcttgccataagactccaaatattgactttttaagcccaagtttcatttctctatgggaattactgcataacacatagcttacgagacattttctcacaacttcccactcaaaacaagcagtaacaccctaccaccaccactacagaattgcactatccctaacacatatgatcattacaagcacattttggacagaagcagccatttttcccagtgacctatcacttgtggacacttatatgtgccaagcacttggcccaggcagcacaattcctatgtccttggcaaacaggaaggagaagacggcaaaaggcagtgatttggggtgacaagttttcactagaaaataggagcgtctcttctttattcccacttgactgaacttccagcatatattcaatgtaacaaaaacattatattggaaacacaaggcatccaggcctttggccaaaaatgtaggggaaaaaaatagaaagcctaatatttcatgggaaattcttggcttaaataatattttaataaagcttagctacatatgccaataaagcatagagatgacatactgatttatgatttaaatatcattatagtctctgtgatgctggtatcattttgtatcaaacaatatgaaagaggaaaaatcactggggaaaagaagagaagagcaacatgaaatcaattgagatatcagtagaatgtttattgcatataccatctaattaaaaatttgctgtaagggtaataatagctaacatacattgagcagatatgatataagccttacaagtataatctcttttgatcttgaaaaaatttccctgaggtagatattattatttccatttaataattgagattcataaaggctaacttgagcaaggtttagcagaactcagaggcaaactcaagcaatccaacttcaaggccacactcttagtcgtgtgctatactagaataaagattaatttagtgaagtcaattatttgttttgggaataaatgatttatactgtatgtgttaatactgagtgtcaacttgactggattgaaggatgcaaagtattattcctgggtatgtctgagggtgttgccaaaggaaattaacatctgagtcagtgggttgggaaaggtagacccacccttaacctgggtgggcaccatctaatcagttgttagcacagccagaatataaagcaggcagagaaatgtgaaaagactggactggattagcctcccagcctacatctttctcccgtgctggatgcttcctgccctcgaacactggactccagtttctccagctttgggacttggactggctccttgctcctcagcttgcacatggcctattgtggaacctcaccttgtgattgtgtgagttaatagtccttaacaaactcccctttatatatacatctatcctaatagctctgttctctaaagaaccctgactaatacagtatgtgacatataataaagaataattatgtgaatctatgtagaatactattgaaaagagaaatggaccaggagacctgacttctagtcttgattctatcaattgaatatatggccttggatttatcatttaaaggctgggtccccatttcctcatttgcaaaaggaaaaccaaaagacatgacaataactaccctgttggcctcactgagtttttattaatctcaaataaaatgatgggaaaataactttataacttgaaaagcacattccaatacggaatgttagtatgagagcccactacattgaccataccttaatgagcactacatgagatttttaaaatcacagaataagtgttttatttcctctaaaaacaaattgactatccaactttgcaaaggtgagatcgtatattcaagataagaaattgaataaaaatagctccagaatattgataccctagaggtcctggaaagggaaaatccaaaatcagtctgctggggtacaatctagatcccatagggaggaaaaaaaaacaagaaaattaactcacattcaaaattaaaaccacatgagaaaacacataccaagattggaacccagacacaaccaataggaatattagcacaataactagaaatcattataaaacaatctataagaagttttaaagtatgtatgtttgccagtaagcatgtgaaaatgtgttcaacatcattcctcactgggaatgcaaatttaaaaaactatcccctaaaatggctgaaatgacaaggactggcaataccaagtggggtgaggttggaactctcatataactgcagaagggagcgtgcatggcacaaccagtatggaatactggcagtttctactaaggctaaataggtacctataccaggacccaacaatttcatgctagggcatatatccaggtgaaatgaatgcttatgcccacaatagatcttgtacagaaatgttccatagcagctttatttataatagtcaaatttataatagtcaaacaaacataaataacccatatgcctgtcaataggagaatggataaataaatggtgttatattcacaaaatgaaatactattactggaatataaaacaacctggccacatttcacagacactctgttgagtgaaagaagcaggtactaaagagtacctactgtgttattccatgcatacaaagctcaacaacaaacaaaacaaactgctgatgaaatgccataaaaaggtgagctctgctagggagcaattacagtctaaaaagggcagaaagaaatcttctatggtgatagatatgctttatatcttaatatctgatccatgtggtagttaattagttgtacatataggtttttaaaaggtggttaaaaaaaatagaacttctaggaaaaaaacctctaaaattattattaaaattcagtggatatatcaaaccataattaagcttagatgatgagagaattatttccattggaaacagatctagaatgcagtgcagaataagtagataaaaaccatggaagaacaaccagaagatatggaggataaaatgaaaaggtctgaactagggatctcagaggagagaaagagaaaatgaggagggttcaaagagccaaaaactattcccaaaagaagacatttatgcagccaataaacatatgaaaaaaagctcatcatcactggtcattacagaaatgaaaatcaaaaccacaatgagataccatctcatgccagttagaatggtgatcattataaagtcaggaaacaacagatgctggagaggatgtggagaaataggaatgcttttacactgttggtgggagtgtaaattagttcaaccattgtggaagacagtgtggtgattcctcaaggatctagatccagaaataccattgacccagcaatcccattactgggtatagacccaaaggattataaatcattctactataaagacacatgcacacatatgtttattgcagcactgttcacaatagcaaagacttggaaccaacccaaatgcccatcaatgatagactggatagagaaaatatggcacatatacaccatggaatactatgcagccatcaaaaaggatgagttcatgtcctttgcagagaaatggatgaagctgcaaaccatcattctcagcaaactaacacacgaacagaaaaccaaacaccgcatgttctcactcataagtgggagttggacaatgagaacacatggacacagagagggcaacatcacacactggggcctgtcagggggtggcggttaggggagggatagcattaggagaaatacctaatgtgtagatgacgggttgatgagtgcagcaaaaccaccaaggcatgtgtatgcctatgtaacaaacctgcacgttctgtacatgtatcccagaacttaaagtataataataataataaagaaattcagactcagatgatttcaaaattattctaagctttcaagaagcagctaatccctactctatatacattatttcaaccgatggagaaagaatacacaccaattctttttacaaagactcataacatttacccaaaaccagacagagaaaacacagaaaaaaataatacagaccaatctcattcacaaatatttatgcaaaagtcctaagtaaattgtttaacaaacatgatccagcattatattaaaataacagttcacagtgaccaattggagtttaacctcaggaatgtaaaaatagtttaattttttttaatctagtgacttaattcaccatattaactggtcaaagaagaaaaaaatagataaacttggtagatgctaaaaaggcattttgtgtaattctttatccatcactgatttaaaaaacagaaaagtagtaaaaacataccaccttaaagtgataaatatataaattatatattctggaagcattttattaaaatcactaagaagagaaagcatgcctgttatcaccatttttgtttatcaataatctaacaatactaacaaattcaggctaagaaaaaataaaataataaataatgaattacatcctaattattaaggatgctgtatccaagttataattatttttaaaaatattgttttagggccaggcgaggtggctcatgcctgtaatcccagcactttaggaggacaaggcagggagaggatcacttgaggtcaggagttcgagaccagcctggccaacatggtgaaaccccgtctctactaaaaaaaaatacagaaattagccagacttggtggcaggtgcctataattccagctacttgggaggctgaggcaggagaattgcttgaacctgggaggcagaggttgcagtgagttgagatcgcgccactgcactccagcctgggcgacagagcaagactccatctcagaaaacaacaacaacaataacaacaaaaaatatatatatatatgtagttttaggtgtcctgggcctgtgctaaatcctttacatactcaactcatttaatctatacaactctgagaggtagatgttagtccatttcgcagaagaggagattgaggctcagagtcgttaagtatgttattcaaagtcatcaaccaagtaaatggcagaactggcacctgatctcgtctttctgactgtaaacctctgtgaacttaaatggaaggttatactatagctcatgcatctcccataatttctcaattttttaaagaaagattgactttcaaatccataataaatttcaagaggagatcattttattatcccatcaattctaacaaaaaatgaggtaatttgacattttaaattagacacaactctcaaacatgtaattccagtgtgaacttgtttagaaaaaatgacctggtgaaagtttttctggcacagaacatttttaccttaaaaaaaaatcatttaacagcagaaaaaatatcctggcttcattgggcccaacaagtctaaatatcactttaaaactttcaacctctataatcctttctatagctgacagttttgaaaggtggcaataaggacctgctctacagagagttctggaaaatgtcaggtttctctttccaagcattgcgtgagtcactaattttggcaaaacataatgacatgaaagcatagcaatggatcaggtgatccttgggaattgctttttccctgagtttcagaaatcctgtgaagagttcctgtgaagaattcctatggcaggacagatcccaggctcacgcgaacttacctttctttggcatgagaacatgaaagcataatttcaggccctgaaaaaaatcaacagtgacagccactatttctcatcttctcttgggagagggcctactagctttatttataattagtattttgtagcctaccagtagaacataatcagcatgggtactctttctttgatggaaggaactacttttctcttggaaacactattacagtaaaacacatgtgttgatttctgagtccttattttattaccagtatcttggttggctcctttttagtccccagtgtcttaattaagttcaagagttgaggagacggtagtacaagtattggttagttataatagcactctgagggttggtaagatctcaaaaatattcaggtctataaaatgataaaataaatctgtgagctgtagcttttccttcctacccccacagcctgctctgagaccttcttgaccatcaccaaactaaaaccagccctaagatattaatgagttgatatttattaagtacttatcacaggccaggaactatcctaagcatcttatattatctcatcttgccctaaaaataattctatgaggttctaatacctggctgggcaagagaatctccaggataacttttaaatgtgctttattttattagaagtgtttataccttttcattaaagatattttaatttctgggccaaagatcatacttcttattctatccttgctcaatagaagtctggtggggcatgaaatcatattaccaggtgtttctcgtgcagctggaccatagttggacaatcatctccttgagatattgtctagtaagaaaagcacaggatttggaatcagatgttctgagtctgtcatagctttctacttgcttggtaagtgactttggaaagtcattttgctaaattctaatcaattcgtgtgcaaaatgagaaaaataacctaattttcatgcaactgtctcaaggattagggtcagtgattttcataacctagttacctggcagactcccaatccttattcattgggtaaatggagagaacagtgaaggcacttcccagttttcccagctcttcttctgcctttcctcttatccatctgctatactgattttcttattgttcttcaagcacatcaaactatttcctgcctcaaagcttttacacttgctcttgggctgcctgaagcactctttcccaagttgatcatacagttgattctttattcaaatgtcactgttttaaagaggtcttttttgaaccctatctaaaactgtcatctctggccctagttacttttgatccttatctcaatttattttctttatatattttaccactattaataattatgtaatgtattacttgtttgctaacagctttctccccaagaatgccttggagcagggatgttgttttgctcacctagatgcaaatcaaagggtagttattgttgtgagtgcctcctttcctgacctttctgattcacacctgtgagcttgctaaagtatgaggagctgagcttgcaaagaagaaatggggtgaccttatttaaaacagagtgatgcttttctgcacataaatagatacatatctcaaaaagaaatgttctccgaattcactggaacaaataactgagaagagttatactgtcattcccattccatgataactccaaaaaagtaagtttataacatgctgttttgattactagtttatgtaacaattttattaagttgattccaaagcaatatgttccaaagtggtttatacgaggacactagtaaagcagcatactaagcaaatagaccaaccattatttgttcagctaacatgactcgtttccattgccattttgaagaccctccaaatttttaagtctaatatggctcaggaaatccaagagtttgaagtctacaagtcatgtcaaaggcaaagtcaacaactggaagaatttcacccttgctctcaagggtactttcagaaacttcactgatttgcatttggtaatcaaagcagcagacaattaggaaaagcatcaacctaatattttctctacttgtctaaaggcacttgacaagctttgtttcttaagagaatgagaatgtcagaaacccaaagaaaaatgctcatagggtctaaaaggaacctggcagatgctgacttacaactgaaccaaaatcttttaattgctttttaattgcataaatttctgcaacatgagtaaattctaacaggattcctgcatactcaagaaaattataatagtaaataaaattagctgtgttctaaacttattactgatatcctctggtagtgtgcaaattagtcttcactcctgaaagaacaattaagaaaattattgaacagttaagaaaatatacctaacttttagtggacaacagcatatagtgattgaataagcagatgaataaaataagccctaagtagtaaatgtgctcttgaaaattaattgatttttttttgccaatttctcagccagaggcaaatttaaatgttcactgtttggaccataatatgagggagagctagaggtcagtcaataataaatatttattgagcagttactatgtgtccagaaagacttttgggggatagaggtatatgtcagttaagcttaaaatcaagttgtaaagagaaacttagctagcaaatgccagacaagtttaagtattgctgacttagagcaattagggaagttagggaagttgctaaagaagggagaaatggataattttgcaggagtgtccaatcttttggcttccctgggccatattggaagaagaattgtcttgggtcacacataatgtacaataacactaacgatagctgataagctaaaaatcacaaaaaaatctcataattttaagaaagtttacgaatttgtgttgggcagcattcaaagctctcctgggttgcatgcagctcgcgggccacgtgttggacaagcttgatttaaaggtagagcaatatagtaaagagaaaagtgagaataagaaaatttttgtagacagctatagaaacagacttcaaagtgaattccaaaagttcacatttcctatgtgggttctgagaaatagttgcaaaaccatgaagggtagagagagatgagagagaaaatgcaagagagagaaataccatgttttgaacactattcctacttcttttcatttgacaagtatttattgagtacctactcttgggatctcggaacaatttgagaccctgggtgtgtggtgatattaaacaatgtgctctcatgcagcttccacttagtgcagaaaaactagttgaaggacaaagacatacactgcttaaggaaacaatgtagaaagggaatacaaagaaaaatatatatctgtaatattcttatagcacacattctttaccatttaaaatgattactatttgttcttaggcctactattgtcaaacatttacttattaatttcttcaaatttgatctttattatgtgccctgattttgaatcaatcaagttaaattactgactaataaaaatatgacattctgttatgaaagcaagttgaaacgatttaaaattgcgtatttggaagaatacatctcaatgaaaaaaaagagtctgaaatatgtattataccaaaagaacagaattttcagagaattcagatatggatttttttgttgcaaatcttctcataaattctccacagtacttcagctcttctcattccaattttcttattatttttctgttactatgataaacatcacagtcacctctgacttttcccttttccaatattgactctgtataacattccttttgtatgtatttgtatagtgcccactgatgttacctattagcccaagacctcattccttctctaattaatgtaacagtttccagcaccctcttctgccagttacagaattttggagcccagagggactatactcaagaaatgcaacccttaaagccattatattctctgcttctggatcaatcctcttaaaacaggctcttattgtgtagttttctgatcaaaatctttccatggcttaccactacatactgaggactcctcagcttcttttgttgagcatttaaggctgtctatgcattttttaaggccccaatatgctttttcaactttgtatttttcattcattgattcaaaaatattttttgagcccatttataatttaaatggtgctagggccttgctacaaagatgaacaagtcacagccttgccctctagcagtccccagtttaagggagggggtacaggagtggtgggaatgggtgtgacgagtacatgaaaatctcattaagtattgagagtaggtggtaacagcgcctgcccagggagcactgaactcaagtgtccaatcctgctgtgtagccaacttggcttcatcaatgctgacgtgggctgtcttttctctgcttttctgtataccctaaatatatctaggcttacaaagcctagatcagatgccaaataatccatggatttttccttagtctcctactcttaaatatctctcatttgaattcccatgacattttaaaatttcctttcctattctaatcacatccctgcttgtattagagaatatctctcttactacaactgtctgcctcttaaaagcaacaactatgacatatatttatatatctctagacacataaacctaaaaaaagcttacaaaggtgttcagtaaatgttccccaggctaaaataatgaataataatgtgtacaaagtcaaaggtaaaatagaacaatggcgggaattgactatacaaactgattcttcatagacttgtaaaactattatactacataaattactgcaaaaattaatgacagtagaaaggaggactaccactaacaaactaggatcctgggcttacaggggttaaggagatctaaccacaaggagaaaaaaaaagttcttaatttgccttcattaaagactaattttaggtctttggctaattaaatgaatacattgtttatgctccatacactttcggctcgagtcttggaaaatacgtggaacttccaagaattaaagtttccattaacgcaagtgccaaaatcaggaggcttgacctgtgggaaaaagcacatttgtcttcgctggctccttttcaaaaagctatagatgtttattgtataaccttttttgtgcgcaaatgctgttttatcattcagacccatctagacagaggaagaagctgcaacatttcagaaagcaaccaattactgaggaccgaatgacctggccttatcagcgctgaagtgttaacggccgtccctgtttggggtaaaatttcttcattgggagccagtcagtggtttctttttttctttcttttccttaaggggccgggggtggtggggggcagtcgctgttttgaggtgtgtgtgtgtttaattccctgagaactggctttggctggtgaagaaatactttactatagtgggtttcagaacatcttccacctgtatctctcctagcaggtggaaatttaatgtaaataattgtgtgtgcccacagcttgaacgctttggaagaatattttctgacctctctgcttttattcagtccgaagtagcccagttatcatgaagtagcccagttatctacctagattacaaaataaaattaaaattaaatctccttacgtcagtgaacttggagtcagaaagttctctcccctgagcagagagccttttaaagacttgtgtgtcacgctggcggcagggggtcgcggctactggaaaggagctggctctgcaggtcccgccctcccccgggtcgtccctccctctggcctgctccctacctcccggggacttgcgctcgccccctccccgcccgccccctactccgcgacaacgtcggcttccgaggtctggcgtgcgtcaaagccctaactgggaggctgatttgtggagcatcgcccccccgcccccgcccccccagtccctcctccttccactgaagtggccaagggagttgagctgagcagggggaggggaagatctacacccatcccccttcctctagccctccctgcgtttagattcagttgcaccttttattattttaactcttctccttaggacacgcagcccccaatttgtccctccggcctgggcggcccctggtcccgcgcgccagcatgggagagcgagggacctgcccgcggcccgccggcgtgtgcaaggaggtccagccgccgcgcccgctacccggagtctgtaagtttcaaagctgctccgggggagcggaggggggaggctgtccgtgttcccgtaaatgatttaaaatgcaaaacaccgcagaggcttgcagtgatggatggacttttcggggcacactccctactgcaacccgcaggctgttgtcttgggttttttcccccccgcaccttgtatatttgattccttcgttgtaaaaaaaaaaaaaaaaaaaagttttcaatttataatattatgatttccacaggaacctttttaactctttttagatgcaactcatacttctttcgcatttaaaataattcttataacttataaattctatagcacaccacttattataattttgtcagattacacgttatttagactgcgcaaggagtcatggcctttgcttacttctaaaaataacggaggaagaattttctctctttacttttaatattgctacatcatctaagtactttaataagtagatcgtgcacccaactggtcttaatcttcatgactgacgccacgtgctgtagccttgcactaatttacagacgcggttaatcgcagagaattatctttgagcctgctgtttaccggaaggctcctggttttgtttaactaaggctatgtccatatgtactcagaataagaaaaattgaaacagttctttttattaaaaccaagtaatttttctgagatcccagaactcaagcacaagctagattcatgtttgggttagtaaaaatcacatttttggttttgcatgtcacctcgcacatgtacagacatatccttgaatacaaggacccaagaggtgaggatagggtgggtttttaagtttttaataaatgtttccctcgtgcaggaggacgggtgtccagggacggagaggcaggtgagagggaggtggctaagctggctatggtgacaggacgatgttggccagaaagagtatcatcccggaggagtatgtgctggcgcgcatcgccgcagagaacctgcgcaagccgcgcatccgagaccgcctccccaaagcccgcttcatcgccaagagcggggcctgcaacctggcgcataagaacatccgtgagcaaggacgctttctacaggacatcttcaccaccttggtggacctgaaatggcgccacacgctggtcatctttaccatgtccttcctctgcagctggctgctcttcgctatcatgtggtggctggtggcctttgcccatggggacatctatgcttacatggagaaaagtggaatggagaaaagtggtttggagtccactgtgtgtgtgactaatgtcaggtaagaatgtagtgggatgaggcaggggttgaaaacagtagagaaaaaatgtcaaaatgccctttctcttatcattctgttatttaattgaaagtgaaataaagggtttgttttagaatcttcagaaacaaaaaagcacaataaagaacaacacctaacacagtaagtattttttaaatgcagctttatggagaagagtctctgaaaacctgagcttcagtcctttggactagccttgaaaatgttataccagttatcaaaaaaaaattgtaattcaaaggattacacagagtgctttactccaaaagcgcacacattgagttcagtatgaaaaagctgttgtccatagtttcagtgcccacaggtaaatatctctgatcaacaaaaaatattgtgctagtggacatttttcttgactcttctaacccatgacattttcagaaataataagaaaaaaatgggaaggccctagggggagagtgtcctagattaaaaatctactaaaaaatgaaataaatatcatcccttctttatcgagattatcataacatagctgattgcttgcactggattcagaaattaaaagttatgctaagattcagaactagaaattgctaatttttaatgacaattagtccaaaattttatggaaggggttatatagaagcaatttaattttgtactcttctttcaaagtttaaatagaatagggacaagatagttcttagattacctaactttggcttctttctcatatcataagtatctcaaagacaggtaaattgatttcagtgattcacctctcttgctttcacatggtttaagaacatttagttgaggtgatttctttgtttttttcggggggaggtggaaagagataaattatatcaattaccaagatgttcactgtgaagcaaaagagtagtaataatactggaaaattttccaaaacatttttaaaagaacattttaaattcacataattcacaaagcaaagaaacttgaaaaagcattatgataccaggaaactgtaaagaatgggacctctagtgaccctgaaaccttattaagctagcatatcactgcagaaagtggaccccagactgtgaacttgtccacccttccatttgctaaggaactacaatgccagcctttcaaggaggaaggcagcattagtgcgcagagatcacacaccacagatttcagctcaaattctgagcagcaaaaactgtattgaattgatctattgcttttaatattgattagatattattttcttttttcaaacttctcacaaactgttgtctcaaagaaaatgcagctggaaaacatagatcatcagtataccagatataaagaaaacacaatacttaaaatatccgttaaaacgttcaatagatactctaagatcaaatatcattatctataatatatatctttaagaaacttactggcactgataattggtgaatcattttcatatcaaaataaagttttaatctaaattatatgatactgataaaaagagaaaaaagaaatggtaacagcaaaccttaaaaatcttcattctctcccaatgagaatgtaaaaggtgactaataataattctaattctttgcatttttccctttgtgaattcaatgtccaaccatatcactaaaattggaaacaacatttttcattgaatattcaccagtatttccaaataatgtttgaccattcttctcttagggtgactcattttctcctccatgtattttctcctgcaaggagtctctttgactccatttaatatgagtcaaaaaatagaccaatatatttcctctttctcgatattatccagcctacctctttctgtaacagaacaaagaaacagctaaacacttttatctcttgagattgtttagcatagcaagtgtcagtaaaaagctgggtcttgtaccatatgtaatatttagaattcataaacaatatacaaaatgtggctcatgaatagtctcttaaaccattaaaacaaactatttgggatatttatcattagactgctctctgaggtatggatacattatcagaaatcagtgttgtatccataccccttctctggggtccatttttattcttgccatgttttggggctataccagatatctttttgtgggtagttagtgcaataggcaattactgtagttttccatgaatcattttagcaacaaaagagaaaggcaactttcgcacttcacttaaaagctaatcaaaagaataatccatgtattcttgcttatccctcataattttctaccaaagtgcactgtacataccaagtactcaaatgtttaaacatttttctcacctgctgtctgtagcattaataaataggtaatactttgagagattgctaatgtgtaggcttgtcttctataaagttagagaagtttgaaattgtggttgggggcaaagatagaactaatattgtttctatgaagaagccacagcagtacttgttgtgaaattaagtgttataaattgatagtaacaaatgtggtgcttcccatatgggagtaaatcagaatcccctgagaacttttcaaaagcatcttacccagatccaacctcagcctaccaaatcaatgtctattcactaagatagggagtagatgtgcaatttgaaaaagcttcccaagaaaatcctacaacttcttggttccttccctctgcttctttcacaggattaggccaaagtgagaaaattcaagttagtataatattaattacaggtataccttagagatattgcagttttggttccagaccattgcaataaagcaaatatcaaaataaagacagttacacaaaccttttgtttcccagtgcatataaaacatttatattatattgtaatctagtaagtgtgtaataccattatggctgaaaaatatacatatctcaattcaaaaaatattttaatgctaaaaaatgctaatgttcatctgagccttctgcaagatgtggtctttttgctggtggaggggctagccttgatattgatggctgctgattgatctgggtagtggttgctcaaggttggggtggctgtggcaacttcttaaaatatgacaatgaagagtttgctgcaacaattgacttttcttttcacaaaagatttatctgtaatgtgtgatgctgtttgatagcattttacccacagtagaacttctttcaaaactggagctaatcttctcaaaacctgccactgctttatcaactaaatttatgtaatcttctgaattctttgttgtcatttcaacagtgttcacagcatcttcaccaagagtagattccatctcaagaaaccactttggttgcttgtccagaagaagcaactcctcattcatccaagttttatcatgagattgcagcaattcagtcacatcttcagaatgcccttgtaattctaattctcttgctatttctaccacatgtgcagtgactccctccactgaagtattgaacccctcaaactcattcatgagaattagaatgaacttcttcccaactcctgttaatgttaatattctgacctcctcccgtgaatcacaaatgttcttaatggcatctagaatggtgaatcctttccagatggttttaaatttactttgcccagctccatcacaggactcactatctatgtcagcaatagccttatgaaatgtaaatttcttaagtaataggccttaaaagtcgaaattactccctgactcatggctgtagaatggatgttgtgttaataagcataaaaacagcaatcaactccttctacatctccatcagagcacttgagtgactaggagcattgtcaatgggcaataatattttggaggaatctttttttctgagcagtaagtctcagcagtgggcttcaaatatttaataaatcatgctgcagacagatatgctgtcctctagcctttatagttctacttatagagcataggcagagtcaatttagcataatactttggggctctacgattttcagattgatcaatgaccattggcttcaacttgatgttaccagctgcattagttcctaacaagagttagcctgaactttgatgctttgaagccaagcattgacttctatctagttatgaaagtcctgggtaacatcttcttccaatagaaagctgtttcattttcaacactgaaaatctgttgtttagtgcagccacctttactaattttcttagctggatcttttggataacttgctgcagctcctccatcagtacttggtgcttcacctagcacttttctgttttgaaggtggcttcttttcttaagcctcctgaaccaatctcttctagctttaaacttttcttttgcagcttcctcacctctcatccttcatagaaatgaagagagttagggccttgctctaattcaggctttggcttaggggaatgttgtgacctagttggtcttttatccagaccactcaaattttctgcatctcagcaatgaggctattttgctgtcttatcatttgtgtcttcactggagtagcactttgaatttttttcaaaactttttctttccactgttcacaacttggctgtttggcacaacaggcctaaactttggcctatcgtggcttttgacttgccttcctcaccagcttaatcatttttgcttttgatttaaagtgagagacagcgaatatttcctttactcgaacacttagtgttctttgtagggctattaactgacctaatttcaatagtgctgtgtctcagggaataggaaatcctgatgaaaggggaagaaacaagggaacagctggtcagtggaggactcagaacacacacatttatcgattgtttgccatcttatatgggcatggctcatggtgccccaaactaggggttcccaatccttgggctgcagaccagtactagtctgtggcctgttagaaaccaggccacatagcaggaggtgagcagtgggggagcaaacattacctcctgagctctgcctcctgtcacatcagtgggggcattagattctcataggagtgtgaaccctacggtgaactgcgaaggtgagggatctaggctgcgggctccttgtaagaatctaattcctgatgatctgaggtggaacagtttcatctcgaaaccatttccccccacacacaccccccagtattgtcttctacaaaaccagtccctgttgccaaaaaggctggggactgctgccctaaacaattacaataatgacatcaaatatcactaatcacacatcatggtaactgatgtaataataatgaaaaagtttgaaattttgtgagaattaccaaaatgtgacacacagacacaaagtgagcacgttttgaaaaaattgtgataatagactggctggatgaaggttgccacagaccttcaatttataaaaatgcagtatctgcaaaatacattacagcagagaagaataaaataaggcatatctgtatgtgaccttgacacagtcatttactagtttctgcccctagttctccctttaatcatttcagtattctccagaacacctagagtagtgctccccaacctttttggagccagggactggttttgcggaacgccaatttttccactgatgggggtgggggatggggatggtgtggggataaaactgtcccacctcagatcatgaggcattagattctcataaggagggataacctatatctcccacatgtgcaattcacaataaggttcactataccatgagaatccagtgcctccactaacctgactggaggcagagctctggcggtaatgctggcttacccactactcacctcctgctgtgtggcctagttcctgacaagccatggaccagcactggtccctggcctggaggtggggggggggggggttggggacccctgacttaacaaaattagatcatcaataagacacttttctttccaaatggaaaacaactcccttctattaaaaatactagttgtttggaataatgtgttttatactagtttttttagcactgtgctatttctatatgagacacaaaataagtattagctaatgaatatgattttaaagattataaataataaattcactcagtactcagtaccttccatatgactcaagtctcctaaacatagatacgcaataaataataaacatctacctggtagaaagttttacaaagtaaactgtgcctttgtgaaagtgaagtatttcgcaaggtaaaatatgcatatatatgaaaatatattaatcttttacacaaattaggcccatcactatgtgacctatgaaacattaatagaatgttaatagaattaggccttagcttaagggaacttaattaatagaatgttaatctccagaagtctggaggtagatgcatgcaagagagagagagactgttctaaacacagtttagaattaggcattttacaagtttaagttggctagtctttctgcaagcatttaatagtctttggtggaagaaaatgaaaagctcagcttggcatatttcattattcaaaatgtgacctgatggtgttcttttctgatatcattcctcacaggtctttcacttctgcttttctcttctccattgaagttcaagttaccattgggtttggagggaggatgatgacagaggaatgccctttggccatcacggttttgattctccagaatattgtgggtttgatcatcaatgcagtcatgttaggctgcattttcatgaaaacagctcaggctcacagaagggcagaaactttgattttcagccgccatgctgtgattgccgtccgaaatggcaagctgtgcttcatgttccgagtgggtgacctgaggaaaagcatgatcattagtgcctctgtgcgcatccaggtggtcaagaaaacaactacacctgaaggggaggtggttcctattcaccaactggacattcctgttgataacccaatcgagagcaataacatttttctggtggcccctttgatcatctgccacgtgattgacaagcgcagtcccctgtatgacatctcagcaactgacctggccaaccaagacttggaggtcatagttattctggaaggagtggttgaaactactggcatcaccacacaagcacgaacctcctacattgctgaggagatccaatggggccaccgctttgtgtccattgtgactgaggaagaaggagtgtattctgtggattactccaaatttggcaacactgttaaagtagctgctccacggtgcagtgcccgagagctggatgagaaaccttccatccttattcagaccctccaaaagagtgaactgtctcatcaaaattctctgaggaagcgcaactccatgagaagaaacaattccatgaggaggaacaattctatccgaaggaacaattcttccctcatggtaccaaaggtgcaatttatgactccagaaggaaatcaaaacacatcggaatcatgacagcaagataaccccaagacagtcttttatcaagttttgacggtttatgctgggcactgccagactgaaccagagctggaacacaataatgtgtccttctacattttattacactaaatgatattcatattcaagcaacagcactttctgtagtaataaaaagtaacacaccaagtggaggattcatggcttatgcttgtttcatacatgtagaattcgcagtgatatacttaagttatgtgcaggggtgggtatgctcgtttctctcaatttgaaacacaagaattacactaatagtaacaggccttgagcacaaaatttggtcaagaaatgagtctgtttgaaatgcttagttggtgaaacccagatcgctgtgttactaatgatcactctggaaatgcaaatagaataggaggggaaaaaacaaaatcatgttaatgcgttttgtacatcagccttctcctgtctccatgataactgcatttggtaggaagcctgaggcaaaaactgcttaagtggatctgtttgtaagtggattcagttcattcgctttgtctgtcggtgactcctgaaggtttcctggtccatctcattgcggcctgttgggcagagctggacaaggtgtctttgaaggaaagctaagtcttgtctcatttaggactgggttccccacagtgacagtcacttccttcagcatctcacttcttcttctagaatccccacagggaaatactgtattgaatattttattaaaacattttctttgtactcactgtagttttgtgattcctctttcacaaaatcatcccaagttaaaactcaagatgtttttagagccatgtaaaagagatgtcaaagtgataacactcactctgagattcctctctctcaagtctgtttgctccaaaactagcttttttttgctttgttttgattttatttcaggttttaaaatgtcctcttggtttttcaatctaagcctgacataccataaaaatcctataagcttttttttttaatcttcaatctcccatcttaaaactatacttccttcccagtagtatctgaatttaggcttggcatttatagatttagcatcatctcatttgctaaagtgagattttctatcaaagcttcatttaagcatatttagtgcctgcttcttcaaggaagggatgagacaggagagagaagtactaggttaataaactatatatgcttttattcttacattttatagctaaacatcagaaagctgagctattgtgaaatctttcacacagatttgggggtttgtatttatgaacattgaaataggtaattatgaaatgttctatcttaagactcatgattccaaccaggtgaacagaaactgtttatcacgtcattgagttaatcattcctgaaagggttctaactgttcctctgaactccagactcacagatcaaacaggcacctgaggctccacttggagattgaacaagcatttcaaacttactaggtctaaaaccaaatacttcattctcactcacaaaagctgccctcctcccagtctttcttccaatcactcaggcatcaagccatgacctggaagtcattcttgctgcctctttcataccctacatgccatccattagcaattacctctcggctctgccttcaaaatatatccagaatatgaccaattctctttactccaccacttccttcatagtccaagcaaggatactgtatatatgcatgcatctgtaccaattgtttgaatattaaaacatttctgtctaggttgctaaagactatcttaataaaacttaacccaacagcaactatggaggtggatatcagacctcaaagcagttctggaacagatgcaggttcccaccttcccaccccagggcagctgagcagacccagaggtagctgccacacaatccagcagtaagaacatggatagtgccttcctgctgctcagtagtagcccaactttgtagaggtgacacaggctgtgcaacaggtgatgtcaggacatagtggagctgagatgcaaaatttctgagtccagggtctagagaattccctggcaccaggggcaaagctagctatggagtacgggaagttcccccagccaccttccagctgcaactaaacgctgagtgtcaaggacctaatgactgtcaatataatgggcatgtcaacgaaaggttatgaggggctccctatgtcaagctgtggctcagacagggacatcatttagctagagacagccacaccaaacaaaaggttctatcaacaatttctaaaagtctgaaaatgttttagagagtattaaaatgattttctgacctatttttgctaaaacatatttcactgggtaagcaattttgagaactacatagttttagaagataagacggactctgtacatatatatgtgtacatgtatgattttgacttacatattgtgtttaaatattattttatattcagtattttggttctctgcttctaccctttcttccacctccataattcatacagcagccacaatatttttttaaatcacaagtcaaactacatgacacctcttcttaaagccctcttctgcctttttcattttcttttttttttttcttttttgcagacagagtctcactctgtcgcccaggctggagtgcagtggcacgatctcagctcactgcaacctctgcttcccaggttcaacagattctcgtgcctcagcctcctgagtagctgggattacaggtgcgtgccaccacgcctggctaattttttgtatttttagtagagccggggtcttaccatgttgcccaggctggtctcaaactcctgagctcagataatctgcccacctcggcctcccaaagtgctaggattacaggtgtgaaccaccgtgcccagccctttttatttttcttaaaatgcaaaccaaaatccttaccaaggccaacaagccactacatctcattgttagcgctcttcccctcagagactcctacactttaccacactggcctttctgctctttgagaaagagacatatggctcctgcatcatagatttgcttctacctggagagttttccctcagaaagcctcatgagtctcccctgtcattatttagtctctgctcgagtgtcacctcgtgaggaagtacagtgtaatagttataaaaacagacccagaagccagactccctaggtgtcaatttcaatgttaacatttagcatctgtaaggccttgacaaaattaacttctttgtgcctcagtttccccatatataaaatcagaatgattatagtatttacctcacaaatttgttgtgaggattaagtgagttaacatatataaagggcttaaaagagtataattcagtggcccaggacaaacacttgaaataaaggatttcctttatttcaaaaaaggcaaaaggcaataaaagaaaaaaaagaaggattaccttcaactaatttgcttcttagtaaatgactgagtcattgcattactcttcttttctaggacagagataaaagcactttgcaacatgaatctgatctcttaaaacctctgcagcagaggcccttatatctgcccactcccagttgcttttcctgatcctttgacacctttaacagacacttgcctgtcctcaaacattgtcatgtgtaaaatactacaacgtgtaaaaaggaaacattttgcatacagagatttctgcttgcacttgtctatcatttatttattcatttagtaatatatattgaatgtctgccatgtctgacatttatcatctgccaaaaataactaggtgtgtctattttctttaaggaggagcagaaattgatagcccgggtacatgctgattctggtagtaagtaatcagagatgaaaagtatcaggtaagaaaaactggaatacatgccagaatttgaaaagagacactttcatctcaaaatcaaaatcaaaacatactgctagttactgagtaggcatgggaagacaacggaagacctagaactgtcgcacatacagctttgctgagagctggatgagaaaatagaacattgtccttagaactatcatttttcctgctttatccccataccatagttttatttcgacaattccttattgtttgcatctcagctcaagactctctctaaagaaaatcattgttgcccttgctcacagacatttctaaatatccctggccaaaatgttctgacacataagtgtgtctcagaaccgacagtttcccagcagctgaaggaaatgaccttagttcccaaagaaagtctaacttgcagaaaagttactcgcttaatgaacatagggcagcattttctcccctccaatatttggattcattttgttgttgttgtttagcgacttggcattcatggagccagttttccctttgataataaatcaattgtagataaagaagaaagaatgaaaagatatctacatctcctggggctcccactcccaacttttgttattttcagcatggaaggtagaggcagaactgtagttagtgtctccaaggaccagtgcattaaagtaaccataacaaatcctacaggctgtttaagaggaaacccaagggccatgttcttcccatgatctttatgcacaattctcatcaatggtgatgggaatttccccacagacctagaaaggatgtgactcttaattacaccccttgataatcacactgattcaagtttaagttcaagaaaatcttaatcagtctttagcttcagatcaaaatattacgttggagcccactttcattttaggttatttacatcttcatgaatactcttttcaagaagtgttcccgttctcatgaagattttcttggctgtaccatatggcactccttcctccactccaatactccctggggtagttggaatgaaactattgccttacattgagtttatcttaattatttgaaggaacaaaaatattaaagctagatttccacatactagtggattgcttcagtgggtatggaaaagtggaggctaaaacagttgtctgtaaaactgaagtttatagtacttcaaaaggcttcacttatttgccattgattgttgaagaaagttcacattctttacacatgatagtcaagactctttgtggtttgattccaacacacctttcctgcctggttttctaaccctacccacaacaccttatgaagcttcaagtttactgaatgcttcactcacattctgcaagttgctgagattgaaattctgtgctttctctatcaccacaaactactatttttacaaaaccttctcaaattctccacctaaatcactcctttttttaatccctacaacgtttacctctatttattggttatttcataataactggtattatatagcttttgaatatcctagacatctctctccactagattgtaagtcctttccccaattacttatcactgtgcttgcctaaatagatggcgatagtagcctgatagttaccaccccaaaatccattattcattttccttcatagaaacagagtttaagctggacatatgaatatccagcgagagattacacattcccagtagctgtgtcagttacttacggtcatgtgccaaatctggggctcaatgtcctatgaacagaagctagtggaccactttcaattcttgattttaaaaactctgagtttgtatgtcttgaccttttgcacgttccgtggagtgagcacatgtgtgatggaaatccagctttgaccaggctgatgaagataaaacctgtggagtaaataagacggaagtaacctggcacagcaaatcactttgtgcaacagggccttgcaagcctgggcttcctaattttagccagttacacagatgagaataaacatctattttattttggtaggtttttggctttttcttttttttgactgcttgtttgcatgttttcttactacactacagtttggcctctattctgaataataaaaatgctaaattatcaaatgcaaaggtaacccacagaatggcagaagatatcttcaatttcatattctacaaaaattcatctctagaatgtataaaaaactcttagaaatcagtaaaataaacttgggcacccaaatagaaataattgacaaacaataggaaaaaattacatcacaaaaaagagaatccagaaagccaacacacatatccaaaggtacttgatctcagtagtaatctaatgcaagtgaaaagcacaatgtaatgccattacacactaccagaatggttaaactgaaaaagataagggcaagtgttgaaaaggatgaggagcaactggaacttaaacatactacaagcgggagagtgtattgtcataactgctctgaaaaactgtttggcagagtcttgtaaaataaaatacaacaaatgctatgacttagcagttccactttaggtacatctacagatacttatataaaaaatttttatagtatcactgttactataggtccaaactgggaacaacccaaatgtccatttacaataaaatggatatgtaagtatcaatatgtttatacaatggactactacagaactactacaggactactactacacaatgctctgtaccaggcattgtgataaaacctggggatacaaattataaaccaagtcaccacaaggtgcctatagactatagcctaacaaagacatttaccaaaaagtgcctgcaaagatatattacaagacagtggttacacgcaggaactttggagtcaggcagccctggcttctctgccacttacagtagtgggaccctgaacaagttcccctgagcctcaatttacttaatatattgagtaaattagtattatagtacttagtttatattattatatatactatatggtatgctatatattatatataatatacatatacttattatactatatgtatatatatagttattttgaagtattgatgagaatgtgttcagcacagtgtctggaatatagtaagtgctcaataaatcttaactattatgattactattaatattattttagcaggagcagcaggagaagtatggtggtgctcctaaggtagtgtcaattaaagggcaggaaataaagagactctaacagacagggcaataaagaacgaatgaaaaggaaagaaccagtgaatttattctatatggtcctaaaataaccatcgtgactacacgggaaaacaataagggatgggccccatcttctaccaaaaatgttaactcctacccagccttcaactcataaggtaccacttcctcaagtcatgtgtctaatttcataaacaacatgaatatcttagagctcagtattttaagccaggaaaagagataacaagagtggctatcaaacccctttctctgattctctgatattcctctgctttatagcagaggctacgaaggtacactcagaggttaagtaatttagaaccagagaatcattagaaaacagagtgagcctgagaaggatttttagcccaaaatggtaagctatcccttcagctgatccccttatctttgaaataacccccaaaaaaaaaaaattaaaatcacacttaatctactgcagcctgggtaaacaagaaaggcttatcagtggaaaagaaatttttagaaattcctggaaaagataaagaggatagaatggagttgctgggaaaaccaatcacagctgagacctattacccagattcactcaaaagaaggtatagagtcgctaaacaggggttttgcaacaaaagtcaggaactatccaaagttcagaggtggtagctagtggctgggaacagaagccagagcagacagcaatttcgggacattgcagagctgtagtagatctgtactggtctgcagacagacaataatttgcactgtaagtaactggggaactagtgcctgagacttctaggaatgccaatggtactttgggccctcagataacttgggctaccacaagtgatagacaaagaagacggatggagttgagcatttgaattaaagttttattcaacatgctttgaagtttcttaacatttggttgcaatttacgtttataattatatgaatatatttctttgacaggtcacaattttggcactctctaaagggcctaatttgacatgcaccataaatcttttttaaaaaatcacccagacacataattcaacttacagtatttccattttaggtggaactactcgtaagcagaaaggatttctagcatgacttttgtctttgtagctcaatagtattaccctggatttgggagagaaggtgaactcatttcaagaacggggaactaggtttttcagaacattgcagtagctgtagaaatgtgtgttgtaatggagacaagctacagggaaacatagaaagcttaatccggaatgctggaatggtgaatatggtaaatataactaagaaacaagagggaacttatcaaatttaaatgaaatttttgacatttgaataaaagatttcctgtgtggttattcaaagtaaaattattctgccccagaattccttttgcaaattaccctttaaaccaattgtgttttattgaggaaaaatgtgattcttttctctttttagccttttgttacagaaaatttcaaacatatacaaaagtggagagcttagtataatgaactgcacatagtaatcaccccctcaataatgaccacattagggccaatcctttttcaatttatcagctgttgactcaactacacttttcttctcgtagtaatggaagcgataatggaagtttaaaaataacgaagcagaacctggcaagggccgtaccaggtgttgtgcaaacaaaggactatgtgaacatttttaatgtgagaatagcttttagagattaagtccaaagaatgaaaagactttgagatgggtcttgaatgatggacactatttcaacaggcagagatgggcaaggagggtaaccgaagcataagattacaagttccatgaggccaggaacattttctatcttgcttactattgtgtttccaatatttaacagttccaatccttgcttgataaatatatgaattaattaatcaatgccatttattctgctttggttacctggcccttgccaggttctgctttgttatttttaaccttcccttatcgcttagactacaattttctctagcaatgggcttctttacattcatcttatatttcattactgtgacaagaaaagtgtagttgagtcaacagctgatacactgaattaaaaggcaagaaatatcacaagaattaatgctaagattttacaaaggaattcacagttctgttggatttagggtttaaaggatgtctctatggagctaatcattgatataagaatttattttgtgatagtcaatggtaccaattagtagttgaaaaggcagataaatcacataattctaagagaaaaatcagtgacaaagattttttttctttttgttttttgagtaaaataaatggttccatgtatatgggcatctaataggtctaagggaaccatactatgaatttgacttgaattttaaaagtagatgtaaataaatagcttgactattctacctaaaattgaccaaataccaaaactatatttaactttaattcgctagaatccctatagtgcacatttcaagaggtgtctctcttttgttgttggcacaattcaacttaattatgtgattttccaccccctgttttatgtatttgttttatttttacctttcttgcctttaactggatttattgactagtttttacctccatatacataggaaatgcttggagaaaaatcaatgtgttttatgtatacaatccaccaaatttaaactcttcaattaataagccacatatgagtgcagccaaaaagaagattaaggctctgaaatcaggattttgaatcatcttaaaacataatatgaaactgaacacaatgtcttagtgttctttaccacttaatactactgatcactctcatcctttgggaagttcttatcttttagggcttcagtgatctactttgcagggtgttctcctgacctttctgaccctctcacaggccatctatttctgtggtttcatctgagttgtctatttagatgccactccacacacatacatttattcctctaactcaatacctactgtaaacattctgctggagagcatgctcaacatagcaaaaaacaaattctgtgtattttctaggagtcaccccctcatctgtaatcttttgatggtgagaaccagtgttgaattatagttgctttttcttatcccctaaattatccctggccttcttaataaatcagtctccaaatatcacagatttcctctagcacaatgtcccgtgcatctgtctctttttacactatctttattcttgtccaggccctcattacctgctgcctgggctattgcaatgaactctgatctgatcttcaacccttttttcccactcattcaacatactagcaatgaaattttcatagaagtgaaactacgatcatattttttcttcaaaaaactccaaggtgttctctttccttcttaaattcagattcctcactttgacattcactaatctcccttctgaatccatcagtctccctcctcctgtcatttatttcctttatacaggctaaatcttacccctcttgctgttctctagaaagaccttttctttttccaccttgccatgattcaaaatcctgatttgactcaggtatatataattcaagaaaccttctagacaggcttcctcagagtctatgtacaggtatggacaaactgctgtcaaacatttgagaatttccatgttatattaattggctgtgttggaagacaaaggcagttcttggtgcatctcaaatgttgaagcattttgtcacagctcagagtctaaagcctcttcccaaagcatcttgtggttttcagagccttaaacttctttttggctgcactcatatgtgacttgttaattgaagagtttaaatttggtggattatatatataaaacacattgatttttctccaagcatttcctatgtatatgctatgtcaaatttcttcccaggttgggcagaaaaatctctggacttccaaaaactttgtctacttaaaaattccaataatatatcagatggaaaacttttactcccctatcactggaaaggctgtggcccaaaagatttgaagtgaatgggtggggtgggagtagtctgctctttttatccctctccccttctctcaccttggaggaacagcctattgctagaacatcgctttcctcttcctttttgacaccctgggtgttaaggagaggagggaataaaagagctggtagaaaatatattatgtaactggtatccaatatgtttccatctgtttctagtggcgtctgccaatgtcgtgctctctacccacaagatgtgtatgtatttttcttgggatgacttagcactgttattacattactaagcaccccatcagcaaggggctttctactctctattttttgccagtggccatgccttcactgtctctgtactagttatctattgctctataacaaattaccacaatgcaatggtttaaaacaggaaacatttattatcttgcagtttctgaggttcagaaatttaggcatggtgcaactggatcctctgatgcaggctctctcatcaggctcaaacaaggtgtcagccaggttctctcatgaggcttaattaagcaagtctcatctaaacacttggctaggaaaggatttgcttctaagctcatgtggttgtgggcaaaattcaagttcttggcacctattggactgaggaccagtttctagctgattgttggccagaggccacctgcaattccttgctgcaagagcctcccaacagggatgcttgcttcatcaaagcatgcaagccaagaaagcaatggagagagtttgctagcaaggtgcaaattatgatcttgataatgaaatactggaggtgacattccatcatctttactatattctgttggatagaagagagtaacaggttgtaaatacagggaagctgaggtcactaggggccatcttagactccaatctgtaacagtctcctttgggtaagcctggaccactcccatcctcctaccttattctctatcttccttcacttcgttcttcatgtggagcttcaaaagaattgaagttctcttctgcatcttgcaatggccacaaaaaacctgtctggggtgaggggtcattcccactttcccaggggcactataccactgtttcttctctctgttgtcacaatcaattccagcaagccttataccttctccaaatgacaagctgacgctagagtttatattcatgtactccttgcagattctagggaacacaagtaaaggcttgtcaaaaagtggcccaccctctccatctgagaggacctgtaagttctgcaagttaggaaacatccttcagagcatgtgatggcagtcttcatattttacagacacccctaagcttcatgaatgattctgttaaactggtctcatagagagtaggaggaaaaaccacagaacttcccaccaatctgatgctacttgactttaaccactatccctcatctcacagtcttcttgtacaagcacagaaagtgcaggaaggtttgagggctgtgaccagaggcaggttttgtcatctattataagtgctaaggggttcagggtaaagaggatataagttttccctcgcttaataggacatagtggtatgtaatactctttgaccccaggagtagagccctagttgccaattctgagaaaaatctccctaagcatcctcttatatgtgcaagtctaagaagaactctaggtgttaggctaccagagcctcctctacaccattaacctgtaatcctggatccttgtagccaatctaagtactggtcccatagtctcactttatctacttcctgccatatcttatatttagttgacattttttaaaaagtggtcactttgtccattgtcctagtgatatttaggttttgcactcttagttattgcctctctatcctgtgtcttttcattctcccaaaacaagacaatctcattcactccaaagcttcaattattcagtaactgtgaaatctgagcctcaagccccaatcacatcttcatttgtgcatccctatatttaaatgcacgttagtagagcatgcgtagaagagctgaggttccttagaaatgctaagtcatttctcaccttgtagaaaagaatgaaaaactatagactctttgactgttacaattaaaaggaaactctgagattgtcagccctcttcatttatcagattaggatcctaaaggaaaagttgtttaggagaagttcaaattagtttgctttactcaaagtacactgctttttctactgtataatacagttgtttggaaaaaaatattaagatcataccgtatttaccaaaattgcatatattacaggtattatacaattaaaaccacatactatatatatggtgggattttaactgagagttgctacattgttaaaaaaaaaaaaaaaaaaacttgtttggaagtctgtcctaagcttgcatattataaatgaattgtgcttctttgttttatgagagttgaaatcagacctcttaaacaatgcttacagaaagtactgcttctcttgctacaactggtagtgacccatgttgggggtgacagtacaattgagtctaccagaatgtgagaaaaggagtttttatattgcatctaccaaaaaggaaactccattttagttagaaagaagcttgcattaattcaacatttggatgaggtccaaagtcagttgcagtaaatcttgataactactgcttgtttcaagctagagccaagccgtttgtttattttaaacgcttgctcgatgggttactcccctgggaaaatgaccttgttttcatctcaggcccaagggaagcttcttatgctgtggaatcttattccagaatgtgtctggaatgaagaaagttgcagcctatactcagctagcatgatcatctcattcacttcatcgacaaagcttttgactttctaaaataaaagtaggaagacttggaaattttaacgcttcccttcatcctccaacaccctcatccccatcatccaaaatcacagctgagaactgctcagtgctacctaagttacttagttctcttttacttttggtgcccaaaggtgatagaagtacccaacccccatacagtcagaggaaacccagatgattctacggatgctctgtgggtatgaagcaacttgacaaataggccaactgcaaataacatgggcatctggaaggagcagaaagcaggtttgggttgacatgtaaatgtggagcctgtggtcactctagagtaacacccctttccttctttatctcccaccccaaacacacagttaggaaggcatctgcaatgcagacattggttaggtaccaggcctctcctgtacacacttctaacttgtaaatattcctcaaggtgatagtaccttttgatatctcaatcattaacttgttaatttgatgattgtttttcttttattattatactttaagttctagggtacatgtgcacaatgtgcaggtttgttatacaggtatacatgtgctgtcttggtttgccacacccattaactcatcatttacattaggtatttctaatgctatccctcccccatttccccaccaactgacaggccccagtgtgtgatgttcccctccttgtgtccaagtgttctcattgttcaattcccacctgtgagtgagaacatgtggggtttggttttctgtccttgtgatagtttgttgagaatgatggtttctagcttcatccatgtccctgcaaaggacatgaactcaacttttttatggctgcatagtattccatggtgtatatgtaccacatttttttaatccagtctatcaatgatggacatttgggttggttccaagtcttgctattgtgaatagtgccacaataaacatacatgtgcatgtgtctttatagcagcatgatttataatcctttgggtatatacccagtaatgggatggctgggtcaaatggtatttctagttctagatccttgaggaattgccacactgtcttgcacaatggttgcactaatttacactcccatcaacagtgtaaaaacattcccatttctccacatcctctccagcatatgttctttcctgactttctaatgattgccattctaacaggcatgagatggtatcttactgtggttttgatttgcatttctctgatgaccagtgatgatgagcatgttttcatgtgtctgttggctgcataaatgtcttcttttgagaagtgtctgttcatatcctttgcccactttttgatgggattgtttggttttttcttgtaaatttgtttaagttctctgtagattctagatattagccctttgtcagagggatagattgcaaaatttttctcccattccgtaggttgcctgttcactctgatggtagtttcttttgccacacggaagctctttagtttaattagatcccatttgtcaattttggcttttgctgccattgcttttggtgttttagtcatgaagtccttgcccatgcttatgtcctgaatggtattctctaggttttcctctagggtttttatggttttaagtctaaagtctttaatccatcttgaattaatttttgtataaggtataaggaagggatccagtttcagctttctacatatggatagccagttttcccagcaccatttattaaatagggaatcctttccccatttcttgtttttgtcaggtttgtcaaagatcagatggttgtagatgtgtggtgttatttctgaagcctctgttctgttccattggtctatatatctgttttggtaccagtaccatgctcttttggttactgtagccttgtagtatagcttgaagtcaggtagtgtgatgcctccagcgttgttctttttgcttaggattgtcttggcaatgcaggcccttttttggttccatatgaactttagttttttccaattctgtgaagaaagtcattggtagcttgatggggatggcattgaatctataaattaccttgggcagtatggccattttcatgatattgattcttcctacccatgagcatggaatgttcttccatttgtttgtgtcctcttttatttcattgagcagtggtttgtagttctccttgaagaggtccttcacatcccttgtatgttggattcctaggtactttattctctttgtaaccattgtgaatgggagtacactcatgatttggttctctgttgtctattattggtgtataggaatgcttgtgatttttgcacaatgattttgtatcctgagactttgctgaagttgcttatcagcttaaggagattttgggctgagactgtggggttttctaaatatacaattatgtcatctgcaaacagggacaatttgacttcctcttttcctcattgaaaacccttaatttctttctcttgcctgattgccctggccagaacttccaacactctgttgaataggagtggtgagagagggcatccttgtcttgtgccggttttcaaagggaatgattccagtttttgcccattcagtatgatattggctgtgggtttgtcataagtagctctttattattttgagatacgttccatcaaaacctagtttattgagagtttttagcatgaaaggctgttgaattttgtcaaaggcattttctgcacctattgagataatcatgtggtttttgtcattggttctgtttatgtgatggattacgtttattgatttgcgtatgttgaaccagccttgcatcccagggatgaagccaacttgatcatgatgagcaaactttttgatgtgctgctggattcggtttgccagtattttattgagtatttttgcattgatgttcatcagggatattggtctaaaattctcttttttgttgttgttgtgtctctgacaggctttggtatcaggatgatgctggcctcataaaaggagttagggaggattccctctttttctgttgattagaatagtttcagaaggaatggtaccagctcctctctgtacttctggtagaattcagctgtgaatccgttctgtcctgaactttttttggttggtaggctattaattattgctcaatttcagagcctgttattggtctatcagagattcagcttcttcctggtttagtcttgggagggcgtatgtgtgtctaggaacttatccatttcttctagattttctagtttatttgcatagaggtgtttatagtactatctgatggtagtttgtatttctgtagtgatatcccctttatcattttttattgcatcgatttgattcttctctcttttcttctttattagtcttgctggtggtctatcaattttgttcatctcttcaaaaaaccagctcctggattcattgattttttgaagggttttttgtgtctctgtctccttcaggtttgctctgatctcagttatttcttgacttctgctaccttttgaatttgtttgctcttgcttctctagttcttttaattgtgatgttagggtgtcgattttagatttttcctgctttctcttgtgggcatttagtgctacaaatttccctctacacactgctttaaatgtgtcccagagattctgttacattgtgactttgttctcattggtttcaaagaacatctttacttctgccttcgtttccttatttatccagtagtcattcaggagcaggttgttcagtttccatgtagttgtgccattcttagtgagtttcctaatcctgagttccaatttgattgcactgtggtctgagagacagtttgttgtgatttctgttcttttacatttgctgaggagtgctttacttccaattatgtggtcaattttagaataagtgcgatgtggtgctgagaaaaatttacattctattgatctggggtggagaattctgtagatatctattacgtctacttgttgcagagctgagttcaagtcctggatatacttgttaaccttctgttgatctgtccaatattgacagtggagtgttacagtctcccattattattgtgtgggagtctaagtctctctggaggcctctaacgacttgctttatgaatctgggtgctcctgtattgggtgcatatatatttaggatagttagctcttcttgttgaattggtccctttaacattatgtaatggccttctttgtctcttttgatctgtgttggtttaaagtctgttttatcagagactaagattgcaaaccctgctttttttttgctttccatttgcttgggatattcctccatccctttattttgagcctatgtgtgtctctgcatgtgagatgggcctcctgaatacagcacactgatggatcttgactctttatccaatttgccagtctgtgtcttttaatgggggacatttagcccatttacatttaaggtaaacattgttatgtgtgaatttaatcctgtcattatgatgttagctggttgttcctttccatgtttagtgcttccttcaggagctcttgtaaggcaggcctggtggtgacaaaatctctcagcatttgcttgtctgtaaaggcttttatttctcatttacttatgaagcttagtttggctggatatgaaattctgggttgaaaattcttttctttaagaatgttgaatatcggcccccactctcttctggcttgtagggtttctgccaagagatccactgttagtctgatgggcttccctttgtgggtaacccgacctttctctctggctgcccttaacattttttccttcacttcaaccttggtgaatctgacaattatgtgtcttggggttgctcttctcaaggagtatctttgtggtgttctctg

SEQ ID NO: 7503 - DNA, 857 bp, Homo sapiens
catcgagtacacactattctgacggcagacctggttattgtgatgaagcgaggaaatattttagaatatgacactccagaaagcctcttggctcaggaaaatggagtatttgcttcttttgttcgcgcagacatgtgaaggagtgtcttaaaacaatacatgtatttaaaataatgcagtcataacctaattaatggatcatcagcttgacctctgtaaagtggcatcttaaaacttttacagatttttgcacaaaaagtggacatttatttttcctgtttttaaaacagtttttcaagatattattgcttaatatgttcattattgatgtttttatagtgatccagccactctagctttaagaatagctaggttgtattaaaacatgtaagctactttaagtgataaatcaatagctaaagttttctcctaactttaagtctggtaaatatctctcaggaatggaagtgtcaatgagtagtcagtattactatactcttgtttgtaagaatatattttccttattgttggagtctccagaggttattggaaggaataaaaaaggacatgttttctaacgaaactctcaaattcattatctacttcatgagaatttatttgtattcattaacattagtaatacctatttttcttaagagccttcttttttcccttttgtttcttgtcaccaagaagttatcacacttatacttattctataaggccaaagccttatctagaaagatcatgaagagtttggatatttttaaaactatactcgaattttcattttttcctgtcctgtaaagagagaattcttaagatatcaggcataatgtatgtaccttttccagact

SEQ ID NO: 7504 - DNA, 53163 bp, Homo sapiens; identical to SEQ ID NO: 7502

SEQ ID NO: 7505 - DNA, 857 bp, Homo sapiens; identical to SEQ ID NO: 7503

SEQ ID NO: 7506 - DNA, 184 bp, Homo sapiens; identical to SEQ ID NO: 5421

SEQ ID NO: 7507 - DNA, 131 bp, Homo sapiens; identical to SEQ ID NO: 5432

SEQ ID NO: 7508 - DNA, 187 bp, Homo sapiens; identical to SEQ ID NO: 5441

SEQ ID NO: 7509 - DNA, 220 bp, Homo sapiens; identical to SEQ ID NO: 5444

SEQ ID NO: 7510 - DNA, 143 bp, Homo sapiens; identical to SEQ ID NO: 5446

SEQ ID NO: 7511 - DNA, 141 bp, Homo sapiens; identical to SEQ ID NO: 5242

SEQ ID NO: 7512 - DNA, 184 bp, Homo sapiens; identical to SEQ ID NO: 5453

SEQ ID NO: 7513 - DNA, 125 bp, Homo sapiens; identical to SEQ ID NO: 5454

SEQ ID NO: 7514 - DNA, 183 bp, Homo sapiens; identical to SEQ ID NO: 5243

SEQ ID NO: 7515 - DNA, 154 bp, Homo sapiens; identical to SEQ ID NO: 5469

SEQ ID NO: 7516 - DNA, 162 bp, Homo sapiens; identical to SEQ ID NO: 5244

SEQ ID NO: 7517 - DNA, 1301 bp, Homo sapiens
aaggtcgtaaggcactgggcaaaaacttttccaagaaagttcatggtgcacacgctgacctaaacactggccgacattcccaaggtttttttcattatggaagtgcatggccattgcatggtatccagaaaacaaagaccagagaagccagactttataccaccatctggaaacatttaatttgtgctttaggtaagtgttagcaaatatttaggatgattgatcaaatcattagtgtgtttatgagtgcatggtgtaatttttactaaagctcacatttcttcaggaactcgattcaactcctttacattcctggttattttcatttacttgatcttgaggtctcatctggcagagctgtgcaagctgggacctttgtggcttattttgaggagctgtttactttacctgttgatgggaacttgcaggtgggaggcagccagtcttaaagagtaccttgttagcaagtgtggaagagagtccgcgcagacagacttgccctatgtggtgtcccctctgccagcccagcccttgggcacattggcacctacctgaacccgagccccctcatgcacacagggagccgcacctccctcacacgctcctcaccagtgtgacatggtgtgacgtgctctgtgggtccacaacgggcccactccacagctctgtgcacagcatgctgggtcagggtggtgctagattaataagatgagggtgaatgtcaaaactgagcactttgagtactgtgggcacactgtcacagggtttacccaggaaggaacaacccctgggctccagaagcaggttgaccaggccagtctgagttgtagcattgagactcatctagcggaagtcaatgaggaaggaaaactggctgagaacagctgttgtttcagttaaaatctcagaatgatgcattgaattcaaagttacaacacagcaaaatagtatatgtatttttttaaacctcaaaaatactgtattattaactttaaaacatttttggctggtgtggtggctcacacctgtaatcccagcactttgggaggctgaggcaggcagatcacgaggtcaggagattgagatcatcccggctaatgtggtaaaaccccgtctctactaaaaatacaaaaaattagccaggtgtggtggtggccgcctgtagtctcagctactcgggaggctgaggcaggagaatggcatgaacctgggaggcggagcttgcagtgagccaagatggcgccactgcactccagcctgggcaacagagcgagactccgtctaaaaaaaaaaaaaaaaaa

SEQ ID NO: 7518 - DNA, 2434 bp, Homo sapiens
gatcgcgccactgcactccagcctgggcaacagagtgagactccatctcaaaaaaaaaaagacacatcaaagactaacaaaccaaatccttacattagaagaagtagtgaaataaagatactaaagatccagactcagtgcacttcaaactttttgaaatagctattctaacagatgtgaggtgacatctcattctggttttaatttgcatttctctgatgattattgaacttgggcttttgttcatgtactttttgctcatatgcatgtcttctttgagaaatgtctatatcaagtcctttgctaatattttatagtatttgttttcttgctgttggactgtttgagtttttatacatttgtgatattaatgcattatcagacgtatagtatagaaatgttttctgtcatgcagatgcttcttagagacaaggcctcactccattgcccctaggccaggcctggtgagtgacagcagccctggtgccccagcctgctagggcaatgtgtcacccagaggcttcaaggcccttctcaccatggtacccacctcctcgaagctgcctcccaaagccctctagctgctgctgcagccacaacaagtgccaccaccaggggccttccagctgccagtgcaggctttccagagccggggactggggaacctgcagtcatcacctcagcaattctggtggcagccaggccagccagggcagcgatgatgaccgtaatgaaaagtgggatgacagctccacactggtggatgagttgagaacaccaggcagaggcatgtacctggtctttgatggttcagtggacctgcactaccattgcagtgcaaagtgcaagagttgaagcttggaaaccttcacctagatttaggaagattcaggaaaagtctggatgtccacgcagaagcctgctgcacgagtggaaccctcatggagaatctctaccagggcagtgtggaggggaaatgtggggttggagcccccacacagagtcccactggagcacttcctagtggagctatgagaagagaaccactgtcctcctgacatcataatggtagatccactggcagcttgcactctcagcctgaaaaagctacaagtactcaaggccagcccttgagagcatctacagatgctaaaccctggaaagccacaagtgtggtgctgcccaaggctttgggagcccaccccttgtaccagcacgcccttgatgtgggataggaggtcaaaggaagttattttggagctttaagatttaatgactgctctgcttggttttggacttgtgtaggcttgtagcccctttcttttggccaatttcttccttttagaatgggaatgttgatccaatgcctatacccccattgtatcttggaagtaacaaacttgtttcttattttacagggtcataggcagaagggactagccttgtctcagataagactttggactgtggacttttgagttaatgctggaatgagttaaatatttgcaggactgttgagaaggcatggtagtttgtttgtttgtttgtttgtttgtttgtttgtttgtttgtttgttttttgagacagagtctccctctgtcaccaggctggagtgcagtggtgcgatcgcagctcactgcaatctctgcctcctgggttcagatgattcccctgcctcagcctccccagtagctgggactacaggcctccatcaccatgcctggctaattttttgtatttttgtagagatgaggtttcaccttgttggccaggatggtctcgatctcctgaccttctgatctgcctgcctcggccacccaaagtgctgggattacaggcgtgaaccactgcacgcagccggtagtattttgaaatatgagaaggacatgagatttgggagagaccagaggtggaacaatatggtttgaatctgtgtccccgcccaaatctcatgttgaattggaatccccagtgttggaggtaggacctggtggaaagtgattggatcatggggcggtttctcattaatggtttagcactatccccttagcgctgttcttgtgagagagtttgcatgacatctggttgtttaaaagtgtgtggcacctccccccacacttcctcctgctccagccacgtaagacatgcctgtggccgggcgcggtggctcacgcctgtaatcccagcactttgggaggctgaggtgggcggatcacgaggtcaggagatcgagaccatcgtggctaacacggtgaaaccccgtctctactaaaaatacaaaaaattagccaggcacggtggcgggcgcctgtagtcccagctactcgggaggctgaggcaggagaatggcgtgaacctgggaggcggagcttgcggtgagccgagatcgcgccactgcacttccgcctgggcgaaagagcgagactccatctc

SEQ ID NO: 7519 - DNA, 100 bp, Homo sapiens; identical to SEQ ID NO: 5916

SEQ ID NO: 7520 - DNA, 129 bp, Homo sapiens; identical to SEQ ID NO: 5494

SEQ ID NO: 7521 - DNA, 193 bp, Homo sapiens; identical to SEQ ID NO: 5245

SEQ ID NO: 7522 - DNA, 140 bp, Homo sapiens; identical to SEQ ID NO: 5978

SEQ ID NO: 7523 - DNA, 187 bp, Homo sapiens; identical to SEQ ID NO: 5506

SEQ ID NO: 7524 - DNA, 153 bp, Homo sapiens; identical to SEQ ID NO: 5246

SEQ ID NO: 7525 - DNA, 203 bp, Homo sapiens; identical to SEQ ID NO: 5247

SEQ ID NO: 7526 - DNA, 158 bp, Homo sapiens; identical to SEQ ID NO: 5531

SEQ ID NO: 7527 - DNA, 193 bp, Homo sapiens; identical to SEQ ID NO: 5539

SEQ ID NO: 7528 - DNA, 195 bp, Homo sapiens; identical to SEQ ID NO: 5540

SEQ ID NO: 7529 - DNA, 183 bp, Homo sapiens; identical to SEQ ID NO: 5556

SEQ ID NO: 7530 - DNA, 136 bp, Homo sapiens; identical to SEQ ID NO: 5560

SEQ ID NO: 7531 - DNA, 202 bp, Homo sapiens; identical to SEQ ID NO: 5567

SEQ ID NO: 7532 - DNA, 150 bp, Homo sapiens; identical to SEQ ID NO: 5248

SEQ ID NO: 7533 - DNA, 142 bp, Homo sapiens; identical to SEQ ID NO: 5249

SEQ ID NO: 7534 - DNA, 123 bp, Homo sapiens; identical to SEQ ID NO: 5589

SEQ ID NO: 7535 - DNA, 142 bp, Homo sapiens; identical to SEQ ID NO: 5251

SEQ ID NO: 7536 - DNA, 268 bp, Homo sapiens; identical to SEQ ID NO: 5616

SEQ ID NO: 7537 - DNA, 906 bp, Homo sapiens; identical to SEQ ID NO: 5620

SEQ ID NO: 7538 - DNA, 368 bp, Homo sapiens; identical to SEQ ID NO: 5252

SEQ ID NO: 7539 - DNA, 526 bp, Homo sapiens
tttacaatagcaaagacttggaaccaacccaaatgcccatcagtgatagactggataaagaaaatgtggcacatatacaccgtggaatactatgcagccataaaaaagaatgagttcatgacctttgcagggacatggatgaagctggaaaccatcattctcagcaaactaacagaggaatagaaaaccaaacaccacatgttctcactcgtaagtgggagttgaacagtgagaacacatggacacagggaggggaacatcacacactggggcctgtcggagggtggggatagcattaggagaaatacctaatgtagatgacgggttgatgggtgcagcaaaccacaacggcacgtgtatacccatataacaagtctgcatgtactgcacatgtatcctagaacttaaagtataataatttaaaaaaaagtcaagctataaatagggaaaagacatctgtaatacataaaactaacaaaggattagctgttaacatattaaatagatggggaatctccccaaatca

SEQ ID NO: 7540 - DNA, 6366 bp, Homo sapiens
actaacccgccgctaaagctgcacactgaccgcagtgctgggacgccagtttttgtccctgaacaaggaggttacaaggaaaagtttgtgaagaccgtggaggacaagtacaagtgtgagaagtgccacctggtgctgtgcagcccgaagcagaccgagtgtgggcaccgcttctgcgagagctgcatggcggccctgctgaggtaggcgccctcgcccggcccgtcgcccggccccttctcagccctcggcctcaccctctccttcattcgtttctctaaaaataaacctctagaggtttaaagccctaaagaagtccataaaagcctccgggcccagcttgtgaatcctttagggaggtgcagtgggatcccacgtgtgggtttactgaggcctctgcgtgtctctgacctgccccgcccgtgtcttcccactccgtctgtagagccttggtgcccctcatatgtgttgctgtattttattgaggaacctcacagttccatggaggagatacaccaggaaatgacaagccagtcatttaagggcacgtgtgctggtgtgcaaggatgccgcagagaggagggaggatggggtcagcttaaaggactggacaggtccctacccgagcagaaacctaggccgcatgcttactcagcaggcgtgtgtggaacatgcaccgagcccatggcagccctttgctgctgagtgccagtgctggtaccgctggtggatcatgaaggcaggctggagctttactgcagaatagcatcggccagaagagcaccttgattcaccctgcaggcctcatgttttctggcattgtgctgggtgctggggtcgctgcgggatgccctggtcttggccactgccgtcagggcatgtcggcctgggaaggttgccagctcctcctcccacagcactcaagcctgggctgcacccgagccccagcctgggcacagcagccagccccctgccctgtcacctgccttcaccctcccccttctccatgcttccctctgtggtcttacccactcatcccaaatagtcagctaacctttgcccacttgggggcaaaatgacacttgagcttagtgacagcacaggagacacagaacaccgtgtctcctaacacaagagcctggactacacctctgggcccaggagaagcttcccggtggaggaggggctggagcccccatatatggtgggccacaggggagggaggctggtccccctgtgcaggtgccattggccttccaatagacagtgaagccaaatggcctgtggagaagggctggctgcttttacaacgcaggagcaaggctctccaagtaaacaggtactcacactgaagagctgctctgcagacagctagctttggtttctgaaataaaatttcacttttacattaagtggaaggggctttccaagtgggactgaactaaactgttctacttggtaacttccttttgaaaaatcagcattttaaaaaatgtagcccttttctcccatggcttcctatgtaaagtgaatcaccagggcgtcctgaagctctgctggttgctgtgagccactgtgcagacctgaccataaagtgaatgctcccagaatctcctgagtcctctcaagaaagggacttccactctaatgcagtcacttgtgtttccctgcagctcttcaagtccaaaatgtacagcgtgtcaagagagcatcgttaaagataaggtattctggggttttttttaatcattttgtcacatgttttcagctgggtaatacttttcacatagtttgcattcggcactctggcacaacacattctctcagttttggcagctgatgcggcaggctcccaggcaggacactgtgccatgtgatcacctgggcagacagtggattcagatccacttggccacttccctactgtgtgaactctgtgagctacttcaccccctcacctgtaataatcatatcacctgctaagaccgcagggagctggtgtgaggagtaaggggttgatgtgagcaaagtgctgagatgcctgtctgtggcagggctgtctgtggttgggtcacttccgtcattgcaggtctttatcccagacagcttctactcaactcttacactaggttttaccttcagactcgctaggctgaggggttcatttgagtttgtgctccctgccccccaggccccctgtgatatctttaagtcattagacatgagtgagattagccccttctcgccccctgtggctgtcctcagctagagcccgtgggcgtctctgcacattcagaggatggggctgcccagcctgccaccagcttctctcctggggcctggtccttctcatggagactgacagtcatccatgtgctgctgtaccctgccaggtatacttggagtttgaaacaattcttttcttttctttctctctcctttctttcttctttttcttttttttttgcgacagagttcactcttgttgcacaggctggagcacaatggcacgatcttggctcgctgcagcctccacctcccaggttcaagcaattctcatgccgcagcctcccgagtagctgggattacaggcacgagccaccacgcccagctaatttttgtatttttagtagagacggggtttcaccgtgttggttaggccagtctcgaactcctgacctcaggtgatccacctgcctcggcctcccaaagtgctgggattacaggcatgagccaccgcacccagcaattcattcttaaagtgcttaaaatatcaataaaaatgtgtgtttccctactttgagtaatatacctaaccattttttaaatgcaggtcactaagttgtacaataaaattcttactctggggttttcctgtctaaagcaccttgcagattgggtttgttggtcagagcagcccaggtgagtgcagtgatttgaggattgctggtagtcagtgtccctgggctgccaggcacacaggcatccagtatagccgctctggaagggggagagatggaattggccacctggccctgtaccttttctttctctgcatttacctgctgctgctgcaggcttggttagttccttgagtgaaaacagcccctcccctccactctgtgccttggcctagcatggtactcggccgccttgttaacatgtgcctaacgtgtgagtgagagagaagctcgcgacgatggctgagatgtttttttagtatctctgttttgttatgcagaatcattatccctattttttaatgacataagtagctgaagaaaaatggctagttttatcaaagaatcatgaacgagatgcactcaagttgtggaccctcatggagagaatggagctgtctgggccccgggtgacccggatcctcacccgtcagcaggtcatccaggggtgggcgggcctctggtcttcatctgtaaacagagacattttgagtaaatagtctcagatcctttccattccaaagttctgttgactttagtatctcaagtcatgaccttcttttttttttagtcatgtttatgaaagataagctttggctccaaattagtttatttttaactcttaacagctgttgattttatttctctcagcagtccaaaaaggcacattaagctcctgttattccactttcatagagcaacaggcaggagtttcttagaaataacctttggactaagatgttgtagatcgtgttgttagaaagagtgagagggagctgggcatggtgccttatgcctgggatcccaggactttgggaggctgaggcaggtggatcacttgggctcaggagttcgagaccagagtgggcagcatatggagaccccatctctacaaaaatgaaaattaaaaagttacctgggcttggaggcatgcgcctgtagttcaagccactcaggaggctgaggtgagaggatcgcttgagcccaggagtttaagggtgtagtgaagccatgattgcaccagtgcgctccagcctgggtgacagagtgaaacccaccctgtctctttttgagacagagtctcactctcttgcccaggctggagtacaatggcgtgatctcagctcactgcaacctcctcctcccgggttcaagcgattcccctgcctcagcctcccgagtagctgggactacaggcatgtgccaccacacccggttaatttttttgtatttctagtagagatggggtttcaccgtgttggccaggctggtctcaaactcctgacctcaggtgatccacccacctcggcctcccaaagtgctgggattacagaggtgagtcactgttcccagtcaaccctgtctcttaaaaaaagagtgagaatgagaatacttgtgttttctaagggaaaaataaaattaaaagttgaaaggttttttcttcttcttttttttttttttaaagaaatgggggtctcccactgtcgcccagtctggagtgcagcagtgcgatcatggctcactgcatcctctacctgccaggctaaagcagtcctcttgcctcagcctcctgagtagctgagactgcaggcgcatatgctgccttgcccagctaattttttaaaaaaatttttgtagagatagggtctcattgtgttgcctaggctggtctcaaactcctggactcaagcaatcctcctgcctcggtttcccaaagtgctgggattttaggcttcagctaccacgcccagcctcgttttcattttcaaagggaaatcttttcattattagactaacttcagactgcaatatatgtttaaagagagtgtttttcaaccacaggctaatgctgctttttttggtgaaaaatgagttttaacagcatgacctttagaaggaaccaacagttttacaaatcattccccaaatatggtctcttatgtggtctctccatttctccagcaagcgatctatacaatgtattcagttgtgtccagttctgctcttgtcctctggtgacagctgcaccataatggccacctgctccgtgctggctcccggaaggccccagagtctgaatgtgaacctggtcctcctctgccctcatcctgaaattatgtcaaagttaatagaagatgtttagatgctccagagtgatcgttaattatcaagtctaattcattttcttttggcttaactaataaaagataacagttaatgttatttaaattgtgtctcttagtgggggcagcttcttcattctacttctagaaatcaagatggtccttaatgctttctgaagttcacttaagagttcctctcttgttttttttttttaagtggttttgccttgtccaaagtagcagcatgtggagattaagaaatattaatcctccaaaataatgatctttcattttcaggtgtttaaggataattgctgcaagagagaaattctggctcttcagatctattgtcggaatgaaagcagaggttgtgcagagcagttaatgctgggacatctgctggtgagtagcaaagggacactggaaccttttacatgaaggaattcgagtcccttacatccagctgatgaagtggtcagtaggatgtggcactttaagaccatgttgacattagtttttcaaaacacagccaaataggaaagcagtcagaaccacttgagtataagttgttatttttatgacatcattggcagaattgtcaactggtttttaaacactcccccccctacttagaatagagaaaatctgaattggattttaattttggaaggcccattaaaaccttttttcaccatgaaattctacataacttcttatttttttagttagtaccatattttagcttagaaaattatttgaactggaataaaacaaagttcttagcagatattcatttatcctggaagcagagttgacttaattcttcaacaacaatatggtttgagtaatcatgaaatagaatatgaaattcagtgtctcttggcatacttgttactctttgctgtggaaaactggtctaacagcagatgagaaacatttctttagggtttcattgcatagagattagaatctggtatttcagatttagggtttttttcccaattaagaacattgaatggtctgtcttacaggtgcatttaaaaaatgattgccattttgaagaacttccatgtgtgcgtcctgactgcaaagaaaaggtcttgaggaaagacctgcgagaccacgtggagaaggcgtgtaaataccgggaagccacatgcagccactgcaagagtcaggttccgatgatcgcgctgcaggtgcgggtcctcccattccacaggccttccactcaattcctatatgatacattccacaggccttccgctcaattcgtagataat

SEQ ID NO: 7541 - DNA, 2925 bp, Homo sapiens; identical to SEQ ID NO: 5990

SEQ ID NO: 7542 - DNA, 4704 bp, Homo sapiens; identical to SEQ ID NO: 5253

SEQ ID NO: 7543 - DNA, 11202 bp, Homo sapiens
atgctgatgttcactgagtgtgtgctggacctgacagccatgaggggaggaaaccctgagctgtgcacatctgctgtgtccttgtaccagatccaggagagtgtggtggtggaccagatcagtcagctgagcaaagactgggggtgggtgcccccttgtcattcatttccagacttttcatgctttgtctaaacttgtgtctaagttgtaggtattgtcatccactgaagatcatatctcattattaaaagctaggagtctcaattatttctttgtactacatttcactatatgagccaagacctggagattatgcaacctcagtgttgcctttccttgtaaattatactgttgaagttcttttgtgtaaatagattgtattgatttttatctgagtgtatccgttattttcacagtacacacatctttaactatgccttgtcccttgagagtttacttgtgcattaagaaattaaggagggctggtcgcagtagcttatgcctatatgtaattccagcactttgggaggatggggcagaaggattgcttgagcccatgggttcgagaccagcctgggcaatatgatgaatccctgtctctacaaaaaatacaaaaattagccgggcatggtggtgcgtccctgtggtcccaactattaatattcgggaggctgaggtgggaggatcccttgagcccaggaagtagaggctgcagtaagccaagatcaagccactatacttcggcctgggggacagagcaagactctgtcaaaaaaaaaaaaaaaaaaagaaaagaaagaagaaaagaaatcaaagaggatgctattcctttatagaaaggcaattttaatggtgacctgttgtgtagagtgccacatcttacattagttcacaagataaccctctgctactgtcttttgggtgcaggcgggtggagcagctggtgttgtacatgaaagcagcacagctgcttgcggcttctctgcatcttgccaaagcccagatcaagtccgggaaactgagcccatccacagctgtgaaacaaggtatgggagaaggcagcgtgtaactccaggggtcagtccttaagttgctctttcccatcacactgtgagagagtgtctgatgagtactcactgttgtttttatttttcagtattcttaaagggaaaagatgctgggttgttagctttttgcagttcaattgatagaagtctgaagtgcattattctcaatcttttcatattgaaagagataacatgaaaaaatcctatttctggtcctttttttgaatgatcacatagtgacaccttccctatatatcagcaggaaagatacatataactgtgtctttatttctggaggaaaattaaaattagttcccatctcaattttttttcagttgtcaagaatctgaacgaacgatataaattctgcatcaccatgtgcaagaaacttacagaaaagctgaatcgattcttctctgacaaacagaggtttattgatgaaatcaacagtgtgactgcagagaaactcatctataattgtgctgtagaaatggtaaccctttctaaggtttaatattgtatagtactacttatctttaagtgtctttttaattgaatatctatatgacagctatccttttaaaagataatgtctcaagtcccaagtattgtggattgccttctactaaagaagtaattggatttaagcaactgttaatgtcatttactggatgtattttaagtaattacaaatccgtttaccacatttgctataagtttattacagctcttattaaacattgctggcattaggcatgatctaatcttttttttttctttttttttttttcttgagacggagttactctgtcgcccaggctggagtacagtggcacgatctcagctcactgcaacctctgcttcccagattcaagtgattctcctgcctcagcttcctgagtagctgggattacaggcacttgccaccatgcccagctaatttttgtatttttagtagagatggggttttgccatgttggccagggtggtttccaactcctggcctcaggtgttccaccctccttagcctcccaaagtgctgggattacagatgtgagccaccgtgcccagccgatctaatctttttatagtgtgcatctaaaagcattagcaggatctgtttctgcattttctgctgtttaagaaagttaggcttgataaaactcttaggaaaaacactgctttattaatcaatccacacaaatttatgtgctcaggtcccacttactgatattgtaggatagacacaaagtaaaaccttcttttcctattttctggttttaatattggaaataatttgttttctgcctctcggggaaaaattactctaaagtataaataaaaatagaggctgttgaaaaagtagttaagtgggggaaaattcattagttagccaatcatatgtttttctttttttttttttttttttttttgagatggagttttgttctgtcgtccaggctgacgtgcagcagcatgatcttggctcactgcaacctctgcttcccaggttcaagcgattctgctgcgttagcctcccatgtagctgggattacaggcacctgccaccacacccagctaatttttgtgtttttagtagagacaggattttaccatgttggccaggcttggtcttgaactcttgacctcaggtgatccacccacctcggcctcccaaagtgctgggattataggtgtgagccactgtgcccggcatgccaattgtatttctaacacattaacataatagatccccctttccattttctatttgtctactgtgaactgtgctgttatattacatccgtggccttattttgaaatttattaaaataaccataggaaaataactttggaatataaattcttgacaaaaatagtatatatcatattgctgtaaactattgagatgaataatatgcactgcatcactgtatgctgagttgagacctcatatgataaattatttttagaattttgcaccagaaaaatgtcctccatatggaattataatgctgtttttccttctcagaataaagagccctataacttataaattcctccgttcgtcctggctgcttagtgagcttagaggcattaacacttagttatttttttctttttccttgtcctggctctgatcttctgtatccattttatttgctttattgttagctgcttgaaattattttttttgaaggagagagaatagctaggtgcagtggcatgcacctgtagtcccagctactcaggaggctgagacaagaggattgcttgagctcaggagttcaagattagtctaggcaacagagcgagaccccatctatataagaatgcataaatacattttaaaaattaaaaacaaaaacaagatatagcatattaacaagtaaattcggatactggatttctgagagttctggtacttaatgatcaaagagaaaatcagaatgtcgatggggaaacccctgtgaataatgctaccatcccctctttctggagagccccttcccacatttttcctcacctgattcacttctgctgttgttgctttatgattcagcacaaacagcacctcctggaagcttcccctaatcatcttctccttccgtaatataggttagaggcatcccctatgtattccgtatcatccagtgcttcctcctgtaacaccgtgtgtgccttggcattagaattgcattttttgcaggactgtatctccctccagactgcaagctctccttcattgtaggcgcagtgcctggcactttgttaggtgctcaataagtatctttgaatgaatgaatgactacacccaaaaattatttggctagaaaaagaagccagtaaagccagcaagtgactattagcatcatttaattatattattgaaacaaaatctactttaatgaaatttcaggttacccttatatggaagtgtgtgtttaaaatcaatttataatgaagtcataaaagagccagtttagaagggttctagtatgaaatttatgaagcatacctctgaataccagaaggctgtgtttgaaagcagaccgactttttatgaagttgctcttatatattgctcatcccaaagaatctttgagttttatgtagttttgcagactgtatcactttaccaaaatgtgttaattttaggtggattccatttaaagcttcattgcccaaatggatttgtattttcttggaaaaattgagagaattgtgtttttgttgactggttccaggttcagtctgcagccctggatgagatgtttcagcagaccgaagatattgtttatcgctatcataaggcagcccttcttttggaaggcctaagtaggattctacaggaccctgcagatattgaaaatgtgcataaatgtaagttgacttacaaagtagtgtatttttttacttcattttagttgtctatcacaagcatagtacaaagagcttggagtttggaattctgccttggtttgaatcgtggctttccagccttgtgcaaatcacagcctttgtgtggcctcagcttctttttcataaaataggagtagggccaggcacagtgtctcacgcctgtaatcccagcactttgggaggccaaggtgggcggatcacctgagctcaggagtgcaagaccagcccggccaacatagcgaaaccccgtctttattaaaaatacaaaaattagctgtgcatcatggcgcatacctgtaagctccactgctcgggaggctgagacaggagaatcgcttgaacccaggaggtggaggttgcagtgagctgagattgtgccactgcactccagcctgggcgacaaagcaagactccattctacgtagttaggtaggtaggtagataggtaggtaggtaggtagatacatacatagatacatagatagatatatagataaatagatgcataactagatagatacatagatacagcagtgcctgccttgcagggttgttgtgaggattacaggtgatgcatgaaaagcactggtgactgcgtaattcatctttagatttctacacggtgttactttgttggcaagtgttcgtatatgtaggaggactttagttttattattaaatgtaactgttttaagcctcatgggcttagtgactaaagagtcctgtgaaacttctgtgtactgcagacttggtatagatagcagactggagattgatgggataccaggatgttattacttatcacatacaagcccaataatctggttttttaggcagaggtggtggactggttggagtgtatgtggtcctgctacattttgagtagccacaggaggatggcagttctaagagtatttgcagttatgagcaagctagttatgtagcaagctagctgatgtgcttacctaaattttaccactttgcagcactaagctagaagtcatatctaaactattaccaagcagaaagaagaaaacatattcagaactgttaactttggggcaaagatagaatagagatgacaatatagtgatttttttcattagttcttcatttttgttattttatttctagataaatgtagtattgagagaagactgtcggcgctctgccatagcaccgcaaccgtgtgagcagcaggctcatcccgtggaccggtggtgggaacgtgaggtgatgcctttgggattacagcttgagttctgtcaccccatccccaggaaactgtagcttcttaactggtgactaccaaagaacaagcagtgatttgaaaaaggaaaaacaatccaaaaactacatatttgtaggaaatctgccttattggagaaaatcaccctttccctttttctttgtagaagcaggagcaagagtgtttggctcccagtttggacttggtgaataaatgtaccttagaactaggataatcggtacagttattcttaaagataattaaaaatgaaacaaagtgagtgctcgtcactgggttcatcagagcagtgtgtgaaattccatgtgtttgctgaggtgtaaaggtaaatgtattcacccctcatccaggcagtttgatatttggagtaagtttgtttaaatctgagcatgcatctttaaacagctcaggaagaaatagcttaagaagaagtgaaacatggatcttggaagaaattttgaaatcttcaatttgatcctaatatggatacatgttaatcttccaaaatctttcatattgcactaatttattaaaacaactgtgtattggattttgtaatttaactaaggcacaatggacttgtttaaaatattttacttgattgtatacatagaccctttccagaattcacatgtaatctccagtgaacttttaagtggttaaaacttgtattcatgtgaacctttgcacattttttttttttacttctttatctacacctacagattttctcagtaatgtttttgttagcttttggttccattttttattgtgcatgcagaatgtacattgatgcctgtgaccttaggtttattaaaggctaggtttatttgggcagtattagaaacaaaatcatggatcaagagatactcttgataatttgaatagggccaaaacaaagttggtgacctaaaggcttgttagtgatgtggagttcctacatgcagtgagtggaaaatgaagttcgttttctcttaggaaaatgggcagctgtcttctgcctaatgtgtatttttcatgttaattctgacagttcaccaaatagctagtcatggagaatgcaggcagttaacttaatatccctccaggaatggttcctacgttgtgtattacttggtttcttttacttacctgcttgaatacttgaataaaccattcaccaattttaatccttttattttaatccttttacataaaataatctgaactctttgacaaattgcacagagctctttggcattaatctaattttaatgtactgataaaaacaaacatggttttcctttactttgacaaagtaatgtaatttttaccttatttatctgtatgaaattccagtagttaatttgaacatttatttatatgacgtttgtatttttaggtctttaatacagtgtttctacctctcatttgtaactgcatgcattattcttgaaactaggtaaaactcactgaattgttgtgtaatagcctttttattattgcctgtacaaatgtatattaaggtaaaataaaactgacaaagtgtttctagggtgtagctgggtacatattaagtggcttgttgagccaggtacttccttagtgagtttagagacttggccatgaatatcctttgtcctgccccaggatttagatcttggctactgtcatgcaggcttccaggaacatagactgttttacctccacaaccctatttgttattagtgatactttattttatataatattttttattcacagtgaaatttcattcatgttctttcagttatcacctgtgttatctcagttgtaggtttattctatcctctcctcttcctctcccatttcttttttaagacaggatgaaacaggttcagagaggggaagtgattggcctaaagtcaggaactaggcaagtggtcaagccatgctttgtgactttcaagttaattcttcttgttcttgtatattaaaggtcttggggtagatggtgtgtgtgaaacagtgaagtctcaacagcagaaaagaacaaaatgtaaattcatgaataatggttctggttatacttccattatcaaggctaattaagagattttgccttgagtatagcaataataaacaaatgctttatgtttccctgagtatttttaaatttcatatcgtgtttcatagagtggaaatgtaccagttcatacattcatgggttgacacctgtattcaagccataacctggaaaattgctgaccagctattcctgctctaagggtttgctttaactataccctccactggactatatatagagagagagcctatgctgtatatagttggtttcccacagtccctgtcccctccttccattgagagaagtaactagagcaacagttgttctccctcgctggagtggtgaataggagccgggaggaggggactgttagggtcgggctgcctcagtctccacagtaattaagaggaaattgagttggatacagcggacatgaggcctggaatgggtaccccaaacccatgcatcttaagtgtctgggtccccacgcccccttctgcctgccaggagtactctgtgcagccatcctgtaactgcttcagtccagagaaggatagcatccatccctccctccagctcgcctctctgctgaggctttctcctctccactcagcatttgcaacagcttctctcctggcacttgtctgggaatatcaagttaaaaattacaacacccaattttgataactttagttgagagaaacaacctctagtgaagactgataagtaacttattgcccgtagtcccatgttcctttgtctccaccaagaggaattaccagcccagcagttctgccctcactagagtcccgtccaggagcttgagaggagaggatttttagggctggattgcctcagtctgcacagtaataagttgagttagacacagtggacatgaggacctggactcagatatctgaagaatccttattatttttttgttggcttgttttgagacagagtcaccctgttgcccaggctggagtgcattggcgcaatcttggctcactgcaacctctgcctcccaggttcaagtgattcttcttcctcagcctcccaggtagctaggattacagacatgcgccaccacgctcagctatttttcgtatttttagtggagatggggtttcaccatgttggtcaggctggtcttgaacaccagcctcagcctccccaagtgctgggattacaggcatgagccaccgtgcccggccaaaatccttaatgtttttgttttttggtttttttttttgagacagtcttgctctgtcacccaggctggagtgcagtggcacaatcttggctcactgcaagctccgcctccggggttcatgccattctcccgcctcagcctcccgagtagctgggactacaggcgcctgccaccacgcccggctgattttttgtattttttagtagaggcagggtttcaccgtgttaggatggtctcgatctcctgacctcgtgatccgcccgcctcggcctcccaaagtgctgggattacaggcgtgagccaccgcgcccgggctatccttaatgttgatattagtggttagcacatgttttggaggaggacttcacactttttaaactatgctccctcgtattttctataagcagtcttaaattctttctggaataaagcaagattgatcagtatttctcaaggaggattatttggcaggcagtagctactgctcagagaacttggtattgttacatgcatcctggaagtatctgtgcctatttctagacggcctcagaccacttttttctgagtcctggacccttgaatctgcagccaagcaagctcttgggtccctcccaagtctcatgtttagtaaagccctgtgagaataattttattggtggaggagtcaagatgatacttccctcacctgcatcagaggaaaccacatcagaaacaatccacctagaaaaacactgcatacgggaaagctgacaacttgccctgagaaatcacagctttggtgcaagaggtgaagccgaactggtaaaagatcaaagtgaattcagagatcaaactgtactagggaaaggagcagaggctgagatcttgctgccagcgtgacctctcacagagtggcccagcagaggctgtgcagagatggccagagccaggacccagccctgtggagcccctgggcacatgtggtcccgagtgaagccgtgcctgttgctctgaacaggtgggatcaatctgtaggtttttccacttttcacagagtgtggctctctttaggtctgcactccctctctgcgcagggcggacctccctgggctctgcagcatgatctcctgtcccaagacagtcgtgctcttggacagttagcttctgtcattaggaagtgcccacatgagctcttgtttattggaaaccgtgttctatgcctcctttggggtttctgcaactcaatttggcaggtagcttagtggtccacttggtctcaaattccagctccaccatgtgcagttgtgtgttctttggcaagttcctcccctcctccgaatctgtcagtgggggaagagtgcatgtctcacagagttgaggtgagaaataagttaatgaatatgaaattctttgcccagcccctggcacgtggaagggctcagcaatcctgtatccgttgtagtggtcatcactctgtggctcttcactgcttttgttttgttttgggagggggtggagaacaatttgttctgtgtttgtgtggggcaaggcctgtcttcagggctctctccaaccacgtacgctctggctggagcttctgaaaggacacagttcttgcatagaagttgctttctccagcttgcccaccaggcagtctggcttcagacatctatgttgcccttttaagtcaatttggctgtttaagtggaatgtttgtgtcagtctgataattgttaattcatttgatcctcataccaacccttacttgcctccttttacagatggaaaaatcaaacttggacagtaatttccacaaggaaaagccccacagctggaaagcggtgggagcaggaggccacactgggtacaggagtacccatctccccacaggagccccacactgtctcacccttaggaagcccaaatgctcactccttgagtttctaatgcattctttctgatgtacaggaagaggggaaggaaggaagagcttttccatttggtgctccaatgtctcctgctggacccatctgcctagtggaaggcagcaaaatttcaagaaacaggtgaggttgagcagcttggtgcaaccccatggggcctggagttggagctcaacagcaatggatttcagagaccaccctgaaactcccagtaaaaaagacttgggagacatgttaataaactcaagcatttgatcgaccca

SEQ ID NO: 7544 - DNA, 98 bp, Homo sapiens
gtagagacgggatttcgccatgttggccaggctggtctcaaactcctgacctcaggtgatccacccgccttggcctcccaaagtgcttggattacagg

SEQ ID NO: 7545 - DNA, 5088 bp, Homo sapiens
  SITE (5): n equals a,t,g, or c
  SITE (6): n equals a,t,g, or c
  SITE (7): n equals a,t,g, or c
  SITE (8): n equals a,t,g, or c
  SITE (9): n equals a,t,g, or c
  SITE (10): n equals a,t,g, or c
  SITE (11): n equals a,t,g, or c
  SITE (12): n equals a,t,g, or c
  SITE (13): n equals a,t,g, or c
  SITE (14): n equals a,t,g, or c
  SITE (15): n equals a,t,g, or c
  SITE (16): n equals a,t,g, or c
  SITE (17): n equals a,t,g, or c
  SITE (18): n equals a,t,g, or c
  SITE (19): n equals a,t,g, or c
  SITE (20): n equals a,t,g, or c
  SITE (21): n equals a,t,g, or c
  SITE (22): n equals a,t,g, or c
  SITE (23): n equals a,t,g, or c
  SITE (24): n equals a,t,g, or c
  SITE (25): n equals a,t,g, or c
  SITE (26): n equals a,t,g, or c
  SITE (27): n equals a,t,g, or c
  SITE (28): n equals a,t,g, or c
  SITE (29): n equals a,t,g, or c
  SITE (30): n equals a,t,g, or c
  SITE (31): n equals a,t,g, or c
  SITE (32): n equals a,t,g, or c
  SITE (33): n equals a,t,g, or c
  SITE (34): n equals a,t,g, or c
  SITE (35): n equals a,t,g, or c
  SITE (36): n equals a,t,g, or c
  SITE (37): n equals a,t,g, or c
  SITE (38): n equals a,t,g, or c
  SITE (39): n equals a,t,g, or c
  SITE (40): n equals a,t,g, or c
  SITE (41): n equals a,t,g, or c
  SITE (42): n equals a,t,g, or c
  SITE (43): n equals a,t,g, or c
  SITE (44): n equals a,t,g, or c
  SITE (45): n equals a,t,g, or c
  SITE (46): n equals a,t,g, or c
  SITE (47): n equals a,t,g, or c
  SITE (48): n equals a,t,g, or c
  SITE (49): n equals a,t,g, or c
  SITE (50): n equals a,t,g, or c
  SITE (51): n equals a,t,g, or c
  SITE (52): n equals a,t,g, or c
  SITE (53): n equals a,t,g, or c
  SITE (54): n equals a,t,g, or c
  SITE (55): n equals a,t,g, or c
  SITE (56): n equals a,t,g, or c
  SITE (57): n equals a,t,g, or c
  SITE (58): n equals a,t,g, or c
  SITE (59): n equals a,t,g, or c
  SITE (60): n equals a,t,g, or c
  SITE (61): n equals a,t,g, or c
  SITE (62): n equals a,t,g, or c
  SITE (63): n equals a,t,g, or c
  SITE (64): n equals a,t,g, or c
  SITE (65): n equals a,t,g, or c
  SITE (66): n equals a,t,g, or c
  SITE (67): n equals a,t,g, or c
  SITE (68): n equals a,t,g, or c
  SITE (69): n equals a,t,g, or c
  SITE (70): n equals a,t,g, or c
  SITE (71): n equals a,t,g, or c
  SITE (72): n equals a,t,g, or c
  SITE (73): n equals a,t,g, or c
  SITE (74): n equals a,t,g, or c
  SITE (75): n equals a,t,g, or c
  SITE (76): n equals a,t,g, or c
  SITE (77): n equals a,t,g, or c
  SITE (78): n equals a,t,g, or c
  SITE (79): n equals a,t,g, or c
  SITE (80): n equals a,t,g, or c
  SITE (81): n equals a,t,g, or c
  SITE (82): n equals a,t,g, or c
  SITE (83): n equals a,t,g, or c
  SITE (84): n equals a,t,g, or c
  SITE (85): n equals a,t,g, or c
  SITE (86): n equals a,t,g, or c
  SITE (87): n equals a,t,g, or c
  SITE (88): n equals a,t,g, or c
  SITE (89): n equals a,t,g, or c
  SITE (90): n equals a,t,g, or c
  SITE (91): n equals a,t,g, or c
  SITE (92): n equals a,t,g, or c
  SITE (93): n equals a,t,g, or c
  SITE (94): n equals a,t,g, or c
  SITE (95): n equals a,t,g, or c
  SITE (96): n equals a,t,g, or c
  SITE (97): n equals a,t,g, or c
  SITE (98): n equals a,t,g, or c
  SITE (99): n equals a,t,g, or c
  SITE (100): n equals a,t,g, or c
  SITE (101): n equals a,t,g, or c
  SITE (102): n equals a,t,g, or c
  SITE (103): n equals a,t,g, or c
  SITE (104): n equals a,t,g, or c
  SITE (105): n equals a,t,g, or c
  SITE (106): n equals a,t,g, or c
  SITE (107): n equals a,t,g, or c
  SITE (108): n equals a,t,g, or c
  SITE (109): n equals a,t,g, or c
  SITE (110): n equals a,t,g, or c
  SITE (111): n equals a,t,g, or c
  SITE (112): n equals a,t,g, or c
  SITE (113): n equals a,t,g, or c
  SITE (114): n equals a,t,g, or c
  SITE (115): n equals a,t,g, or c
  SITE (116): n equals a,t,g, or c
  SITE (117): n equals a,t,g, or c
  SITE (118): n equals a,t,g, or c
  SITE (119): n equals a,t,g, or c
  SITE (120): n equals a,t,g, or c
  SITE (121): n equals a,t,g, or c
  SITE (122): n equals a,t,g, or c
  SITE (123): n equals a,t,g, or c
  SITE (124): n equals a,t,g, or c
  SITE (125): n equals a,t,g, or c
  SITE (126): n equals a,t,g, or c
  SITE (127): n equals a,t,g, or c
  SITE (128): n equals a,t,g, or c
  SITE (129): n equals a,t,g, or c
  SITE (130): n equals a,t,g, or c
  SITE (131): n equals a,t,g, or c
  SITE (132): n equals a,t,g, or c
  SITE (133): n equals a,t,g, or c
  SITE (134): n equals a,t,g, or c
  SITE (135): n equals a,t,g, or c
  SITE (136): n equals a,t,g, or c
  SITE (137): n equals a,t,g, or c
  SITE (138): n equals a,t,g, or c
  SITE (139): n equals a,t,g, or c
  SITE (140): n equals a,t,g, or c
  SITE (141): n equals a,t,g, or c
  SITE (142): n equals a,t,g, or c
  SITE (143): n equals a,t,g, or c
  SITE (144): n equals a,t,g, or c
  SITE (145): n equals a,t,g, or c
  SITE (146): n equals a,t,g, or c
  SITE (147): n equals a,t,g, or c
  SITE (148): n equals a,t,g, or c
  SITE (149): n equals a,t,g, or c
  SITE (150): n equals a,t,g, or c
  SITE (151): n equals a,t,g, or c
  SITE (152): n equals a,t,g, or c
  SITE (153): n equals a,t,g, or c
  SITE (154): n equals a,t,g, or c
  SITE (155): n equals a,t,g, or c
  SITE (156): n equals a,t,g, or c
  SITE (157): n equals a,t,g, or c
  SITE (158): n equals a,t,g, or c
  SITE (159): n equals a,t,g, or c
  SITE (160): n equals a,t,g, or c
  SITE (161): n equals a,t,g, or c
  SITE (162): n equals a,t,g, or c
  SITE (163): n equals a,t,g, or c
  SITE (164): n equals a,t,g, or c
  SITE (165): n equals a,t,g, or c
  SITE (166): n equals a,t,g, or c
  SITE (167): n equals a,t,g, or c
  SITE (168): n equals a,t,g, or c
  SITE (169): n equals a,t,g, or c
  SITE (170): n equals a,t,g, or c
  SITE (171): n equals a,t,g, or c
  SITE (172): n equals a,t,g, or c
  SITE (173): n equals a,t,g, or c
  SITE (174): n equals a,t,g, or c
  SITE (175): n equals a,t,g, or c
  SITE (176): n equals a,t,g, or c
  SITE (177): n equals a,t,g, or c
  SITE (178): n equals a,t,g, or c
  SITE (179): n equals a,t,g, or c
  SITE (180): n equals a,t,g, or c
  SITE (181): n equals a,t,g, or c
  SITE (182): n equals a,t,g, or c
  SITE (183): n equals a,t,g, or c
  SITE (184): n equals a,t,g, or c
  SITE (185): n equals a,t,g, or c
  SITE (186): n equals a,t,g, or c
  SITE (187): n equals a,t,g, or c
  SITE (188): n equals a,t,g, or c
  SITE (189): n equals a,t,g, or c
  SITE (190): n equals a,t,g, or c
  SITE (191): n equals a,t,g, or c
  SITE (192): n equals a,t,g, or c
  SITE (193): n equals a,t,g, or c
  SITE (194): n equals a,t,g, or c
  SITE (195): n equals a,t,g, or c
  SITE (196): n equals a,t,g, or c
  SITE (197): n equals a,t,g, or c
  SITE (198): n equals a,t,g, or c
  SITE (199): n equals a,t,g, or c
  SITE (200): n equals a,t,g, or c
  SITE (201): n equals a,t,g, or c
  SITE (202): n equals a,t,g, or c
  SITE (203): n equals a,t,g, or c
  SITE (204): n equals a,t,g, or c
  SITE (205): n equals a,t,g, or c
  SITE (206): n equals a,t,g, or c
  SITE (207): n equals a,t,g, or c
  SITE (208): n equals a,t,g, or c
  SITE (209): n equals a,t,g, or c
  SITE (210): n equals a,t,g, or c
  SITE (211): n equals a,t,g, or c
  SITE (212): n equals a,t,g, or c
  SITE (213): n equals a,t,g, or c
  SITE (214): n equals a,t,g, or c
  SITE (215): n equals a,t,g, or c
  SITE (216): n equals a,t,g, or c
  SITE (217): n equals a,t,g, or c
  SITE (218): n equals a,t,g, or c
  SITE (219): n equals a,t,g, or c
  SITE (220): n equals a,t,g, or c
  SITE (221): n equals a,t,g, or c
  SITE (222): n equals a,t,g, or c
  SITE (223): n equals a,t,g, or c
  SITE (224): n equals a,t,g, or c
  SITE (225): n equals a,t,g, or c
  SITE (226): n equals a,t,g, or c
  SITE (227): n equals a,t,g, or c
  SITE (228): n equals a,t,g, or c
  SITE (229): n equals a,t,g, or c
  SITE (230): n equals a,t,g, or c
  SITE (231): n equals a,t,g, or c
  SITE (232): n equals a,t,g, or c
  SITE (233): n equals a,t,g, or c
  SITE (234): n equals a,t,g, or c
  SITE (235): n equals a,t,g, or c
  SITE (236): n equals a,t,g, or c
  SITE (237): n equals a,t,g, or c
  SITE (238): n equals a,t,g, or c
  SITE (239): n equals a,t,g, or c
  SITE (240): n equals a,t,g, or c
  SITE (241): n equals a,t,g, or c
  SITE (242): n equals a,t,g, or c
  SITE (243): n equals a,t,g, or c
  SITE (244): n equals a,t,g, or c
  SITE (245): n equals a,t,g, or c
  SITE (246): n equals a,t,g, or c
  SITE (247): n equals a,t,g, or c
  SITE (248): n equals a,t,g, or c
  SITE (249): n equals a,t,g, or c
  SITE (250): n equals a,t,g, or c
  SITE (251): n equals a,t,g, or c
  SITE (252): n equals a,t,g, or c
  SITE (253): n equals a,t,g, or c
  SITE (254): n equals a,t,g, or c
  SITE (255): n equals a,t,g, or c
  SITE (256): n equals a,t,g, or c
  SITE (257): n equals a,t,g, or c
  SITE (258): n equals a,t,g, or c
  SITE (259): n equals a,t,g, or c
  SITE (260): n equals a,t,g, or c
  SITE (261): n equals a,t,g, or c
  SITE (262): n equals a,t,g, or c
  SITE (263): n equals a,t,g, or c
  SITE (264): n equals a,t,g, or c
  SITE (265): n equals a,t,g, or c
  SITE (266): n equals a,t,g, or c
  SITE (267): n equals a,t,g, or c
  SITE (268): n equals a,t,g, or c
  SITE (269): n equals a,t,g, or c
  SITE (270): n equals a,t,g, or c
  SITE (271): n equals a,t,g, or c
  SITE (272): n equals a,t,g, or c
  SITE (273): n equals a,t,g, or c
  SITE (274): n equals a,t,g, or c
  SITE (275): n equals a,t,g, or c
  SITE (276): n equals a,t,g, or c
  SITE (277): n equals a,t,g, or c
  SITE (278): n equals a,t,g, or c
  SITE (279): n equals a,t,g, or c
  SITE (280): n equals a,t,g, or c
  SITE (281): n equals a,t,g, or c
  SITE (282): n equals a,t,g, or c
  SITE (283): n equals a,t,g, or c
  SITE (284): n equals a,t,g, or c
  SITE (285): n equals a,t,g, or c
  SITE (286): n equals a,t,g, or c
  SITE (287): n equals a,t,g, or c
  SITE (288): n equals a,t,g, or c
  SITE (289): n equals a,t,g, or c
  SITE (290): n equals a,t,g, or c
  SITE (291): n equals a,t,g, or c
  SITE (292): n equals a,t,g, or c
  SITE (293): n equals a,t,g, or c
  SITE (294): n equals a,t,g, or c
  SITE (295): n equals a,t,g, or c
  SITE (296): n equals a,t,g, or c
  SITE (297): n equals a,t,g, or c
  SITE (298): n equals a,t,g, or c
  SITE (299): n equals a,t,g, or c
  SITE (300): n equals a,t,g, or c
  SITE (301): n equals a,t,g, or c
  SITE (302): n equals a,t,g, or c
  SITE (303): n equals a,t,g, or c
  SITE (304): n equals a,t,g, or c
  SITE (3943): n equals a,t,g, or c
  SITE (3944): n equals a,t,g, or c
  SITE (3945): n equals a,t,g, or c
  SITE (3946): n equals a,t,g, or c
  SITE (3947): n equals a,t,g, or c
  SITE (3948): n equals a,t,g, or c
  SITE (3949): n equals a,t,g, or c
  SITE (3950): n equals a,t,g, or c
  SITE (3951): n equals a,t,g, or c
  SITE (3952): n equals a,t,g, or c
  SITE (3953): n equals a,t,g, or c
  SITE (3954): n equals a,t,g, or c
  SITE (3955): n equals a,t,g, or c
  SITE (3956): n equals a,t,g, or c
  SITE (3957): n equals a,t,g, or c
  SITE (3958): n equals a,t,g, or c
  SITE (3959): n equals a,t,g, or c
  SITE (3960): n equals a,t,g, or c
  SITE (3961): n equals a,t,g, or c
  SITE (3962): n equals a,t,g, or c
  SITE (3963): n equals a,t,g, or c
  SITE (3964): n equals a,t,g, or c
  SITE (3965): n equals a,t,g, or c
  SITE (3966): n equals a,t,g, or c
  SITE (3967): n equals a,t,g, or c
  SITE (3968): n equals a,t,g, or c
  SITE (3969): n equals a,t,g, or c
  SITE (3970): n equals a,t,g, or c
  SITE (3971): n equals a,t,g, or c
  SITE (3972): n equals a,t,g, or c
  SITE (3973): n equals a,t,g, or c
  SITE (3974): n equals a,t,g, or c
  SITE (3975): n equals a,t,g, or c
  SITE (3976): n equals a,t,g, or c
  SITE (3977): n equals a,t,g, or c
  SITE (3978): n equals a,t,g, or c
  SITE (3979): n equals a,t,g, or c
  SITE (3980): n equals a,t,g, or c
  SITE (3981): n equals a,t,g, or c
  SITE (3982): n equals a,t,g, or c
  SITE (3983): n equals a,t,g, or c
  SITE (3984): n equals a,t,g, or c
  SITE (3985): n equals a,t,g, or c
  SITE (3986): n equals a,t,g, or c
  SITE (3987): n equals a,t,g, or c
  SITE (3988): n equals a,t,g, or c
  SITE (3989): n equals a,t,g, or c
  SITE (3990): n equals a,t,g, or c
  SITE (3991): n equals a,t,g, or c
  SITE (3992): n equals a,t,g, or c
  SITE (3993): n equals a,t,g, or c
  SITE (3994): n equals a,t,g, or c
  SITE (3995): n equals a,t,g, or c
  SITE (3996): n equals a,t,g, or c
  SITE (3997): n equals a,t,g, or c
  SITE (3998): n equals a,t,g, or c
  SITE (3999): n equals a,t,g, or c
  SITE (4000): n equals a,t,g, or c
  SITE (4001): n equals a,t,g, or c
  SITE (4002): n equals a,t,g, or c
  SITE (4003): n equals a,t,g, or c
  SITE (4004): n equals a,t,g, or c
  SITE (4005): n equals a,t,g, or c
  SITE (4006): n equals a,t,g, or c
  SITE (4007): n equals a,t,g, or c
  SITE (4008): n equals a,t,g, or c
  SITE (4009): n equals a,t,g, or c
  SITE (4010): n equals a,t,g, or c
  SITE (4011): n equals a,t,g, or c
  SITE (4012): n equals a,t,g, or c
  SITE (4013): n equals a,t,g, or c
  SITE (4014): n equals a,t,g, or c
  SITE (4015): n equals a,t,g, or c
  SITE (4016): n equals a,t,g, or c
  SITE (4017): n equals a,t,g, or c
  SITE (4018): n equals a,t,g, or c
  SITE (4019): n equals a,t,g, or c
  SITE (4020): n equals a,t,g, or c
  SITE (4021): n equals a,t,g, or c
  SITE (4022): n equals a,t,g, or c
  SITE (4023): n equals a,t,g, or c
  SITE (4024): n equals a,t,g, or c
  SITE (4025): n equals a,t,g, or c
  SITE (4026): n equals a,t,g, or c
  SITE (4027): n equals a,t,g, or c
  SITE (4028): n equals a,t,g, or c
  SITE (4029): n equals a,t,g, or c
  SITE (4030): n equals a,t,g, or c
  SITE (4031): n equals a,t,g, or c
  SITE (4032): n equals a,t,g, or c
  SITE (4033): n equals a,t,g, or c
  SITE (4034): n equals a,t,g, or c
  SITE (4035): n equals a,t,g, or c
  SITE (4036): n equals a,t,g, or c
  SITE (4037): n equals a,t,g, or c
  SITE (4038): n equals a,t,g, or c
  SITE (4039): n equals a,t,g, or c
  SITE (4040): n equals a,t,g, or c
  SITE (4041): n equals a,t,g, or c
  SITE (4042): n equals a,t,g, or c
  SITE (4043): n equals a,t,g, or c
  SITE (4044): n equals a,t,g, or c
  SITE (4045): n equals a,t,g, or c
  SITE (4046): n equals a,t,g, or c
  SITE (4047): n equals a,t,g, or c
  SITE (4048): n equals a,t,g, or c
  SITE (4049): n equals a,t,g, or c
  SITE (4050): n equals a,t,g, or c
  SITE (4051): n equals a,t,g, or c
  SITE (4052): n equals a,t,g, or c
  SITE (4053): n equals a,t,g, or c
  SITE (4054): n equals a,t,g, or c
  SITE (4055): n equals a,t,g, or c
  SITE (4056): n equals a,t,g, or c
  SITE (4057): n equals a,t,g, or c
  SITE (4058): n equals a,t,g, or c
  SITE (4059): n equals a,t,g, or c
  SITE (4060): n equals a,t,g, or c
  SITE (4061): n equals a,t,g, or c
  SITE (4062): n equals a,t,g, or c
  SITE (4063): n equals a,t,g, or c
  SITE (4064): n equals a,t,g, or c
  SITE (4065): n equals a,t,g, or c
  SITE (4066): n equals a,t,g, or c
  SITE (4067): n equals a,t,g, or c
  SITE (4068): n equals a,t,g, or c
  SITE (4069): n equals a,t,g, or c
  SITE (4070): n equals a,t,g, or c
  SITE (4071): n equals a,t,g, or c
  SITE (4072): n equals a,t,g, or c
  SITE (4073): n equals a,t,g, or c
  SITE (4074): n equals a,t,g, or c
  SITE (4075): n equals a,t,g, or c
  SITE (4076): n equals a,t,g, or c
  SITE (4077): n equals a,t,g, or c
  SITE (4078): n equals a,t,g, or c
  SITE (4079): n equals a,t,g, or c
  SITE (4080): n equals a,t,g, or c
  SITE (4081): n equals a,t,g, or c
  SITE (4082): n equals a,t,g, or c
  SITE (4083): n equals a,t,g, or c
  SITE (4084): n equals a,t,g, or c
  SITE (4085): n equals a,t,g, or c
  SITE (4086): n equals a,t,g, or c
  SITE (4087): n equals a,t,g, or c
  SITE (4088): n equals a,t,g, or c
  SITE (4089): n equals a,t,g, or c
  SITE (4090): n equals a,t,g, or c
  SITE (4091): n equals a,t,g, or c
  SITE (4092): n equals a,t,g, or c
  SITE (4093): n equals a,t,g, or c
  SITE (4094): n equals a,t,g, or c
  SITE (4095): n equals a,t,g, or c
  SITE (4096): n equals a,t,g, or c
  SITE (4097): n equals a,t,g, or c
  SITE (4098): n equals a,t,g, or c
  SITE (4099): n equals a,t,g, or c
  SITE (4100): n equals a,t,g, or c
  SITE (4101): n equals a,t,g, or c
  SITE (4102): n equals a,t,g, or c
  SITE (4103): n equals a,t,g, or c
  SITE (4104): n equals a,t,g, or c
  SITE (4105): n equals a,t,g, or c
  SITE (4106): n equals a,t,g, or c
  SITE (4107): n equals a,t,g, or c
  SITE (4108): n equals a,t,g, or c
  SITE (4109): n equals a,t,g, or c
  SITE (4110): n equals a,t,g, or c
  SITE (4111): n equals a,t,g, or c
  SITE (4112): n equals a,t,g, or c
  SITE (4113): n equals a,t,g, or c
  SITE (4114): n equals a,t,g, or c
  SITE (4115): n equals a,t,g, or c
  SITE (4116): n equals a,t,g, or c
  SITE (4117): n equals a,t,g, or c
  SITE (4118): n equals a,t,g, or c
  SITE (4119): n equals a,t,g, or c
  SITE (4120): n equals a,t,g, or c
  SITE (4121): n equals a,t,g, or c
  SITE (4122): n equals a,t,g, or c
  SITE (4123): n equals a,t,g, or c
  SITE (4124): n equals a,t,g, or c
  SITE (4125): n equals a,t,g, or c
  SITE (4126): n equals a,t,g, or c
  SITE (4127): n equals a,t,g, or c
  SITE (4128): n equals a,t,g, or c
  SITE (4129): n equals a,t,g, or c
  SITE (4130): n equals a,t,g, or c
  SITE (4131): n equals a,t,g, or c
  SITE (4132): n equals a,t,g, or c
  SITE (4133): n equals a,t,g, or c
  SITE (4134): n equals a,t,g, or c
  SITE (4135): n equals a,t,g, or c
  SITE (4136): n equals a,t,g, or c
  SITE (4137): n equals a,t,g, or c
  SITE (4138): n equals a,t,g, or c
  SITE (4139): n equals a,t,g, or c
  SITE (4140): n equals a,t,g, or c
  SITE (4141): n equals a,t,g, or c
  SITE (4142): n equals a,t,g, or c
  SITE (4143): n equals a,t,g, or c
  SITE (4144): n equals a,t,g, or c
  SITE (4145): n equals a,t,g, or c
  SITE (4146): n equals a,t,g, or c
  SITE (4147): n equals a,t,g, or c
  SITE (4148): n equals a,t,g, or c
  SITE (4149): n equals a,t,g, or c
  SITE (4150): n equals a,t,g, or c
  SITE (4151): n equals a,t,g, or c
  SITE (4152): n equals a,t,g, or c
  SITE (4153): n equals a,t,g, or c
  SITE (4154): n equals a,t,g, or c
  SITE (4155): n equals a,t,g, or c
  SITE (4156): n equals a,t,g, or c
  SITE (4157): n equals a,t,g, or c
  SITE (4158): n equals a,t,g, or c
  SITE (4159): n equals a,t,g, or c
  SITE (4160): n equals a,t,g, or c
  SITE (4161): n equals a,t,g, or c
  SITE (4162): n equals a,t,g, or c
  SITE (4163): n equals a,t,g, or c
  SITE (4164): n equals a,t,g, or c
  SITE (4165): n equals a,t,g, or c
  SITE (4166): n equals a,t,g, or c
  SITE (4167): n equals a,t,g, or c
  SITE (4168): n equals a,t,g, or c
  SITE (4169): n equals a,t,g, or c
  SITE (4170): n equals a,t,g, or c
  SITE (4171): n equals a,t,g, or c
  SITE (4172): n equals a,t,g, or c
  SITE (4173): n equals a,t,g, or c
  SITE (4174): n equals a,t,g, or c
  SITE (4175): n equals a,t,g, or c
  SITE (4176): n equals a,t,g, or c
  SITE (4177): n equals a,t,g, or c
  SITE (4178): n equals a,t,g, or c
  SITE (4179): n equals a,t,g, or c
  SITE (4180): n equals a,t,g, or c
  SITE (4181): n equals a,t,g, or c
  SITE (4182): n equals a,t,g, or c
  SITE (4183): n equals a,t,g, or c
  SITE (4184): n equals a,t,g, or c
  SITE (4185): n equals a,t,g, or c
  SITE (4186): n equals a,t,g, or c
  SITE (4187): n equals a,t,g, or c
  SITE (4188): n equals a,t,g, or c
  SITE (4189): n equals a,t,g, or c
  SITE (4190): n equals a,t,g, or c
  SITE (4191): n equals a,t,g, or c
  SITE (4192): n equals a,t,g, or c
  SITE (4193): n equals a,t,g, or c
  SITE (4194): n equals a,t,g, or c
  SITE (4195): n equals a,t,g, or c
  SITE (4196): n equals a,t,g, or c
  SITE (4197): n equals a,t,g, or c
  SITE (4198): n equals a,t,g, or c
  SITE (4199): n equals a,t,g, or c
  SITE (4200): n equals a,t,g, or c
  SITE (4201): n equals a,t,g, or c
  SITE (4202): n equals a,t,g, or c
  SITE (4203): n equals a,t,g, or c
  SITE (4204): n equals a,t,g, or c
  SITE (4205): n equals a,t,g, or c
  SITE (4206): n equals a,t,g, or c
  SITE (4207): n equals a,t,g, or c
  SITE (4208): n equals a,t,g, or c
  SITE (4209): n equals a,t,g, or c
  SITE (4210): n equals a,t,g, or c
  SITE (4211): n equals a,t,g, or c
  SITE (4212): n equals a,t,g, or c
  SITE (4213): n equals a,t,g, or c
  SITE (4214): n equals a,t,g, or c
  SITE (4215): n equals a,t,g, or c
  SITE (4216): n equals a,t,g, or c
  SITE (4217): n equals a,t,g, or c
  SITE (4218): n equals a,t,g, or c
  SITE (4219): n equals a,t,g, or c
  SITE (4220): n equals a,t,g, or c
  SITE (4221): n equals a,t,g, or c
  SITE (4222): n equals a,t,g, or c
  SITE (4223): n equals a,t,g, or c
  SITE (4224): n equals a,t,g, or c
  SITE (4225): n equals a,t,g, or c
  SITE (4226): n equals a,t,g, or c
  SITE (4227): n equals a,t,g, or c
  SITE (4228): n equals a,t,g, or c
  SITE (4229): n equals a,t,g, or c
  SITE (4230): n equals a,t,g, or c
  SITE (4231): n equals a,t,g, or c
  SITE (4232): n equals a,t,g, or c
  SITE (4233): n equals a,t,g, or c
  SITE (4234): n equals a,t,g, or c
  SITE (4235): n equals a,t,g, or c
  SITE (4236): n equals a,t,g, or c
  SITE (4237): n equals a,t,g, or c
  SITE (4238): n equals a,t,g, or c
  SITE (4239): n equals a,t,g, or c
  SITE (4240): n equals a,t,g, or c
  SITE (4241): n equals a,t,g, or c
  SITE (4242): n equals a,t,g, or c
  SITE (4243): n equals a,t,g, or c
  SITE (4244): n equals a,t,g, or c
  SITE (4245): n equals a,t,g, or c
  SITE (4246): n equals a,t,g, or c
  SITE (4247): n equals a,t,g, or c
  SITE (4248): n equals a,t,g, or c
  SITE (4249): n equals a,t,g, or c
  SITE (4250): n equals a,t,g, or c
  SITE (4251): n equals a,t,g, or c
  SITE (4252): n equals a,t,g, or c
  SITE (4253): n equals a,t,g, or c
  SITE (4254): n equals a,t,g, or c
  SITE (4255): n equals a,t,g, or c
  SITE (4256): n equals a,t,g, or c
  SITE (4257): n equals a,t,g, or c
  SITE (4258): n equals a,t,g, or c
  SITE (4259): n equals a,t,g, or c
  SITE (4260): n equals a,t,g, or c
  SITE (4261): n equals a,t,g, or c
  SITE (4262): n equals a,t,g, or c
  SITE (4263): n equals a,t,g, or c
  SITE (4264): n equals a,t,g, or c
  SITE (4265): n equals a,t,g, or c
  SITE (4266): n equals a,t,g, or c
  SITE (4267): n equals a,t,g, or c
  SITE (4268): n equals a,t,g, or c
  SITE (4269): n equals a,t,g, or c
  SITE (4270): n equals a,t,g, or c
  SITE (4271): n equals a,t,g, or c
  SITE (4272): n equals a,t,g, or c
  SITE (4273): n equals a,t,g, or c
  SITE (4274): n equals a,t,g, or c
  SITE (4275): n equals a,t,g, or c
  SITE (4276): n equals a,t,g, or c
  SITE (4277): n equals a,t,g, or c
  SITE (4278): n equals a,t,g, or c
  SITE (4279): n equals a,t,g, or c
  SITE (4280): n equals a,t,g, or c
  SITE (4281): n equals a,t,g, or c
  SITE (4282): n equals a,t,g, or c
  SITE (4283): n equals a,t,g, or c
  SITE (4284): n equals a,t,g, or c
  SITE (4285): n equals a,t,g, or c
  SITE (4286): n equals a,t,g, or c
  SITE (4287): n equals a,t,g, or c
  SITE (4288): n equals a,t,g, or c
  SITE (4289): n equals a,t,g, or c
  SITE (4290): n equals a,t,g, or c
  SITE (4291): n equals a,t,g, or c
  SITE (4292): n equals a,t,g, or c
  SITE (4293): n equals a,t,g, or c
  SITE (4294): n equals a,t,g, or c
  SITE (4295): n equals a,t,g, or c
  SITE (4296): n equals a,t,g, or c
  SITE (4297): n equals a,t,g, or c
  SITE (4298): n equals a,t,g, or c
  SITE (4299): n equals a,t,g, or c
  SITE (4300): n equals a,t,g, or c
  SITE (4301): n equals a,t,g, or c
  SITE (4302): n equals a,t,g, or c
  SITE (4303): n equals a,t,g, or c
  SITE (4304): n equals a,t,g, or c
  SITE (4305): n equals a,t,g, or c
  SITE (4306): n equals a,t,g, or c
  SITE (4307): n equals a,t,g, or c
  SITE (4308): n equals a,t,g, or c
  SITE (4309): n equals a,t,g, or c
  SITE (4310): n equals a,t,g, or c
  SITE (4311): n equals a,t,g, or c
  SITE (4312): n equals a,t,g, or c
  SITE (4313): n equals a,t,g, or c
  SITE (4314): n equals a,t,g, or c
  SITE (4315): n equals a,t,g, or c
  SITE (4316): n equals a,t,g, or c
  SITE (4317): n equals a,t,g, or c
  SITE (4318): n equals a,t,g, or c
  SITE (4319): n equals a,t,g, or c
  SITE (4320): n equals a,t,g, or c
  SITE (4321): n equals a,t,g, or c
  SITE (4322): n equals a,t,g, or c
  SITE (4323): n equals a,t,g, or c
  SITE (4324): n equals a,t,g, or c
  SITE (4325): n equals a,t,g, or c
  SITE (4326): n equals a,t,g, or c
  SITE (4327): n equals a,t,g, or c
  SITE (4328): n equals a,t,g, or c
  SITE (4329): n equals a,t,g, or c
  SITE (4330): n equals a,t,g, or c
  SITE (4331): n equals a,t,g, or c
  SITE (4332): n equals a,t,g, or c
  SITE (4333): n equals a,t,g, or c
  SITE (4334): n equals a,t,g, or c
  SITE (4335): n equals a,t,g, or c
  SITE (4336): n equals a,t,g, or c
  SITE (4337): n equals a,t,g, or c
  SITE (4338): n equals a,t,g, or c
  SITE (4339): n equals a,t,g, or c
  SITE (4340): n equals a,t,g, or c
  SITE (4341): n equals a,t,g, or c
  SITE (4342): n equals a,t,g, or c
  SITE (4343): n equals a,t,g, or c
  SITE (4344): n equals a,t,g, or c
  SITE (4345): n equals a,t,g, or c
  SITE (4346): n equals a,t,g, or c
  SITE (4347): n equals a,t,g, or c
  SITE (4348): n equals a,t,g, or c
  SITE (4349): n equals a,t,g, or c
  SITE (4350): n equals a,t,g, or c
  SITE (4351): n equals a,t,g, or c
  SITE (4352): n equals a,t,g, or c
  SITE (4353): n equals a,t,g, or c
  SITE (4354): n equals a,t,g, or c
  SITE (4355): n equals a,t,g, or c
  SITE (4356): n equals a,t,g, or c
  SITE (4357): n equals a,t,g, or c
  SITE (4358): n equals a,t,g, or c
  SITE (4359): n equals a,t,g, or c
  SITE (4360): n equals a,t,g, or c
  SITE (4361): n equals a,t,g, or c
  SITE (4362): n equals a,t,g, or c
  SITE (4363): n equals a,t,g, or c
  SITE (4364): n equals a,t,g, or c
  SITE (4365): n equals a,t,g, or c
  SITE (4366): n equals a,t,g, or c
  SITE (4367): n equals a,t,g, or c
  SITE (4368): n equals a,t,g, or c
  SITE (4369): n equals a,t,g, or c
  SITE (4370): n equals a,t,g, or c
  SITE (4371): n equals a,t,g, or c
  SITE (4372): n equals a,t,g, or c
  SITE (4373): n equals a,t,g, or c
  SITE (4374): n equals a,t,g, or c
  SITE (4375): n equals a,t,g, or c
  SITE (4376): n equals a,t,g, or c
  SITE (4377): n equals a,t,g, or c
  SITE (4378): n equals a,t,g, or c
  SITE (4379): n equals a,t,g, or c
  SITE (4380): n equals a,t,g, or c
  SITE (4381): n equals a,t,g, or c
  SITE (4382): n equals a,t,g, or c
  SITE (4383): n equals a,t,g, or c
  SITE (4384): n equals a,t,g, or c
  SITE (4385): n equals a,t,g, or c
  SITE (4386): n equals a,t,g, or c
  SITE (4387): n equals a,t,g, or c
  SITE (4388): n equals a,t,g, or c
  SITE (4389): n equals a,t,g, or c
  SITE (4390): n equals a,t,g, or c
  SITE (4391): n equals a,t,g, or c
  SITE (4392): n equals a,t,g, or c
  SITE (4393): n equals a,t,g, or c
  SITE (4394): n equals a,t,g, or c
  SITE (4395): n equals a,t,g, or c
  SITE (4396): n equals a,t,g, or c
  SITE (4397): n equals a,t,g, or c
  SITE (4398): n equals a,t,g, or c
  SITE (4399): n equals a,t,g, or c
  SITE (4400): n equals a,t,g, or c
  SITE (4401): n equals a,t,g, or c
  SITE (4402): n equals a,t,g, or c
  SITE (4403): n equals a,t,g, or c
  SITE (4404): n equals a,t,g, or c
  SITE (4405): n equals a,t,g, or c
  SITE (4406): n equals a,t,g, or c
  SITE (4407): n equals a,t,g, or c
  SITE (4408): n equals a,t,g, or c
  SITE (4409): n equals a,t,g, or c
  SITE (4410): n equals a,t,g, or c
  SITE (4411): n equals a,t,g, or c
  SITE (4412): n equals a,t,g, or c
  SITE (4413): n equals a,t,g, or c
  SITE (4414): n equals a,t,g, or c
  SITE (4415): n equals a,t,g, or c
  SITE (4416): n equals a,t,g, or c
  SITE (4417): n equals a,t,g, or c
  SITE (4418): n equals a,t,g, or c
  SITE (4419): n equals a,t,g, or c
  SITE (4420): n equals a,t,g, or c
  SITE (4421): n equals a,t,g, or c
  SITE (4422): n equals a,t,g, or c
  SITE (4423): n equals a,t,g, or c
  SITE (4424): n equals a,t,g, or c
  SITE (4425): n equals a,t,g, or c
  SITE (4426): n equals a,t,g, or c
  SITE (4427): n equals a,t,g, or c
  SITE (4428): n equals a,t,g, or c
  SITE (4429): n equals a,t,g, or c
  SITE (4430): n equals a,t,g, or c
  SITE (4431): n equals a,t,g, or c
  SITE (4432): n equals a,t,g, or c
  SITE (4433): n equals a,t,g, or c
  SITE (4434): n equals a,t,g, or c
  SITE (4435): n equals a,t,g, or c
  SITE (4436): n equals a,t,g, or c
  SITE (4437): n equals a,t,g, or c
  SITE (4438): n equals a,t,g, or c
  SITE (4439): n equals a,t,g, or c
  SITE (4440): n equals a,t,g, or c
  SITE (4441): n equals a,t,g, or c
  SITE (4442): n equals a,t,g, or c
  SITE (4443): n equals a,t,g, or c
  SITE (4444): n equals a,t,g, or c
  SITE (4445): n equals a,t,g, or c
  SITE (4446): n equals a,t,g, or c
  SITE (4447): n equals a,t,g, or c
  SITE (4448): n equals a,t,g, or c
  SITE (4449): n equals a,t,g, or c
  SITE (4450): n equals a,t,g, or c
  SITE (4451): n equals a,t,g, or c
  SITE (4452): n equals a,t,g, or c
  SITE (4453): n equals a,t,g, or c
  SITE (4454): n equals a,t,g, or c
  SITE (4455): n equals a,t,g, or c
  SITE (4456): n equals a,t,g, or c
  SITE (4457): n equals a,t,g, or c
  SITE (4458): n equals a,t,g, or c
  SITE (4459): n equals a,t,g, or c
  SITE (4460): n equals a,t,g, or c
  SITE (4461): n equals a,t,g, or c
  SITE (4462): n equals a,t,g, or c
  SITE (4463): n equals a,t,g, or c
  SITE (4464): n equals a,t,g, or c
  SITE (4465): n equals a,t,g, or c
  SITE (4466): n equals a,t,g, or c
  SITE (4467): n equals a,t,g, or c
  SITE (4468): n equals a,t,g, or c
  SITE (4469): n equals a,t,g, or c
  SITE (4470): n equals a,t,g, or c
  SITE (4471): n equals a,t,g, or c
  SITE (4472): n equals a,t,g, or c
  SITE (4473): n equals a,t,g, or c
  SITE (4474): n equals a,t,g, or c
  SITE (4475): n equals a,t,g, or c
  SITE (4476): n equals a,t,g, or c
  SITE (4477): n equals a,t,g, or c
  SITE (4478): n equals a,t,g, or c
  SITE (4479): n equals a,t,g, or c
  SITE (4480): n equals a,t,g, or c
  SITE (4481): n equals a,t,g, or c
  SITE (4482): n equals a,t,g, or c
  SITE (4483): n equals a,t,g, or c
  SITE (4484): n equals a,t,g, or c
  SITE (4485): n equals a,t,g, or c
  SITE (4486): n equals a,t,g, or c
  SITE (4487): n equals a,t,g, or c
  SITE (4488): n equals a,t,g, or c
  SITE (4489): n equals a,t,g, or c
  SITE (4490): n equals a,t,g, or c
  SITE (4491): n equals a,t,g, or c
  SITE (4492): n equals a,t,g, or c
  SITE (4493): n equals a,t,g, or c
  SITE (4494): n equals a,t,g, or c
  SITE (4495): n equals a,t,g, or c
  SITE (4496): n equals a,t,g, or c
  SITE (4497): n equals a,t,g, or c
  SITE (4498): n equals a,t,g, or c
  SITE (4499): n equals a,t,g, or c
  SITE (4500): n equals a,t,g, or c
  SITE (4501): n equals a,t,g, or c
  SITE (4502): n equals a,t,g, or c
  SITE (4503): n equals a,t,g, or c
  SITE (4504): n equals a,t,g, or c
  SITE (4505): n equals a,t,g, or c
  SITE (4506): n equals a,t,g, or c
  SITE (4507): n equals a,t,g, or c
  SITE (4508): n equals a,t,g, or c
  SITE (4509): n equals a,t,g, or c
  SITE (4510): n equals a,t,g, or c
  SITE (4511): n equals a,t,g, or c
  SITE (4512): n equals a,t,g, or c
  SITE (4513): n equals a,t,g, or c
  SITE (4514): n equals a,t,g, or c
  SITE (4515): n equals a,t,g, or c
  SITE (4516): n equals a,t,g, or c
  SITE (4517): n equals a,t,g, or c
  SITE (4518): n equals a,t,g, or c
  SITE (4519): n equals a,t,g, or c
  SITE (4520): n equals a,t,g, or c
  SITE (4521): n equals a,t,g, or c
  SITE (4522): n equals a,t,g, or c
  SITE (4523): n equals a,t,g, or c
  SITE (4524): n equals a,t,g, or c
  SITE (4525): n equals a,t,g, or c
  SITE (4526): n equals a,t,g, or c
  SITE (4527): n equals a,t,g, or c
  SITE (4528): n equals a,t,g, or c
  SITE (4529): n equals a,t,g, or c
  SITE (4530): n equals a,t,g, or c
  SITE (4531): n equals a,t,g, or c
  SITE (4532): n equals a,t,g, or c
  SITE (4533): n equals a,t,g, or c
  SITE (4534): n equals a,t,g, or c
  SITE (4535): n equals a,t,g, or c
  SITE (4536): n equals a,t,g, or c
  SITE (4537): n equals a,t,g, or c
  SITE (4538): n equals a,t,g, or c
  SITE (4539): n equals a,t,g, or c
  SITE (4540): n equals a,t,g, or c
  SITE (4541): n equals a,t,g, or c
  SITE (4542): n equals a,t,g, or c
  SITE (4543): n equals a,t,g, or c
  SITE (4544): n equals a,t,g, or c
  SITE (4545): n equals a,t,g, or c
  SITE (4546): n equals a,t,g, or c
  SITE (4547): n equals a,t,g, or c
  SITE (4548): n equals a,t,g, or c
  SITE (4549): n equals a,t,g, or c
  SITE (4550): n equals a,t,g, or c
  SITE (4551): n equals a,t,g, or c
  SITE (4552): n equals a,t,g, or c
  SITE (4553): n equals a,t,g, or c
  SITE (4554): n equals a,t,g, or c
  SITE (4555): n equals a,t,g, or c
  SITE (4556): n equals a,t,g, or c
  SITE (4557): n equals a,t,g, or c
  SITE (4558): n equals a,t,g, or c
  SITE (4559): n equals a,t,g, or c
  SITE (4560): n equals a,t,g, or c
  SITE (4561): n equals a,t,g, or c
  SITE (4562): n equals a,t,g, or c
  SITE (4563): n equals a,t,g, or c
  SITE (4564): n equals a,t,g, or c
  SITE (4565): n equals a,t,g, or c
  SITE (4566): n equals a,t,g, or c
  SITE (4567): n equals a,t,g, or c
  SITE (4568): n equals a,t,g, or c
  SITE (4569): n equals a,t,g, or c
  SITE (4570): n equals a,t,g, or c
  SITE (4571): n equals a,t,g, or c
  SITE (4572): n equals a,t,g, or c
  SITE (4573): n equals a,t,g, or c
  SITE (4574): n equals a,t,g, or c
  SITE (4575): n equals a,t,g, or c
  SITE (4576): n equals a,t,g, or c
  SITE (4577): n equals a,t,g, or c
  SITE (4578): n equals a,t,g, or c
  SITE (4579): n equals a,t,g, or c
  SITE (4580): n equals a,t,g, or c
  SITE (4581): n equals a,t,g, or c
  SITE (4582): n equals a,t,g, or c
  SITE (4583): n equals a,t,g, or c
  SITE (4584): n equals a,t,g, or c
  SITE (4585): n equals a,t,g, or c
  SITE (4586): n equals a,t,g, or c
  SITE (4587): n equals a,t,g, or c
  SITE (4588): n equals a,t,g, or c
  SITE (4589): n equals a,t,g, or c
  SITE (4590): n equals a,t,g, or c
  SITE (4591): n equals a,t,g, or c
  SITE (4592): n equals a,t,g, or c
  SITE (4593): n equals a,t,g, or c
  SITE (4594): n equals a,t,g, or c
  SITE (4595): n equals a,t,g, or c
  SITE (4596): n equals a,t,g, or c
  SITE (4597): n equals a,t,g, or c
  SITE (4598): n equals a,t,g, or c
  SITE (4599): n equals a,t,g, or c
  SITE (4600): n equals a,t,g, or c
  SITE (4601): n equals a,t,g, or c
  SITE (4602): n equals a,t,g, or c
  SITE (4603): n equals a,t,g, or c
  SITE (4604): n equals a,t,g, or c
  SITE (4605): n equals a,t,g, or c
  SITE (4606): n equals a,t,g, or c
  SITE (4607): n equals a,t,g, or c
  SITE (4608): n equals a,t,g, or c
  SITE (4609): n equals a,t,g, or c
  SITE (4610): n equals a,t,g, or c
  SITE (4611): n equals a,t,g, or c
  SITE (4612): n equals a,t,g, or c
  SITE (4613): n equals a,t,g, or c
  SITE (4614): n equals a,t,g, or c
  SITE (4615): n equals a,t,g, or c
  SITE (4616): n equals a,t,g, or c
  SITE (4617): n equals a,t,g, or c
  SITE (4618): n equals a,t,g, or c
  SITE (4619): n equals a,t,g, or c
  SITE (4620): n equals a,t,g, or c
  SITE (4621): n equals a,t,g, or c
  SITE (4622): n equals a,t,g, or c
  SITE (4623): n equals a,t,g, or c
  SITE (4624): n equals a,t,g, or c
  SITE (4625): n equals a,t,g, or c
  SITE (4626): n equals a,t,g, or c
  SITE (4627): n equals a,t,g, or c
  SITE (4628): n equals a,t,g, or c
  SITE (4629): n equals a,t,g, or c
  SITE (4630): n equals a,t,g, or c
  SITE (4631): n equals a,t,g, or c
  SITE (4632): n equals a,t,g, or c
  SITE (4633): n equals a,t,g, or c
  SITE (4634): n equals a,t,g, or c
  SITE (4635): n equals a,t,g, or c
  SITE (4636): n equals a,t,g, or c
  SITE (4637): n equals a,t,g, or c
  SITE (4638): n equals a,t,g, or c
  SITE (4639): n equals a,t,g, or c
  SITE (4640): n equals a,t,g, or c
  SITE (4641): n equals a,t,g, or c
  SITE (4642): n equals a,t,g, or c
  SITE (4643): n equals a,t,g, or c
  SITE (4644): n equals a,t,g, or c
  SITE (4645): n equals a,t,g, or c
  SITE (4646): n equals a,t,g, or c
  SITE (4647): n equals a,t,g, or c
  SITE (4648): n equals a,t,g, or c
  SITE (4649): n equals a,t,g, or c
  SITE (4650): n equals a,t,g, or c
  SITE (4651): n equals a,t,g, or c
  SITE (4652): n equals a,t,g, or c
  SITE (4653): n equals a,t,g, or c
  SITE (4654): n equals a,t,g, or c
  SITE (4655): n equals a,t,g, or c
  SITE (4656): n equals a,t,g, or c
  SITE (4657): n equals a,t,g, or c
  SITE (4658): n equals a,t,g, or c
  SITE (4659): n equals a,t,g, or c
  SITE (4660): n equals a,t,g, or c
  SITE (4661): n equals a,t,g, or c
  SITE (4662): n equals a,t,g, or c
  SITE (4663): n equals a,t,g, or c
  SITE (4664): n equals a,t,g, or c
  SITE (4665): n equals a,t,g, or c
  SITE (4666): n equals a,t,g, or c
  SITE (4667): n equals a,t,g, or c
  SITE (4668): n equals a,t,g, or c
  SITE (4669): n equals a,t,g, or c
  SITE (4670): n equals a,t,g, or c
  SITE (4671): n equals a,t,g, or c
  SITE (4672): n equals a,t,g, or c
  SITE (4673): n equals a,t,g, or c
  SITE (4674): n equals a,t,g, or c
  SITE (4675): n equals a,t,g, or c
  SITE (4676): n equals a,t,g, or c
  SITE (4677): n equals a,t,g, or c
  SITE (4678): n equals a,t,g, or c
  SITE (4679): n equals a,t,g, or c
  SITE (4680): n equals a,t,g, or c
  SITE (4681): n equals a,t,g, or c
  SITE (4682): n equals a,t,g, or c
  SITE (4683): n equals a,t,g, or c
  SITE (4684): n equals a,t,g, or c
  SITE (4685): n equals a,t,g, or c
  SITE (4686): n equals a,t,g, or c
  SITE (4687): n equals a,t,g, or c
  SITE (4688): n equals a,t,g, or c
  SITE (4689): n equals a,t,g, or c
  SITE (4690): n equals a,t,g, or c
  SITE (4691): n equals a,t,g, or c
  SITE (4692): n equals a,t,g, or c
  SITE (4693): n equals a,t,g, or c
  SITE (4694): n equals a,t,g, or c
  SITE (4695): n equals a,t,g, or c
  SITE (4696): n equals a,t,g, or c
  SITE (4697): n equals a,t,g, or c
  SITE (4698): n equals a,t,g, or c
  SITE (4699): n equals a,t,g, or c
  SITE (4700): n equals a,t,g, or c
  SITE (4701): n equals a,t,g, or c
  SITE (4702): n equals a,t,g, or c
  SITE (4703): n equals a,t,g, or c
  SITE (4704): n equals a,t,g, or c
  SITE (4705): n equals a,t,g, or c
  SITE (4706): n equals a,t,g, or c
  SITE (4707): n equals a,t,g, or c
  SITE (4708): n equals a,t,g, or c
  SITE (4709): n equals a,t,g, or c
  SITE (4710): n equals a,t,g, or c
  SITE (4711): n equals a,t,g, or c
  SITE (4712): n equals a,t,g, or c
  SITE (4713): n equals a,t,g, or c
  SITE (4714): n equals a,t,g, or c
  SITE (4715): n equals a,t,g, or c
  SITE (4716): n equals a,t,g, or c
  SITE (4717): n equals a,t,g, or c
  SITE (4718): n equals a,t,g, or c
  SITE (4719): n equals a,t,g, or c
  SITE (4720): n equals a,t,g, or c
  SITE (4721): n equals a,t,g, or c
  SITE (4722): n equals a,t,g, or c
  SITE (4723): n equals a,t,g, or c
  SITE (4724): n equals a,t,g, or c
  SITE (4725): n equals a,t,g, or c
  SITE (4726): n equals a,t,g, or c
  SITE (4727): n equals a,t,g, or c
  SITE (4728): n equals a,t,g, or c
  SITE (4729): n equals a,t,g, or c
  SITE (4730): n equals a,t,g, or c
  SITE (4731): n equals a,t,g, or c
  SITE (4732): n equals a,t,g, or c
  SITE (4733): n equals a,t,g, or c
  SITE (4734): n equals a,t,g, or c
  SITE (4735): n equals a,t,g, or c
  SITE (4736): n equals a,t,g, or c
  SITE (4737): n equals a,t,g, or c
  SITE (4738): n equals a,t,g, or c
  SITE (4739): n equals a,t,g, or c
  SITE (4740): n equals a,t,g, or c
  SITE (4741): n equals a,t,g, or c
  SITE (4742): n equals a,t,g, or c
  SITE (4743): n equals a,t,g, or c
  SITE (4744): n equals a,t,g, or c
  SITE (4745): n equals a,t,g, or c
  SITE (4746): n equals a,t,g, or c
  SITE (4747): n equals a,t,g, or c
  SITE (4748): n equals a,t,g, or c
  SITE (4749): n equals a,t,g, or c
  SITE (4750): n equals a,t,g, or c
  SITE (4751): n equals a,t,g, or c
  SITE (4752): n equals a,t,g, or c
  SITE (4753): n equals a,t,g, or c
  SITE (4754): n equals a,t,g, or c
  SITE (4755): n equals a,t,g, or c
  SITE (4756): n equals a,t,g, or c
  SITE (4757): n equals a,t,g, or c
  SITE (4758): n equals a,t,g, or c
  SITE (4759): n equals a,t,g, or c
  SITE (4760): n equals a,t,g, or c
  SITE (4761): n equals a,t,g, or c
  SITE (4762): n equals a,t,g, or c
  SITE (4763): n equals a,t,g, or c
  SITE (4764): n equals a,t,g, or c
  SITE (4765): n equals a,t,g, or c
  SITE (4766): n equals a,t,g, or c
  SITE (4767): n equals a,t,g, or c
  SITE (4768): n equals a,t,g, or c
  SITE (4769): n equals a,t,g, or c
  SITE (4770): n equals a,t,g, or c
  SITE (4771): n equals a,t,g, or c
  SITE (4772): n equals a,t,g, or c
  SITE (4773): n equals a,t,g, or c
  SITE (4774): n equals a,t,g, or c
  SITE (4775): n equals a,t,g, or c
  SITE (4776): n equals a,t,g, or c
  SITE (4777): n equals a,t,g, or c
  SITE (4778): n equals a,t,g, or c
  SITE (4779): n equals a,t,g, or c
  SITE (4780): n equals a,t,g, or c
  SITE (4781): n equals a,t,g, or c
  SITE (4782): n equals a,t,g, or c
  SITE (4783): n equals a,t,g, or c
  SITE (4784): n equals a,t,g, or c
  SITE (4785): n equals a,t,g, or c
  SITE (4786): n equals a,t,g, or c
  SITE (4787): n equals a,t,g, or c
  SITE (4788): n equals a,t,g, or c
  SITE (4789): n equals a,t,g, or c
  SITE (4790): n equals a,t,g, or c
  SITE (4791): n equals a,t,g, or c
  SITE (4792): n equals a,t,g, or c
  SITE (4793): n equals a,t,g, or c
  SITE (4794): n equals a,t,g, or c
  SITE (4795): n equals a,t,g, or c
  SITE (4796): n equals a,t,g, or c
  SITE (4797): n equals a,t,g, or c
  SITE (4798): n equals a,t,g, or c
  SITE (4799): n equals a,t,g, or c
  SITE (4800): n equals a,t,g, or c
  SITE (4801): n equals a,t,g, or c
  SITE (4802): n equals a,t,g, or c
  SITE (4803): n equals a,t,g, or c
  SITE (4804): n equals a,t,g, or c
  SITE (4805): n equals a,t,g, or c
  SITE (4806): n equals a,t,g, or c
  SITE (4807): n equals a,t,g, or c
  SITE (4808): n equals a,t,g, or c
  SITE (4809): n equals a,t,g, or c
  SITE (4810): n equals a,t,g, or c
  SITE (4811): n equals a,t,g, or c
  SITE (4812): n equals a,t,g, or c
  SITE (4813): n equals a,t,g, or c
  SITE (4814): n equals a,t,g, or c
  SITE (4815): n equals a,t,g, or c
  SITE (4816): n equals a,t,g, or c
  SITE (4817): n equals a,t,g, or c
  SITE (4818): n equals a,t,g, or c
  SITE (4819): n equals a,t,g, or c
  SITE (4820): n equals a,t,g, or c
  SITE (4821): n equals a,t,g, or c
  SITE (4822): n equals a,t,g, or c
  SITE (4823): n equals a,t,g, or c
  SITE (4824): n equals a,t,g, or c
  SITE (4825): n equals a,t,g, or c
  SITE (4826): n equals a,t,g, or c
  SITE (4827): n equals a,t,g, or c
  SITE (4828): n equals a,t,g, or c
  SITE (4829): n equals a,t,g, or c
  SITE (4830): n equals a,t,g, or c
  SITE (4831): n equals a,t,g, or c
  SITE (4832): n equals a,t,g, or c
  SITE (4833): n equals a,t,g, or c
  SITE (4834): n equals a,t,g, or c
  SITE (4835): n equals a,t,g, or c
  SITE (4836): n equals a,t,g, or c
  SITE (4837): n equals a,t,g, or c
  SITE (4838): n equals a,t,g, or c
  SITE (4839): n equals a,t,g, or c
  SITE (4840): n equals a,t,g, or c
  SITE (4841): n equals a,t,g, or c
  SITE (4842): n equals a,t,g, or c
  SITE (4843): n equals a,t,g, or c
  SITE (4844): n equals a,t,g, or c
  SITE (4845): n equals a,t,g, or c
  SITE (4846): n equals a,t,g, or c
  SITE (4847): n equals a,t,g, or c
  SITE (4848): n equals a,t,g, or c
  SITE (4849): n equals a,t,g, or c
  SITE (4850): n equals a,t,g, or c
  SITE (4851): n equals a,t,g, or c
  SITE (4852): n equals a,t,g, or c
  SITE (4853): n equals a,t,g, or c
  SITE (4854): n equals a,t,g, or c
  SITE (4855): n equals a,t,g, or c
  SITE (4856): n equals a,t,g, or c
  SITE (4857): n equals a,t,g, or c
  SITE (4858): n equals a,t,g, or c
  SITE (4859): n equals a,t,g, or c
  SITE (4860): n equals a,t,g, or c
  SITE (4861): n equals a,t,g, or c
  SITE (4862): n equals a,t,g, or c
  SITE (4863): n equals a,t,g, or c
  SITE (4864): n equals a,t,g, or c
  SITE (4865): n equals a,t,g, or c
  SITE (4866): n equals a,t,g, or c
  SITE (4867): n equals a,t,g, or c
  SITE (4868): n equals a,t,g, or c
  SITE (4869): n equals a,t,g, or c
  SITE (4870): n equals a,t,g, or c
  SITE (4871): n equals a,t,g, or c
  SITE (4872): n equals a,t,g, or c
  SITE (4873): n equals a,t,g, or c
  SITE (4874): n equals a,t,g, or c
  SITE (4875): n equals a,t,g, or c
  SITE (4876): n equals a,t,g, or c
  SITE (4877): n equals a,t,g, or c
  SITE (4878): n equals a,t,g, or c
  SITE (4879): n equals a,t,g, or c
  SITE (4880): n equals a,t,g, or c
  SITE (4881): n equals a,t,g, or c
  SITE (4882): n equals a,t,g, or c
  SITE (4883): n equals a,t,g, or c
  SITE (4884): n equals a,t,g, or c
  SITE (4885): n equals a,t,g, or c
  SITE (4886): n equals a,t,g, or c
  SITE (4887): n equals a,t,g, or c
  SITE (4888): n equals a,t,g, or c
  SITE (4889): n equals a,t,g, or c
  SITE (4890): n equals a,t,g, or c
  SITE (4891): n equals a,t,g, or c
  SITE (4892): n equals a,t,g, or c
tattnnnnnnnnnnnnnnnnnnnnnnnnnnnnnnnnnnnnnnnnnnnnnnnnnnnnnnnnnnnnnnnnnnnnnnnnnnnnnnnnnnnnnnnnnnnnnnnnnnnnnnnnnnnnnnnnnnnnnnnnnnnnnnnnnnnnnnnnnnnnnnnnnnnnnnnnnnnnnnnnnnnnnnnnnnnnnnnnnnnnnnnnnnnnnnnnnnnnnnnnnnnnnnnnnnnnnnnnnnnnnnnnnnnnnnnnnnnnnnnnnnnnnnnnnnnnnnnnnnnnnnnnnnnnnnnnnnnnnnnnnnnnnnnnnnnnnnnnnnnntgagatagaatctcactctgttgcccaggctggggtgcagtggtgcgatctcagctccccacaacctctgcctccagggttcaagcaattctcctgcctcagcctcctgagtatctgggattacaggcatgcaccactacgcttggctaatttttgtatttttagtagagacggggtttcaccatgttggccaggctggtcttgaactcctgacctcaggtgattcgcccgccttggcctcccaaagtgctgggattacaggcatgagccaccgtgcctggctgaaagttcattttcaatagcatagtccagaccattttttttctaaatgtgctaccagaatcaaagaaataataacattccattaaaacaaataaaatggcattaaattaaatgttctgcataatttaagagccctgaccaattttagtcttttttttttttttgagacagagtctcactgtgtcgcccaggctggagtgcagtggtacgatcttggctcactgcagcctccacctcctgggttcaagtgattctcctgcctcaacctcccgagcagctgggattacaggcatgtgccaccatacctggctaatttttatatctttagtagagatggggtttcaccatgttggccaggctggtctcaaactcttgacctcaggtgatctgcccgcctcggcctcccaaagtgctggcattacaggcatgagtcactgcgcctggcctagtctattattaacaaataaaaattttaatacataaaaatggatggatattttctagagccttaattaagtaattcactccaaatgtcttttttttttttttttttagctagtaagtggagacactttgaaacatggtgcttaaaaaaaaacacactacctacctggtgggctgtttcatggtgaaataacttattctgtataatttgaatgcaattcagatactatgtagatgttaaaaagctaagttaacataaaatgtacatcatgaaacgtcaccttacttgacggcattaatacattttttccactaaaatacttgtaaccatggccatcagtatgaagaaaaattttaaacacgatgaaaggtggaaacgtttcacctctaaatctgaaataaagataaaaatttagttatttggcatcaggttttgggctcagttgcttttcccccttatacttaagatagttcatatagtttcttgcatacagggtaaaggctatgtcagagcatgtaaagaactggtaatgaaatggatcacataggatgtaagacccacactttggtgtactcacaactattctcatacctgtgtaagactgaatacagaatgggagatgagagctactctcatggcaacttttagccacagagtcatgcctcggtttctttacataacaaatgtaaataagaataacacatttactttgtaattaagttctgagaagttacaagaatttaaaaaatccatatctaagatttcctcatattaactaagtacttcttgaaataaatcagcatagatacattacctgaatctaattttacactgcatagtaggatccttaataagcttagcctctaagggggccactttcttcagtatttcatgtgttacatagaattcctgaaataaaggacagtgctgtaaaaggaaagcagtatcccacccagacacaatttatggactataacagaggcaacgtggtaaagtgaacattatgctggacttggagttctgaaggggtgggtttttgttttggcacctccacttactatctgtgtagccttgagccagttacttaatcattttggcctccaactttggttatctgtcccttttagagatcaaaggcactattatttccctatgacagcacttttcacaatatattataattacttatcaacttgtctgtgcctcctactagactgtaagcttcatgaaggtagggatggtggcttttctctttaccactatattcctagcatctaatacagtgcctggaacacagcagatgcttaagaagtatttgttgaatgaatcactgtaagatgaggatgataatagtaataagttactagcttttaagcaccttttatgtaccatatactactatgttaggtgccttatatacattagctcatttaatccttacatcagcaacactatgagaattttttgtttgttttgagacagagtctcgctccgtcgcccaggctcgagtgcggtggcatgatctcggctcactgcaacctccgcctcccaggttcaagcgattctcctgcctcagcctcccgagtagctgggactacaggcacctgccaccacgcccggctaattttgtattttttcagtagagacggggtttcaccatattggccaggctggcctggaactcctgaccttgtgagccgcacgcctcagcctcccaaagtgctgggattacaggtgtgagccaccactcaggctgcagtgcaatggcatgatctcggctcaccgcaacctccacctcccaggttcaagtgattctcctgctcagcctcctgagtagctggaattacaggcatgcgccaccatgcctggctaattttgtatttttaatagagatggggtttcttcatgttggtcaggctggtctcgagctcccgacttcaggtgatccacccgcctcagcctcccaaagtgctgggattacaggcgtgagccactgcacctggcccattatgagaatattatcacgcctattttacagatgagaaggctgaggctcagggaatttttgtaatttataaaaaggcatacaggtagtgaatggggaagccaggattcatttagttctgtttgactctaaagtcccaactctttcccccaaacaaccccaaccaaccccgttatgcctatgataatcacataaaaatgtacactaaagagcttttaggctgggcactgcggctcacgcctataatcctggcactttgggaggccaaagcgggaggatcacctgaggtcaagagttcgagaccaacctggtcaacatggtgaaaccccatctctactaaaaatacaaaaattagccaggcgtgatggcaggcgcctgtagtccaagctatttgggaggctgaagcaggagaatcgcttgaacccgggaggcagaggttgcagggagccgagatcgtgccactgcactccagcctgggtgacagagcaagactctgctcaaaataaataaataaatagcttttaaaaggacaaagcattattaatttaaggtattaaagtattactataacagataaaaaagaatttccttctgttacaaaagtctaaaaatactatgaaaccagcattataaaattaaatacaagttccatattcaaagacaatggataatagacctgaaatgccaggagtttacctgggtgggttttctctgaagtattcagacggagtcttgctctgtcgcccaggctggagtgcagtggctcaaactcggctcactataacctccacctccccggttcaaggtagctgggattacaggcgcacaccaccatgcccggctaatttttttgtatttttaggagagacggggtattcaccatggtgaccggactggtctcgaactnnnnnnnnnnnnnnnnnnnnnnnnnnnnnnnnnnnnnnnnnnnnnnnnnnnnnnnnnnnnnnnnnnnnnnnnnnnnnnnnnnnnnnnnnnnnnnnnnnnnnnnnnnnnnnnnnnnnnnnnnnnnnnnnnnnnnnnnnnnnnnnnnnnnnnnnnnnnnnnnnnnnnnnnnnnnnnnnnnnnnnnnnnnnnnnnnnnnnnnnnnnnnnnnnnnnnnnnnnnnnnnnnnnnnnnnnnnnnnnnnnnnnnnnnnnnnnnnnnnnnnnnnnnnnnnnnnnnnnnnnnnnnnnnnnnnnnnnnnnnnnnnnnnnnnnnnnnnnnnnnnnnnnnnnnnnnnnnnnnnnnnnnnnnnnnnnnnnnnnnnnnnnnnnnnnnnnnnnnnnnnnnnnnnnnnnnnnnnnnnnnnnnnnnnnnnnnnnnnnnnnnnnnnnnnnnnnnnnnnnnnnnnnnnnnnnnnnnnnnnnnnnnnnnnnnnnnnnnnnnnnnnnnnnnnnnnnnnnnnnnnnnnnnnnnnnnnnnnnnnnnnnnnnnnnnnnnnnnnnnnnnnnnnnnnnnnnnnnnnnnnnnnnnnnnnnnnnnnnnnnnnnnnnnnnnnnnnnnnnnnnnnnnnnnnnnnnnnnnnnnnnnnnnnnnnnnnnnnnnnnnnnnnnnnnnnnnnnnnnnnnnnnnnnnnnnnnnnnnnnnnnnnnnnnnnnnnnnnnnnnnnnnnnnnnnnnnnnnnnnnnnnnnnnnnnnnnnnnnnnnnnnnnnnnnnnnnnnnnnnnnnnnnnnnnnnnnnnnnnnnnnnnnnnnnnnnnnnnnnnnnnnnnnnnnnnnnnnnnnnnnnnnnnnnnnnnnnnnnnnnnnnnnnnnnnnnnnnnnnnnnnnnnnnnnnnnnnnnnnnnnnnnnnnnnnnnnnnnnnnnnnnnnnnnnnnnnnnnnnnnnnnnnnnnnnnnnnnnnnnnnnnnnnnnnaaaaaaaaaattagctgggcatggcggcacgcacctgtagtcccagctactagggaggcggaggcaggataatcccttgaacctgggtggtggaggttgcagtgagccaagatcatgcccctgcactccagcctgggcaacagagtgagacttcatctcaaaaaagaaaagaaaaaaaagagtatcactaataata

SEQ ID NO: 7546 - DNA, 2283 bp, Homo sapiens
atctctttgcattattacagttgttgttatttttagttctatttatatgaaaaatgtactttttagcccacaaaaatagcatagcagcagcttatcaaaatgtcccagacaagtttacttcaacaaattagtaacaccttcatgcttcctgtggtggaagaaatgcagagtccacttcctcccagtgaacatctgagccagatttctgctccactcggtcccccttcccacctcttacagccatgaaataatgtgagagtatttgtttcccctgcaaagggaagagggtccagagacaaaagggaagttagtattcactggaagcctccctgtacaagcaacagtgttaggacttttatacacatttttacaattattacagcagttctcaattattgaaacagagggtaggcatttcccctttttcagaagggaaaagtgagaattaagttaattccaaagtcacacagctagtgagagaaaaagcctggacaggaactcagactgtatgactccaaaggctaagtgcattctatacacacaggccgccctcctggcagtgagagttcaggatctgttggagaaaacctcagaccatggttttcttgcagcttctgctggagaacattaggtgcctgttcccccgtggtgagtgttacaaagtgcagcaccacccaggggaagagtctgggccttggagttagacctgagtttgaatcctccttcagatatttactattgatgacattggcaatcaatgctgctgaatttctccagccctccatttattcatctattaaggggagagctacctacagggcggggaacttacaaggattagatgaggggatatgtgtaaaggcctaacacccagtaggtgctcactaaatgatgttccttattattatggtgattaccactgtactcttttcagatgaaagtgttcggtcacctggaacctgtgagtatgtggtttttgatctgtgactaaactgttcacccatttcccagtttctctgctctgtcaaatatcaacattttaccaggtttctctgttgttgccaaacctgtcatttttatttggtgtggcttcttgggaaacttccatggcccatttgatgggaatcaaacagtgaaaacaaggacagatgcagcagaggtggcatcaggaacaaatgggtcataagaacttaccttggcagcagccccagaatggtcaggaggaaaggcactttaaggtatcagaaggtagaaaggagaggttggatgatagaatggggaagggattcctcctcgtgttcacagaagtgaatcaatgggagacacaaggttaccacttaatattcctgctctcctaggcatgggtcaggtacatcttcagccatgggtaagtttgttcaacaaatgagtgatctttgggaggctgaggcgggcggatcacgaggtcaggagattgagaccatcctggctaacacgatgaaaccccgtctctactaaaaatacaaaaattagccgggtgtggtggcgggcgcctgtagtcccagctactcgggaggctggggcaggagaatgtcgtgaacctgggaggcagagcttgctgtaagcagagatcgtgccactgcactccagcctgggcgacagagcgagactgcatcccaaaaaaaaaaacaaaaaaacgaaaacaaaaacaaaaccaaatgagtgatgcattgacctttcgtaattcttggatgcaaaagtagaactcaagctacttaataacaatcatggtggcatgggcaccagcaagtcagggtggacaacagccatagttctggagcatggtcctcaagactaccttttgtatgcagagtattaacactttaactcttagatccttggaacataaggaagagaggctggaacaaaaaggggttggcatttggaggtggagaggtagtgtaaggcacaactgtttatcaactggtatctaagtatttcaggccagacacgtggctcacacctctaatcccagcactttgggaggctgagccaggaggattgcttgagtctaggagttcaagaccggtctgggcaacatggtgaaaccctgtctctacaaaaaatacaaaaattagccaggtgtggtggggcacgcctatggtcccagctactggggaggctgagatgggaggatccacctgagcccttgggggtcgaggctgtagcaagtcatgattgcaccactgcactccagctgggtgataaagtgagaccttgtctaaaaaaaaaaaaaaaaaaaaa

SEQ ID NO: 7547 - DNA, 184 bp, Homo sapiens; identical to SEQ ID NO: 5421

SEQ ID NO: 7548 - DNA, 183 bp, Homo sapiens; identical to SEQ ID NO: 5243

SEQ ID NO: 7549 - DNA, 193 bp, Homo sapiens; identical to SEQ ID NO: 5245

SEQ ID NO: 7550 - DNA, 61 bp, Homo sapiens
atgccactgcactccagcctgggcgacagagtgagactccatctcaaaaaaaaaaaaaaaa

SEQ ID NO: 7551 - DNA, 937 bp, Homo sapiens
gcctaacacccagtaggtgctcactaaatgatgttccttattattatggtgattaccactgtactcttttcagatgaaagtgttcggtcacctggaacctgtgagtatgtggtttttgatctgtgactaaactgttcacccatttcccagtttctctgctgtgtcaaatatcaacattttaccaggtttctctgttgttgccaaacctgtcatttttatttggtgtggcttcttgggaaacttccatggcccatttgatgggaatcaaacagagtgaaaacaaggacagatgcagcagaggtggcatcaggaacaaatgggtcataagaacttaccttggcagcagccccagaatggtcaggaggaaaggcactttaaggtatcagaaggtagaaaggagaggttggatgatagaatggggaagggattcctccttgtgttcacagaagtgaatcaatgggagacacaaggttaccacttaatattcctgctctcctaggcatgggtcaggtacatcttcagccatgggtaagtttgttcaacaaatgagtgatctttgggaggctgaggcgggcggatcacgaggtcaggagattgagaccatcctggctaacacgatgaaaccccgtctctactaaaaatacaaaaattagccgggtgtggtggcgggcgcctgtagtcccagctactcgggaggctgaggcaggagaatggcgtgaacccgggaggcggagcttgcagtgagccgagattgcgccactgcactctagcctgggcgacagagtaagactccgtctcaaaaagagaaaaaagaaacacagaaatgtgaaaaaggcccaaagttagagagaaaaacagaccccaaaaagggttaagtgaacatcccactctaaggcaagaaagaaatcctgaaatctgagaaagaaaaaagcatttc

SEQ ID NO: 7552 - DNA, 279 bp, Homo sapiens; identical to SEQ ID NO: 5923

SEQ ID NO: 7553 - DNA, 228 bp, Homo sapiens
tcgaggtcaggagattgagaccatcctggctaacatggtgaaaccccatctctactaaaaatacaaaaaaaattagccgggcgtggtggcgggagcctgtagtcccagctactcgggaggttgaggcaggagaatggcgtgaacctgggaggcggagcttgtagtgagccaagatcatgccactgcactccagcctgggcgacagagcgagactccgtctcaaaaaaa

SEQ ID NO: 7554 - DNA, 441 bp, Homo sapiens
atagtttagtgtctagcttctggtccacttgtactggtgttgactatgtatcagcccagcttatgtggctacagggattttcgttgcacatctgaatgaagccaaaaacatacgcaaggttttaagagtatttgatgtcttattggcaatacgaggtggaccagccatacagttagtaacataaccagcattggcttctggcacttagttctgagttctttccgaagaacttatatatgcagaaactggacttagcactcacttaaagaagaaataactttgataagaaccaggtgggttgttctttctctttattggtttcatgttttcagatcttgctaactctccccagctgtgccctgcagtggagacctatttgagactctgttatgatatgcccaagataccacacatgccctaggctcttcccctagcgacaac

SEQ ID NO: 7555 - DNA, 370 bp, Homo sapiens
ttctttgaccagtcctttcactgaaaagactgtatttagatatttctctgagtgttctagattcatagacccaaatgacctctctgagcatcaagatacatgaagaagttacttcctgaggataataaatatgaaaagagaattatcaccctctgctttcagaaatcacttaaaaaggaagggagtgcttttcccatgaggttcctgagacagagtccttatgtcaccttgtattggcaaaaagatctggggcactgtgtttgacgatagcacttctttgttcccctcccgatatatttacagaatataatcctattttgcttgcactcatttccataatactgaaagtaaataaaccttatataacgtt

SEQ ID NO: 7556 - DNA, 268 bp, Homo sapiens; identical to SEQ ID NO: 5616

SEQ ID NO: 7557 - DNA, 279 bp, Homo sapiens
caccaaattattgctaatcctatcatcactctatgaagaccttaacctcttacaaaggatctccccagccacccccagtgccttcctggcttaattcactaacaattaagaaagcaggccatagaccaatgggttcctcactgctaaactctgcttttatgttaaccccaccgcattctctttggaacccaacagggaccccctcaactaaagcagaatgatgccccgtggcccaagttcaccattcttcaaagcagctttcccacagagccctggaac

SEQ ID NO: 7558 - DNA, 821 bp, Homo sapiens
atctctttgcattattacagctgctgttatttttagttctatttatatgaaaaatgtactttttagcccacaaaaatagcatagcagcagcttatcaaaatgtcccagacaagtttacttcaacaaattagtaacaccttcatgcttcctgtggtggaagaaatgcagagtccacttcctcccagtgaacatctgagccagatttctgctccactcggtcccccttcccacctcttacagccatgaaataatgtgagagtatttgtttcccctgcaaagggaagagggtccagagacaaaagggaagttagtattcactggaagcctccctgtacaagcaacagtgttaggacttttatacacatttttacaattattacagcagttctcaattattgaaacagagggtaggcatttcccctttttcagaagggaaaagtgagaattaagttaattccaaagtcacacagctagtgagagaaaaagcctggacaggaactcagactgtatgactccaaaggctaagtgcattctatacacacaggccgccctcctggcagtgagagttcaggatctgttggagaaaacctcagaccatggttttcttgcagcttctgctggagaacattaggtgcctgttcccccgtggtgagtgttacaaagtgcagcaccacccaggggaagagtctgggccttggagttagacctgagtttgaatcctccttcagatatttactattgatgacattggcaatcaatgctgctgaatttctccagccctccatttattcatctattaaggggagagctacctacagggc

SEQ ID NO: 7559 - DNA, 2845 bp, Homo sapiens
tttgtaaattgaattcaggtagtagtatcatccaccaatccatctgttgctttgttggtcttctgaaggggggatttaaaactctgaaacagtctgagcaccttgagagaaatcagaaacaagacaattatttgcagtgctgtcaaacaagccagaaggagaaaatcaaggtagaatgccccactttccagttgccttaggatagcaggctgcagcctcagacttgatcctgtcattctcctctgtctcccacatctgaattgataattgctgcaaaatgtcattagcctacacttcatccatcagggctcttggattcttacaccacgacttgctgtgcaaggtgtttattgcatcttcaaagtgaaactttaaattattattcaaacatttattttccttttgttttaaaaagagtccctacaatgatcacttctaagatttttttttaccttcccctctgcagcacacacagctattcaacaatgatttctaaaattcatatttcaaatttgtatctctccattttgaaacattatagaaagcatgggatgcttgagacaaatctggtttctcctttgaagtagctgttgacaacctactctcttgaaaagttagatataattcttaatcatgtttagtggaaatttgtttacctgttccatctgttttgctgtttcattgtaaggaagatgagaagtgttggaacagcttccctcccctaaaggtattctagcagaggcgagacagcaacttggcgggcatgttgcataggagttaagtaccagatggggaattgcccatgtgatggtgaagagtctctcacattgattttcttccttttctcctcttctctcctccttctcttctctcctctttctcttctcttctttctcttctcttctgtcttcctcttcctcttctcttcctctcctcttcctctttctctctcttcctttttctcttcctctttctctttctctttctcttctcttctctctctcttccttccttctttctttccttccttccttccttccttccttccttccttccttctttccctccctccctccctccctcctccctttttctttttctttctttttttttggtttggcagagtcttgctctgttgcccaggctgcagtgcagtggtgtgatctcggctcactgcaacctccacctcccgggttcaagcaattctcttgcctcagcttctccagttactgggactacaggtgcataccaccatgcccggctaatttttgtatttttagtagaggcggggttttgtcatgttggccaggctgatctcaaactcctgacctcaggtgatccgcctgcctcagccttccaaagtgctgagattacaggcatgagccgctgtacccggcctgattttctatgattctgcctttaaaagacagcacgtataccaagcctttttcagaaagcttttctcttaactccttctaatgctgaattttctctctattatcctcacccaattttggctgagagttagtgtacacaatttaacttcttagaaaaattccagtgtctatgcttatattgctcacttgaatcatttgaattagaaagggatctacaaataataaaagcaaagagtgcagacagattagggatagtaattcttaaagtgccatctatcccagatttccgttatagaccagcatatgtgtaattgtgcagtgggaggtaagtagtacccaggacattgcatgtacaatactttgaaacaaagtggcaacaaagatttcctggctcaggtatgcaccccagctgctggtttagatgaagtgctgagaatatttagaaaaagcgctttaaaaagcatctagagattatcatgaaaataattggagacaaagtcactaggctgctttgtgagaggcagcataccatggctctaaacccgttcacaaaaaacaatgttagagacattaggaattcaggttttgaaaatctttttttcgatttatttgtaatttacataccaaaaaaccacattaaaatagtcctcccttcaacatggctatcttttttcaagttttatatgcatagctctctcagcacttgaatggaaaaactgttacagcatttgggagttgtttttcttttagactttgcagatcttatctcaaggtgactaggaacccagagctaagtatctgtgaggcaatctctgcgaacgctgaacttacctagttggtttctatgaaatatgtagaatgcactgcagtagccattgtaagaaggtactataccggttttttggggcttgttgttgttgtttggtctgagaatgtactgccaacccctcttttataagagagaactgattttgatacatattttaaaatatgatagtacagagttaatggatgttaaaattttatttctttgttttggtaagtagattaaatcgagaatcatataatcagtacatttgagaattatataaccagtatataataatactggacacaaccatttgccatcttttcctgttatcatcccatagagtgggtggggagaatgaatagacataaacctagaataatgataaatggtttttaaaactctatattgaatacattccagctgataatgacttttctttttcaccttggtgatatcagcctcagggtaaaaaaaaaagtttcataaatcttttagttataaacaggaaagttttatattagtgtgtcatttcatttctagactgttgatggtgatgatgataaagaatttggagccaattttgatatatgaatgtattgcttttacatgtgatgattaaagctctccattagcagtt

SEQ ID NO: 7560 - DNA, 2395 bp, Homo sapiens
gtgaatttgtggaagcaatctgcattcataactttgattggagaataaatggtatacatggtgctgtctttggaaaaggtaattatcagaattccaggtccaatttgagccccaggagagagtttcctctttttagaggaatataaatataaatatgaactgctttatggcaaatatatagagaatgataaaacaaatggattataattgcattgtgtacgagaatagatactagtgtttttgttttattttgtttttaagaaaatcataggtaagaatattagtgagcaataaggaatagtgggggaaaacttcacgttatttataatgttgtgaaaatccaagtttttcaatttatgtctggtactcaggcaaattaaggagagaggtgaggggaaaaggtatgggatgtacatttaattttctggtccttactttgtaccttgcttccagcaagagaactgactactgtttaggatcaggatatgctgcattttgaaaatgtaaattaatttaaaaaataactactaaaaaggccattccacttatttaactgtaaggaggtcagaaggtgttacataaatcccatcagtgttaggtaaatatgagactttgcaattcatttccacatttttttagagtaagaatgcccttaatgatgtctatctcttgtgtctaccatttcagaagagttggctgctttatcgagttttcatgtgtaggcagtgagccagtaaaatcatttttgttttggaatgctcagatatgaatagcattatactctctcagaaatcttttcatggatatgggattctattgtttccagaaatattactgaattgttatcccatatcatagaaatacggtttcttggggtttaaaagaatccctgtaggccatcggtttccactgtgctctctagagctttgctggatgttgacaagggaacagggtgaggaagtggtgaaaggaaatagaaacgggagggagggccaagcagtaaaactcagggccgggcatggtggctcacgcctgtaatcccagcagtttgggaggtcgaggcaggtggatcacctgaggtcaagagttcaagatcagcctggccaacatggtgaaaccctgtctctactaaaaaaatataaaaattagttgggtgtggtggcacgcgcctgtaatcccagctactcaggaggctgagggaggagaatcgcttgaacctgggaggcggaggttgcagtgagctgagatcgcgccactgcactccagcttgggagacagagcaagactctgtctcaaaaaaacagaacaaaacaaaactcaggtccaaccacacttttaatcattaaaccagttttatctgttttattaattgttttctttgtaagatttattttaaaaacagaagtctgatagctatattttggtgggggcaggggatggtgttggtggtgaggactggtctgtaccaacaaatctattcctatggcagtctatactacagctgtccataacagatggatttctattcttctcttaaagatctgcagatgaggaaattccacatctatttttattatacaattctatgcatctattctcctgacaaaatgtttttgcttgtttttaatatattcttcggagtaatcttggcttttcttggtcctctttgtttaaggaacctattttgctagagatgctgcttattccagtcgtttctgcaaagatgacataaagcatgggaacacattccaaattcatggtgtcagcttgcaacagcggcatctgtttagaacatataaatctatgtttcttgctcgagtgctaattggagattacataaacggagactccaaatacatgcgacctccttccaaagacgggagctatgtgaatttatatgacagctgtgtggatgatacctggaacccaaagatctttgtggtttttgatgccaaccaaatctatcctgagtacttgatagactttcattgatttcacttccaaatctcggtggtcaaggaagctttattcttttttgcaggaaggtttgctcttcagtcatctagccactaaatgttaattatctgatacttttgaaacagatatgaaaaaaagtggcctccatataaaaagacatactgacttcaaggttggtttttgttgttttgtttttgcctgtttcttgtagtcttgtttgttaaaagttgatatcattgatgttttaacacataggggtgaaagataccattcaaaatggaatcagctgagtctcaactaatgtggtcattgagatctttaaagtttacgtgtgtgttatcaggataaatgattttagtttaaatagacttattcgtataaatgttgaaaaaaaatacagacataaatgtgtcccttt

SEQ ID NO: 7561 - DNA, 38771 bp, Homo sapiens
  SITE (7892): n equals a,t,g, or c
  SITE (7893): n equals a,t,g, or c
  SITE (7894): n equals a,t,g, or c
  SITE (7895): n equals a,t,g, or c
  SITE (7896): n equals a,t,g, or c
  SITE (7897): n equals a,t,g, or c
  SITE (7898): n equals a,t,g, or c
  SITE (7899): n equals a,t,g, or c
  SITE (7900): n equals a,t,g, or c
  SITE (7901): n equals a,t,g, or c
  SITE (7902): n equals a,t,g, or c
  SITE (7903): n equals a,t,g, or c
  SITE (7904): n equals a,t,g, or c
  SITE (7905): n equals a,t,g, or c
  SITE (7906): n equals a,t,g, or c
  SITE (7907): n equals a,t,g, or c
  SITE (7908): n equals a,t,g, or c
  SITE (7909): n equals a,t,g, or c
  SITE (7910): n equals a,t,g, or c
  SITE (7911): n equals a,t,g, or c
  SITE (7912): n equals a,t,g, or c
  SITE (7913): n equals a,t,g, or c
  SITE (7914): n equals a,t,g, or c
  SITE (7915): n equals a,t,g, or c
  SITE (7916): n equals a,t,g, or c
  SITE (7917): n equals a,t,g, or c
  SITE (7918): n equals a,t,g, or c
  SITE (7919): n equals a,t,g, or c
  SITE (7920): n equals a,t,g, or c
  SITE (7921): n equals a,t,g, or c
  SITE (7922): n equals a,t,g, or c
  SITE (7923): n equals a,t,g, or c
  SITE (7924): n equals a,t,g, or c
  SITE (7925): n equals a,t,g, or c
  SITE (7926): n equals a,t,g, or c
  SITE (7927): n equals a,t,g, or c
  SITE (7928): n equals a,t,g, or c
  SITE (7929): n equals a,t,g, or c
  SITE (7930): n equals a,t,g, or c
  SITE (7931): n equals a,t,g, or c
  SITE (7932): n equals a,t,g, or c
  SITE (7933): n equals a,t,g, or c
  SITE (7934): n equals a,t,g, or c
  SITE (7935): n equals a,t,g, or c
  SITE (7936): n equals a,t,g, or c
  SITE (7937): n equals a,t,g, or c
  SITE (7938): n equals a,t,g, or c
  SITE (7939): n equals a,t,g, or c
  SITE (7940): n equals a,t,g, or c
  SITE (7941): n equals a,t,g, or c
  SITE (7942): n equals a,t,g, or c
  SITE (7943): n equals a,t,g, or c
  SITE (7944): n equals a,t,g, or c
  SITE (7945): n equals a,t,g, or c
  SITE (7946): n equals a,t,g, or c
  SITE (7947): n equals a,t,g, or c
  SITE (7948): n equals a,t,g, or c
  SITE (7949): n equals a,t,g, or c
  SITE (7950): n equals a,t,g, or c
  SITE (7951): n equals a,t,g, or c
  SITE (7952): n equals a,t,g, or c
  SITE (7953): n equals a,t,g, or c
  SITE (7954): n equals a,t,g, or c
  SITE (7955): n equals a,t,g, or c
  SITE (7956): n equals a,t,g, or c
  SITE (7957): n equals a,t,g, or c
  SITE (7958): n equals a,t,g, or c
  SITE (7959): n equals a,t,g, or c
  SITE (7960): n equals a,t,g, or c
  SITE (7961): n equals a,t,g, or c
  SITE (7962): n equals a,t,g, or c
  SITE (7963): n equals a,t,g, or c
  SITE (7964): n equals a,t,g, or c
  SITE (7965): n equals a,t,g, or c
  SITE (7966): n equals a,t,g, or c
  SITE (7967): n equals a,t,g, or c
  SITE (7968): n equals a,t,g, or c
  SITE (7969): n equals a,t,g, or c
  SITE (7970): n equals a,t,g, or c
  SITE (7971): n equals a,t,g, or c
  SITE (7972): n equals a,t,g, or c
  SITE (7973): n equals a,t,g, or c
  SITE (7974): n equals a,t,g, or c
  SITE (7975): n equals a,t,g, or c
  SITE (7976): n equals a,t,g, or c
  SITE (7977): n equals a,t,g, or c
  SITE (7978): n equals a,t,g, or c
  SITE (7979): n equals a,t,g, or c
  SITE (7980): n equals a,t,g, or c
  SITE (7981): n equals a,t,g, or c
  SITE (7982): n equals a,t,g, or c
  SITE (7983): n equals a,t,g, or c
  SITE (7984): n equals a,t,g, or c
  SITE (7985): n equals a,t,g, or c
  SITE (7986): n equals a,t,g, or c
  SITE (7987): n equals a,t,g, or c
  SITE (7988): n equals a,t,g, or c
  SITE (7989): n equals a,t,g, or c
  SITE (7990): n equals a,t,g, or c
  SITE (7991): n equals a,t,g, or c
  SITE (7992): n equals a,t,g, or c
  SITE (7993): n equals a,t,g, or c
  SITE (7994): n equals a,t,g, or c
  SITE (7995): n equals a,t,g, or c
  SITE (7996): n equals a,t,g, or c
  SITE (7997): n equals a,t,g, or c
  SITE (7998): n equals a,t,g, or c
  SITE (7999): n equals a,t,g, or c
  SITE (8000): n equals a,t,g, or c
  SITE (8001): n equals a,t,g, or c
  SITE (8002): n equals a,t,g, or c
  SITE (8003): n equals a,t,g, or c
  SITE (8004): n equals a,t,g, or c
  SITE (8005): n equals a,t,g, or c
  SITE (8006): n equals a,t,g, or c
  SITE (8007): n equals a,t,g, or c
  SITE (8008): n equals a,t,g, or c
  SITE (8009): n equals a,t,g, or c
  SITE (8010): n equals a,t,g, or c
  SITE (8011): n equals a,t,g, or c
  SITE (8012): n equals a,t,g, or c
  SITE (8013): n equals a,t,g, or c
  SITE (8014): n equals a,t,g, or c
  SITE (8015): n equals a,t,g, or c
  SITE (8016): n equals a,t,g, or c
  SITE (8017): n equals a,t,g, or c
  SITE (8018): n equals a,t,g, or c
  SITE (8019): n equals a,t,g, or c
  SITE (8020): n equals a,t,g, or c
  SITE (8021): n equals a,t,g, or c
  SITE (8022): n equals a,t,g, or c
  SITE (8023): n equals a,t,g, or c
  SITE (8024): n equals a,t,g, or c
  SITE (8025): n equals a,t,g, or c
  SITE (8026): n equals a,t,g, or c
  SITE (8027): n equals a,t,g, or c
  SITE (8028): n equals a,t,g, or c
  SITE (8029): n equals a,t,g, or c
  SITE (8030): n equals a,t,g, or c
  SITE (8031): n equals a,t,g, or c
  SITE (8032): n equals a,t,g, or c
  SITE (8033): n equals a,t,g, or c
  SITE (8034): n equals a,t,g, or c
  SITE (8035): n equals a,t,g, or c
  SITE (8036): n equals a,t,g, or c
  SITE (8037): n equals a,t,g, or c
  SITE (8038): n equals a,t,g, or c
  SITE (8039): n equals a,t,g, or c
  SITE (8040): n equals a,t,g, or c
  SITE (8041): n equals a,t,g, or c
  SITE (8042): n equals a,t,g, or c
  SITE (8043): n equals a,t,g, or c
  SITE (8044): n equals a,t,g, or c
  SITE (8045): n equals a,t,g, or c
  SITE (8046): n equals a,t,g, or c
  SITE (8047): n equals a,t,g, or c
  SITE (8048): n equals a,t,g, or c
  SITE (8049): n equals a,t,g, or c
  SITE (8050): n equals a,t,g, or c
  SITE (8051): n equals a,t,g, or c
  SITE (8052): n equals a,t,g, or c
  SITE (8053): n equals a,t,g, or c
  SITE (8054): n equals a,t,g, or c
  SITE (8055): n equals a,t,g, or c
  SITE (8056): n equals a,t,g, or c
  SITE (8057): n equals a,t,g, or c
  SITE (8058): n equals a,t,g, or c
  SITE (8059): n equals a,t,g, or c
  SITE (8060): n equals a,t,g, or c
  SITE (8061): n equals a,t,g, or c
  SITE (8062): n equals a,t,g, or c
  SITE (8063): n equals a,t,g, or c
  SITE (8064): n equals a,t,g, or c
  SITE (8065): n equals a,t,g, or c
  SITE (8066): n equals a,t,g, or c
  SITE (8067): n equals a,t,g, or c
  SITE (8068): n equals a,t,g, or c
  SITE (8069): n equals a,t,g, or c
  SITE (8070): n equals a,t,g, or c
  SITE (8071): n equals a,t,g, or c
  SITE (8072): n equals a,t,g, or c
  SITE (8073): n equals a,t,g, or c
  SITE (8074): n equals a,t,g, or c
  SITE (8075): n equals a,t,g, or c
  SITE (8076): n equals a,t,g, or c
  SITE (8077): n equals a,t,g, or c
  SITE (8078): n equals a,t,g, or c
  SITE (8079): n equals a,t,g, or c
  SITE (8080): n equals a,t,g, or c
  SITE (8081): n equals a,t,g, or c
  SITE (8082): n equals a,t,g, or c
  SITE (8083): n equals a,t,g, or c
  SITE (8084): n equals a,t,g, or c
  SITE (8085): n equals a,t,g, or c
  SITE (8086): n equals a,t,g, or c
  SITE (8087): n equals a,t,g, or c
  SITE (8088): n equals a,t,g, or c
  SITE (8089): n equals a,t,g, or c
  SITE (8090): n equals a,t,g, or c
  SITE (8091): n equals a,t,g, or c
  SITE (8092): n equals a,t,g, or c
  SITE (8093): n equals a,t,g, or c
  SITE (8094): n equals a,t,g, or c
  SITE (8095): n equals a,t,g, or c
  SITE (8096): n equals a,t,g, or c
  SITE (8097): n equals a,t,g, or c
  SITE (8098): n equals a,t,g, or c
  SITE (8099): n equals a,t,g, or c
  SITE (8100): n equals a,t,g, or c
  SITE (8101): n equals a,t,g, or c
  SITE (8102): n equals a,t,g, or c
  SITE (8103): n equals a,t,g, or c
  SITE (8104): n equals a,t,g, or c
  SITE (8105): n equals a,t,g, or c
  SITE (8106): n equals a,t,g, or c
  SITE (8107): n equals a,t,g, or c
  SITE (8108): n equals a,t,g, or c
  SITE (8109): n equals a,t,g, or c
  SITE (8110): n equals a,t,g, or c
  SITE (8111): n equals a,t,g, or c
  SITE (8112): n equals a,t,g, or c
  SITE (8113): n equals a,t,g, or c
  SITE (8114): n equals a,t,g, or c
  SITE (8115): n equals a,t,g, or c
  SITE (8116): n equals a,t,g, or c
  SITE (8117): n equals a,t,g, or c
  SITE (8118): n equals a,t,g, or c
  SITE (8119): n equals a,t,g, or c
  SITE (8120): n equals a,t,g, or c
  SITE (8121): n equals a,t,g, or c
  SITE (8122): n equals a,t,g, or c
  SITE (8123): n equals a,t,g, or c
  SITE (8124): n equals a,t,g, or c
  SITE (8125): n equals a,t,g, or c
  SITE (8126): n equals a,t,g, or c
  SITE (8127): n equals a,t,g, or c
  SITE (8128): n equals a,t,g, or c
  SITE (8129): n equals a,t,g, or c
  SITE (8130): n equals a,t,g, or c
  SITE (8131): n equals a,t,g, or c
  SITE (8132): n equals a,t,g, or c
  SITE (8133): n equals a,t,g, or c
  SITE (8134): n equals a,t,g, or c
  SITE (8135): n equals a,t,g, or c
  SITE (8136): n equals a,t,g, or c
  SITE (8137): n equals a,t,g, or c
  SITE (8138): n equals a,t,g, or c
  SITE (8139): n equals a,t,g, or c
  SITE (8140): n equals a,t,g, or c
  SITE (8141): n equals a,t,g, or c
  SITE (8142): n equals a,t,g, or c
  SITE (8143): n equals a,t,g, or c
  SITE (8144): n equals a,t,g, or c
  SITE (8145): n equals a,t,g, or c
  SITE (8146): n equals a,t,g, or c
  SITE (8147): n equals a,t,g, or c
  SITE (8148): n equals a,t,g, or c
  SITE (8149): n equals a,t,g, or c
  SITE (8150): n equals a,t,g, or c
  SITE (8151): n equals a,t,g, or c
  SITE (8152): n equals a,t,g, or c
  SITE (8153): n equals a,t,g, or c
  SITE (8154): n equals a,t,g, or c
  SITE (8155): n equals a,t,g, or c
  SITE (8156): n equals a,t,g, or c
  SITE (8157): n equals a,t,g, or c
  SITE (8158): n equals a,t,g, or c
  SITE (8159): n equals a,t,g, or c
  SITE (8160): n equals a,t,g, or c
  SITE (8161): n equals a,t,g, or c
  SITE (8162): n equals a,t,g, or c
  SITE (8163): n equals a,t,g, or c
  SITE (8164): n equals a,t,g, or c
  SITE (8165): n equals a,t,g, or c
  SITE (8166): n equals a,t,g, or c
  SITE (8167): n equals a,t,g, or c
  SITE (8168): n equals a,t,g, or c
  SITE (8169): n equals a,t,g, or c
  SITE (8170): n equals a,t,g, or c
  SITE (8171): n equals a,t,g, or c
  SITE (8172): n equals a,t,g, or c
  SITE (8173): n equals a,t,g, or c
  SITE (8174): n equals a,t,g, or c
  SITE (8175): n equals a,t,g, or c
  SITE (8176): n equals a,t,g, or c
  SITE (8177): n equals a,t,g, or c
  SITE (8178): n equals a,t,g, or c
  SITE (8179): n equals a,t,g, or c
  SITE (8180): n equals a,t,g, or c
  SITE (8181): n equals a,t,g, or c
  SITE (8182): n equals a,t,g, or c
  SITE (8183): n equals a,t,g, or c
  SITE (8184): n equals a,t,g, or c
  SITE (8185): n equals a,t,g, or c
  SITE (8186): n equals a,t,g, or c
  SITE (8187): n equals a,t,g, or c
  SITE (8188): n equals a,t,g, or c
  SITE (8189): n equals a,t,g, or c
  SITE (8190): n equals a,t,g, or c
  SITE (8191): n equals a,t,g, or c
  SITE (8192): n equals a,t,g, or c
  SITE (8193): n equals a,t,g, or c
  SITE (8194): n equals a,t,g, or c
  SITE (8195): n equals a,t,g, or c
  SITE (8196): n equals a,t,g, or c
  SITE (8197): n equals a,t,g, or c
  SITE (8198): n equals a,t,g, or c
  SITE (8199): n equals a,t,g, or c
  SITE (8200): n equals a,t,g, or c
  SITE (8201): n equals a,t,g, or c
  SITE (8202): n equals a,t,g, or c
  SITE (8203): n equals a,t,g, or c
  SITE (8204): n equals a,t,g, or c
  SITE (8205): n equals a,t,g, or c
  SITE (8206): n equals a,t,g, or c
  SITE (8207): n equals a,t,g, or c
  SITE (8208): n equals a,t,g, or c
  SITE (8209): n equals a,t,g, or c
  SITE (8210): n equals a,t,g, or c
  SITE (8211): n equals a,t,g, or c
  SITE (8212): n equals a,t,g, or c
  SITE (8213): n equals a,t,g, or c
  SITE (8214): n equals a,t,g, or c
  SITE (8215): n equals a,t,g, or c
  SITE (8216): n equals a,t,g, or c
  SITE (8217): n equals a,t,g, or c
  SITE (8218): n equals a,t,g, or c
  SITE (8219): n equals a,t,g, or c
  SITE (8220): n equals a,t,g, or c
  SITE (8221): n equals a,t,g, or c
  SITE (8222): n equals a,t,g, or c
  SITE (8223): n equals a,t,g, or c
  SITE (8224): n equals a,t,g, or c
  SITE (8225): n equals a,t,g, or c
  SITE (8226): n equals a,t,g, or c
  SITE (8227): n equals a,t,g, or c
  SITE (8228): n equals a,t,g, or c
  SITE (8229): n equals a,t,g, or c
  SITE (8230): n equals a,t,g, or c
  SITE (8231): n equals a,t,g, or c
  SITE (8232): n equals a,t,g, or c
  SITE (8233): n equals a,t,g, or c
  SITE (8234): n equals a,t,g, or c
  SITE (8235): n equals a,t,g, or c
  SITE (8236): n equals a,t,g, or c
  SITE (8237): n equals a,t,g, or c
  SITE (8238): n equals a,t,g, or c
  SITE (8239): n equals a,t,g, or c
  SITE (8240): n equals a,t,g, or c
  SITE (8241): n equals a,t,g, or c
  SITE (8242): n equals a,t,g, or c
  SITE (8243): n equals a,t,g, or c
  SITE (8244): n equals a,t,g, or c
  SITE (8245): n equals a,t,g, or c
  SITE (8246): n equals a,t,g, or c
  SITE (8247): n equals a,t,g, or c
  SITE (8248): n equals a,t,g, or c
  SITE (8249): n equals a,t,g, or c
  SITE (8250): n equals a,t,g, or c
  SITE (8251): n equals a,t,g, or c
  SITE (8252): n equals a,t,g, or c
  SITE (8253): n equals a,t,g, or c
  SITE (8254): n equals a,t,g, or c
  SITE (8255): n equals a,t,g, or c
  SITE (8256): n equals a,t,g, or c
  SITE (8257): n equals a,t,g, or c
  SITE (8258): n equals a,t,g, or c
  SITE (8259): n equals a,t,g, or c
  SITE (8260): n equals a,t,g, or c
  SITE (8261): n equals a,t,g, or c
  SITE (8262): n equals a,t,g, or c
  SITE (8263): n equals a,t,g, or c
  SITE (8264): n equals a,t,g, or c
  SITE (8265): n equals a,t,g, or c
  SITE (8266): n equals a,t,g, or c
  SITE (8267): n equals a,t,g, or c
  SITE (8268): n equals a,t,g, or c
  SITE (8269): n equals a,t,g, or c
  SITE (8270): n equals a,t,g, or c
  SITE (8271): n equals a,t,g, or c
  SITE (8272): n equals a,t,g, or c
  SITE (8273): n equals a,t,g, or c
  SITE (8274): n equals a,t,g, or c
  SITE (8275): n equals a,t,g, or c
  SITE (8276): n equals a,t,g, or c
  SITE (8277): n equals a,t,g, or c
  SITE (8278): n equals a,t,g, or c
  SITE (8279): n equals a,t,g, or c
  SITE (8280): n equals a,t,g, or c
  SITE (8281): n equals a,t,g, or c
  SITE (8282): n equals a,t,g, or c
  SITE (8283): n equals a,t,g, or c
  SITE (8284): n equals a,t,g, or c
  SITE (8285): n equals a,t,g, or c
  SITE (8286): n equals a,t,g, or c
  SITE (8287): n equals a,t,g, or c
  SITE (8288): n equals a,t,g, or c
  SITE (8289): n equals a,t,g, or c
  SITE (8290): n equals a,t,g, or c
  SITE (8291): n equals a,t,g, or c
  SITE (8292): n equals a,t,g, or c
  SITE (8293): n equals a,t,g, or c
  SITE (8294): n equals a,t,g, or c
  SITE (8295): n equals a,t,g, or c
  SITE (8296): n equals a,t,g, or c
  SITE (8297): n equals a,t,g, or c
  SITE (8298): n equals a,t,g, or c
  SITE (8299): n equals a,t,g, or c
  SITE (8300): n equals a,t,g, or c
  SITE (8301): n equals a,t,g, or c
  SITE (8302): n equals a,t,g, or c
  SITE (8303): n equals a,t,g, or c
  SITE (8304): n equals a,t,g, or c
  SITE (8305): n equals a,t,g, or c
  SITE (8306): n equals a,t,g, or c
  SITE (8307): n equals a,t,g, or c
  SITE (8308): n equals a,t,g, or c
  SITE (8309): n equals a,t,g, or c
  SITE (8310): n equals a,t,g, or c
  SITE (8311): n equals a,t,g, or c
  SITE (8312): n equals a,t,g, or c
  SITE (8313): n equals a,t,g, or c
  SITE (8314): n equals a,t,g, or c
  SITE (8315): n equals a,t,g, or c
  SITE (8316): n equals a,t,g, or c
  SITE (8317): n equals a,t,g, or c
  SITE (8318): n equals a,t,g, or c
  SITE (8319): n equals a,t,g, or c
  SITE (8320): n equals a,t,g, or c
  SITE (8321): n equals a,t,g, or c
  SITE (8322): n equals a,t,g, or c
  SITE (8323): n equals a,t,g, or c
  SITE (8324): n equals a,t,g, or c
  SITE (8325): n equals a,t,g, or c
  SITE (8326): n equals a,t,g, or c
  SITE (8327): n equals a,t,g, or c
  SITE (8328): n equals a,t,g, or c
  SITE (8329): n equals a,t,g, or c
  SITE (8330): n equals a,t,g, or c
  SITE (8331): n equals a,t,g, or c
  SITE (8332): n equals a,t,g, or c
  SITE (8333): n equals a,t,g, or c
  SITE (8334): n equals a,t,g, or c
  SITE (8335): n equals a,t,g, or c
  SITE (8336): n equals a,t,g, or c
  SITE (8337): n equals a,t,g, or c
  SITE (8338): n equals a,t,g, or c
  SITE (8339): n equals a,t,g, or c
  SITE (8340): n equals a,t,g, or c
  SITE (8341): n equals a,t,g, or c
  SITE (8342): n equals a,t,g, or c
  SITE (8343): n equals a,t,g, or c
  SITE (8344): n equals a,t,g, or c
  SITE (8345): n equals a,t,g, or c
  SITE (8346): n equals a,t,g, or c
  SITE (8347): n equals a,t,g, or c
  SITE (8348): n equals a,t,g, or c
  SITE (8349): n equals a,t,g, or c
  SITE (8350): n equals a,t,g, or c
  SITE (8351): n equals a,t,g, or c
  SITE (8352): n equals a,t,g, or c
  SITE (8353): n equals a,t,g, or c
  SITE (8354): n equals a,t,g, or c
  SITE (8355): n equals a,t,g, or c
  SITE (8356): n equals a,t,g, or c
  SITE (8357): n equals a,t,g, or c
  SITE (8358): n equals a,t,g, or c
  SITE (8359): n equals a,t,g, or c
  SITE (8360): n equals a,t,g, or c
  SITE (8361): n equals a,t,g, or c
  SITE (8362): n equals a,t,g, or c
  SITE (8363): n equals a,t,g, or c
  SITE (8364): n equals a,t,g, or c
  SITE (8365): n equals a,t,g, or c
  SITE (8366): n equals a,t,g, or c
  SITE (8367): n equals a,t,g, or c
  SITE (8368): n equals a,t,g, or c
  SITE (8369): n equals a,t,g, or c
  SITE (8370): n equals a,t,g, or c
  SITE (8371): n equals a,t,g, or c
  SITE (8372): n equals a,t,g, or c
  SITE (8373): n equals a,t,g, or c
  SITE (8374): n equals a,t,g, or c
  SITE (8375): n equals a,t,g, or c
  SITE (8376): n equals a,t,g, or c
  SITE (8377): n equals a,t,g, or c
  SITE (8378): n equals a,t,g, or c
  SITE (8379): n equals a,t,g, or c
  SITE (8380): n equals a,t,g, or c
  SITE (8381): n equals a,t,g, or c
  SITE (8382): n equals a,t,g, or c
  SITE (8383): n equals a,t,g, or c
  SITE (8384): n equals a,t,g, or c
  SITE (8385): n equals a,t,g, or c
  SITE (8386): n equals a,t,g, or c
  SITE (8387): n equals a,t,g, or c
  SITE (8388): n equals a,t,g, or c
  SITE (8389): n equals a,t,g, or c
  SITE (8390): n equals a,t,g, or c
  SITE (8391): n equals a,t,g, or c
  SITE (8392): n equals a,t,g, or c
  SITE (8393): n equals a,t,g, or c
  SITE (8394): n equals a,t,g, or c
  SITE (8395): n equals a,t,g, or c
  SITE (8396): n equals a,t,g, or c
  SITE (8397): n equals a,t,g, or c
  SITE (8398): n equals a,t,g, or c
  SITE (8399): n equals a,t,g, or c
  SITE (8400): n equals a,t,g, or c
  SITE (8401): n equals a,t,g, or c
  SITE (8402): n equals a,t,g, or c
  SITE (8403): n equals a,t,g, or c
  SITE (8404): n equals a,t,g, or c
  SITE (8405): n equals a,t,g, or c
  SITE (8406): n equals a,t,g, or c
  SITE (8407): n equals a,t,g, or c
  SITE (8408): n equals a,t,g, or c
  SITE (8409): n equals a,t,g, or c
  SITE (8410): n equals a,t,g, or c
  SITE (8411): n equals a,t,g, or c
  SITE (8412): n equals a,t,g, or c
  SITE (8413): n equals a,t,g, or c
  SITE (8414): n equals a,t,g, or c
  SITE (8415): n equals a,t,g, or c
  SITE (8416): n equals a,t,g, or c
  SITE (8417): n equals a,t,g, or c
  SITE (8418): n equals a,t,g, or c
  SITE (8419): n equals a,t,g, or c
  SITE (8420): n equals a,t,g, or c
  SITE (8421): n equals a,t,g, or c
  SITE (8422): n equals a,t,g, or c
  SITE (8423): n equals a,t,g, or c
  SITE (8424): n equals a,t,g, or c
  SITE (8425): n equals a,t,g, or c
  SITE (8426): n equals a,t,g, or c
  SITE (8427): n equals a,t,g, or c
  SITE (8428): n equals a,t,g, or c
  SITE (8429): n equals a,t,g, or c
  SITE (8430): n equals a,t,g, or c
  SITE (8431): n equals a,t,g, or c
  SITE (8432): n equals a,t,g, or c
  SITE (8433): n equals a,t,g, or c
  SITE (8434): n equals a,t,g, or c
  SITE (8435): n equals a,t,g, or c
  SITE (8436): n equals a,t,g, or c
  SITE (8437): n equals a,t,g, or c
  SITE (8438): n equals a,t,g, or c
  SITE (8439): n equals a,t,g, or c
  SITE (8440): n equals a,t,g, or c
  SITE (8441): n equals a,t,g, or c
  SITE (8442): n equals a,t,g, or c
  SITE (8443): n equals a,t,g, or c
  SITE (8444): n equals a,t,g, or c
  SITE (8445): n equals a,t,g, or c
  SITE (8446): n equals a,t,g, or c
  SITE (8447): n equals a,t,g, or c
  SITE (8448): n equals a,t,g, or c
  SITE (8449): n equals a,t,g, or c
  SITE (8450): n equals a,t,g, or c
  SITE (8451): n equals a,t,g, or c
  SITE (8452): n equals a,t,g, or c
  SITE (8453): n equals a,t,g, or c
  SITE (8454): n equals a,t,g, or c
  SITE (8455): n equals a,t,g, or c
  SITE (8456): n equals a,t,g, or c
  SITE (8457): n equals a,t,g, or c
  SITE (8458): n equals a,t,g, or c
  SITE (8459): n equals a,t,g, or c
  SITE (8460): n equals a,t,g, or c
  SITE (8461): n equals a,t,g, or c
  SITE (8462): n equals a,t,g, or c
  SITE (8463): n equals a,t,g, or c
  SITE (8464): n equals a,t,g, or c
  SITE (8465): n equals a,t,g, or c
  SITE (8466): n equals a,t,g, or c
  SITE (8467): n equals a,t,g, or c
  SITE (8468): n equals a,t,g, or c
  SITE (8469): n equals a,t,g, or c
  SITE (8470): n equals a,t,g, or c
  SITE (8471): n equals a,t,g, or c
  SITE (8472): n equals a,t,g, or c
  SITE (8473): n equals a,t,g, or c
  SITE (8474): n equals a,t,g, or c
  SITE (8475): n equals a,t,g, or c
  SITE (8476): n equals a,t,g, or c
  SITE (8477): n equals a,t,g, or c
  SITE (8478): n equals a,t,g, or c
  SITE (8479): n equals a,t,g, or c
  SITE (8480): n equals a,t,g, or c
  SITE (8481): n equals a,t,g, or c
  SITE (8482): n equals a,t,g, or c
  SITE (8483): n equals a,t,g, or c
  SITE (8484): n equals a,t,g, or c
  SITE (8485): n equals a,t,g, or c
  SITE (8486): n equals a,t,g, or c
  SITE (8487): n equals a,t,g, or c
  SITE (8488): n equals a,t,g, or c
  SITE (8489): n equals a,t,g, or c
  SITE (8490): n equals a,t,g, or c
  SITE (8491): n equals a,t,g, or c
  SITE (8492): n equals a,t,g, or c
  SITE (8493): n equals a,t,g, or c
  SITE (8494): n equals a,t,g, or c
  SITE (8495): n equals a,t,g, or c
  SITE (8496): n equals a,t,g, or c
  SITE (8497): n equals a,t,g, or c
  SITE (8498): n equals a,t,g, or c
  SITE (8499): n equals a,t,g, or c
  SITE (8500): n equals a,t,g, or c
  SITE (8501): n equals a,t,g, or c
  SITE (8502): n equals a,t,g, or c
  SITE (8503): n equals a,t,g, or c
  SITE (8504): n equals a,t,g, or c
  SITE (8505): n equals a,t,g, or c
  SITE (8506): n equals a,t,g, or c
  SITE (8507): n equals a,t,g, or c
  SITE (8508): n equals a,t,g, or c
  SITE (8509): n equals a,t,g, or c
  SITE (8510): n equals a,t,g, or c
  SITE (8511): n equals a,t,g, or c
  SITE (8512): n equals a,t,g, or c
  SITE (8513): n equals a,t,g, or c
  SITE (8514): n equals a,t,g, or c
  SITE (8515): n equals a,t,g, or c
  SITE (8516): n equals a,t,g, or c
  SITE (8517): n equals a,t,g, or c
  SITE (8518): n equals a,t,g, or c
  SITE (8519): n equals a,t,g, or c
  SITE (8520): n equals a,t,g, or c
  SITE (8521): n equals a,t,g, or c
  SITE (8522): n equals a,t,g, or c
  SITE (8523): n equals a,t,g, or c
  SITE (8524): n equals a,t,g, or c
  SITE (8525): n equals a,t,g, or c
  SITE (8526): n equals a,t,g, or c
  SITE (8527): n equals a,t,g, or c
  SITE (8528): n equals a,t,g, or c
  SITE (8529): n equals a,t,g, or c
  SITE (8530): n equals a,t,g, or c
  SITE (8531): n equals a,t,g, or c
  SITE (8532): n equals a,t,g, or c
  SITE (8533): n equals a,t,g, or c
  SITE (8534): n equals a,t,g, or c
  SITE (8535): n equals a,t,g, or c
  SITE (8536): n equals a,t,g, or c
  SITE (8537): n equals a,t,g, or c
  SITE (8538): n equals a,t,g, or c
  SITE (8539): n equals a,t,g, or c
  SITE (8540): n equals a,t,g, or c
  SITE (8541): n equals a,t,g, or c
  SITE (8542): n equals a,t,g, or c
  SITE (8543): n equals a,t,g, or c
  SITE (8544): n equals a,t,g, or c
  SITE (8545): n equals a,t,g, or c
  SITE (8546): n equals a,t,g, or c
  SITE (8547): n equals a,t,g, or c
  SITE (8548): n equals a,t,g, or c
  SITE (8549): n equals a,t,g, or c
  SITE (8550): n equals a,t,g, or c
  SITE (8551): n equals a,t,g, or c
  SITE (8552): n equals a,t,g, or c
  SITE (8553): n equals a,t,g, or c
  SITE (8554): n equals a,t,g, or c
  SITE (8555): n equals a,t,g, or c
  SITE (8556): n equals a,t,g, or c
  SITE (8557): n equals a,t,g, or c
  SITE (8558): n equals a,t,g, or c
  SITE (8559): n equals a,t,g, or c
  SITE (8560): n equals a,t,g, or c
  SITE (8561): n equals a,t,g, or c
  SITE (8562): n equals a,t,g, or c
  SITE (8563): n equals a,t,g, or c
  SITE (8564): n equals a,t,g, or c
  SITE (8565): n equals a,t,g, or c
  SITE (8566): n equals a,t,g, or c
  SITE (8567): n equals a,t,g, or c
  SITE (8568): n equals a,t,g, or c
  SITE (8569): n equals a,t,g, or c
  SITE (8570): n equals a,t,g, or c
  SITE (8571): n equals a,t,g, or c
  SITE (8572): n equals a,t,g, or c
  SITE (8573): n equals a,t,g, or c
  SITE (8574): n equals a,t,g, or c
  SITE (8575): n equals a,t,g, or c
  SITE (8576): n equals a,t,g, or c
  SITE (8577): n equals a,t,g, or c
  SITE (8578): n equals a,t,g, or c
  SITE (8579): n equals a,t,g, or c
  SITE (8580): n equals a,t,g, or c
  SITE (8581): n equals a,t,g, or c
  SITE (8582): n equals a,t,g, or c
  SITE (8583): n equals a,t,g, or c
  SITE (8584): n equals a,t,g, or c
  SITE (8585): n equals a,t,g, or c
  SITE (8586): n equals a,t,g, or c
  SITE (8587): n equals a,t,g, or c
  SITE (8588): n equals a,t,g, or c
  SITE (8589): n equals a,t,g, or c
  SITE (8590): n equals a,t,g, or c
  SITE (8591): n equals a,t,g, or c
  SITE (8592): n equals a,t,g, or c
  SITE (8593): n equals a,t,g, or c
  SITE (8594): n equals a,t,g, or c
  SITE (8595): n equals a,t,g, or c
  SITE (8596): n equals a,t,g, or c
  SITE (8597): n equals a,t,g, or c
  SITE (8598): n equals a,t,g, or c
  SITE (8599): n equals a,t,g, or c
  SITE (8600): n equals a,t,g, or c
  SITE (8601): n equals a,t,g, or c
  SITE (8602): n equals a,t,g, or c
  SITE (8603): n equals a,t,g, or c
  SITE (8604): n equals a,t,g, or c
  SITE (8605): n equals a,t,g, or c
  SITE (8606): n equals a,t,g, or c
  SITE (8607): n equals a,t,g, or c
  SITE (8608): n equals a,t,g, or c
  SITE (8609): n equals a,t,g, or c
  SITE (8610): n equals a,t,g, or c
  SITE (8611): n equals a,t,g, or c
  SITE (8612): n equals a,t,g, or c
  SITE (8613): n equals a,t,g, or c
  SITE (8614): n equals a,t,g, or c
  SITE (8615): n equals a,t,g, or c
  SITE (8616): n equals a,t,g, or c
  SITE (8617): n equals a,t,g, or c
  SITE (8618): n equals a,t,g, or c
  SITE (8619): n equals a,t,g, or c
  SITE (8620): n equals a,t,g, or c
  SITE (8621): n equals a,t,g, or c
  SITE (8622): n equals a,t,g, or c
  SITE (8623): n equals a,t,g, or c
  SITE (8624): n equals a,t,g, or c
  SITE (8625): n equals a,t,g, or c
  SITE (8626): n equals a,t,g, or c
  SITE (8627): n equals a,t,g, or c
  SITE (8628): n equals a,t,g, or c
  SITE (8629): n equals a,t,g, or c
  SITE (8630): n equals a,t,g, or c
  SITE (8631): n equals a,t,g, or c
  SITE (8632): n equals a,t,g, or c
  SITE (8633): n equals a,t,g, or c
  SITE (8634): n equals a,t,g, or c
  SITE (8635): n equals a,t,g, or c
  SITE (8636): n equals a,t,g, or c
  SITE (8637): n equals a,t,g, or c
  SITE (8638): n equals a,t,g, or c
  SITE (8639): n equals a,t,g, or c
  SITE (8640): n equals a,t,g, or c
  SITE (8641): n equals a,t,g, or c
  SITE (8642): n equals a,t,g, or c
  SITE (8643): n equals a,t,g, or c
  SITE (8644): n equals a,t,g, or c
  SITE (8645): n equals a,t,g, or c
  SITE (8646): n equals a,t,g, or c
  SITE (8647): n equals a,t,g, or c
  SITE (8648): n equals a,t,g, or c
  SITE (8649): n equals a,t,g, or c
  SITE (8650): n equals a,t,g, or c
  SITE (8651): n equals a,t,g, or c
  SITE (8652): n equals a,t,g, or c
  SITE (8653): n equals a,t,g, or c
  SITE (8654): n equals a,t,g, or c
  SITE (8655): n equals a,t,g, or c
  SITE (8656): n equals a,t,g, or c
  SITE (8657): n equals a,t,g, or c
  SITE (8658): n equals a,t,g, or c
  SITE (8659): n equals a,t,g, or c
  SITE (8660): n equals a,t,g, or c
  SITE (8661): n equals a,t,g, or c
  SITE (8662): n equals a,t,g, or c
  SITE (8663): n equals a,t,g, or c
  SITE (8664): n equals a,t,g, or c
  SITE (8665): n equals a,t,g, or c
  SITE (8666): n equals a,t,g, or c
  SITE (8667): n equals a,t,g, or c
  SITE (8668): n equals a,t,g, or c
  SITE (8669): n equals a,t,g, or c
  SITE (8670): n equals a,t,g, or c
  SITE (8671): n equals a,t,g, or c
  SITE (8672): n equals a,t,g, or c
  SITE (8673): n equals a,t,g, or c
  SITE (8674): n equals a,t,g, or c
  SITE (8675): n equals a,t,g, or c
  SITE (8676): n equals a,t,g, or c
  SITE (8677): n equals a,t,g, or c
  SITE (8678): n equals a,t,g, or c
  SITE (8679): n equals a,t,g, or c
  SITE (8680): n equals a,t,g, or c
  SITE (8681): n equals a,t,g, or c
  SITE (8682): n equals a,t,g, or c
  SITE (8683): n equals a,t,g, or c
  SITE (8684): n equals a,t,g, or c
  SITE (8685): n equals a,t,g, or c
  SITE (8686): n equals a,t,g, or c
  SITE (8687): n equals a,t,g, or c
  SITE (8688): n equals a,t,g, or c
  SITE (8689): n equals a,t,g, or c
  SITE (8690): n equals a,t,g, or c
  SITE (8691): n equals a,t,g, or c
  SITE (8692): n equals a,t,g, or c
  SITE (8693): n equals a,t,g, or c
  SITE (8694): n equals a,t,g, or c
  SITE (8695): n equals a,t,g, or c
  SITE (8696): n equals a,t,g, or c
  SITE (8697): n equals a,t,g, or c
  SITE (8698): n equals a,t,g, or c
  SITE (8699): n equals a,t,g, or c
  SITE (8700): n equals a,t,g, or c
  SITE (8701): n equals a,t,g, or c
  SITE (8702): n equals a,t,g, or c
  SITE (8703): n equals a,t,g, or c
  SITE (8704): n equals a,t,g, or c
  SITE (8705): n equals a,t,g, or c
  SITE (8706): n equals a,t,g, or c
  SITE (8707): n equals a,t,g, or c
  SITE (8708): n equals a,t,g, or c
  SITE (8709): n equals a,t,g, or c
  SITE (8710): n equals a,t,g, or c
  SITE (8711): n equals a,t,g, or c
  SITE (8712): n equals a,t,g, or c
  SITE (8713): n equals a,t,g, or c
  SITE (8714): n equals a,t,g, or c
  SITE (8715): n equals a,t,g, or c
  SITE (8716): n equals a,t,g, or c
  SITE (8717): n equals a,t,g, or c
  SITE (8718): n equals a,t,g, or c
  SITE (8719): n equals a,t,g, or c
  SITE (8720): n equals a,t,g, or c
  SITE (8721): n equals a,t,g, or c
  SITE (8722): n equals a,t,g, or c
  SITE (8723): n equals a,t,g, or c
  SITE (8724): n equals a,t,g, or c
  SITE (8725): n equals a,t,g, or c
  SITE (8726): n equals a,t,g, or c
  SITE (8727): n equals a,t,g, or c
  SITE (8728): n equals a,t,g, or c
  SITE (8729): n equals a,t,g, or c
  SITE (8730): n equals a,t,g, or c
  SITE (8731): n equals a,t,g, or c
  SITE (8732): n equals a,t,g, or c
  SITE (8733): n equals a,t,g, or c
  SITE (8734): n equals a,t,g, or c
  SITE (8735): n equals a,t,g, or c
  SITE (8736): n equals a,t,g, or c
  SITE (8737): n equals a,t,g, or c
  SITE (8738): n equals a,t,g, or c
  SITE (8739): n equals a,t,g, or c
  SITE (8740): n equals a,t,g, or c
  SITE (8741): n equals a,t,g, or c
  SITE (8742): n equals a,t,g, or c
  SITE (8743): n equals a,t,g, or c
  SITE (8744): n equals a,t,g, or c
  SITE (8745): n equals a,t,g, or c
  SITE (8746): n equals a,t,g, or c
  SITE (8747): n equals a,t,g, or c
  SITE (8748): n equals a,t,g, or c
  SITE (8749): n equals a,t,g, or c
  SITE (8750): n equals a,t,g, or c
  SITE (8751): n equals a,t,g, or c
  SITE (8752): n equals a,t,g, or c
  SITE (8753): n equals a,t,g, or c
  SITE (8754): n equals a,t,g, or c
  SITE (8755): n equals a,t,g, or c
  SITE (8756): n equals a,t,g, or c
  SITE (8757): n equals a,t,g, or c
  SITE (8758): n equals a,t,g, or c
  SITE (8759): n equals a,t,g, or c
  SITE (8760): n equals a,t,g, or c
  SITE (8761): n equals a,t,g, or c
  SITE (8762): n equals a,t,g, or c
  SITE (8763): n equals a,t,g, or c
  SITE (8764): n equals a,t,g, or c
  SITE (8765): n equals a,t,g, or c
  SITE (8766): n equals a,t,g, or c
  SITE (8767): n equals a,t,g, or c
  SITE (8768): n equals a,t,g, or c
  SITE (8769): n equals a,t,g, or c
  SITE (8770): n equals a,t,g, or c
  SITE (8771): n equals a,t,g, or c
  SITE (8772): n equals a,t,g, or c
  SITE (8773): n equals a,t,g, or c
  SITE (8774): n equals a,t,g, or c
  SITE (8775): n equals a,t,g, or c
  SITE (8776): n equals a,t,g, or c
  SITE (8777): n equals a,t,g, or c
  SITE (8778): n equals a,t,g, or c
  SITE (8779): n equals a,t,g, or c
  SITE (8780): n equals a,t,g, or c
  SITE (8781): n equals a,t,g, or c
  SITE (8782): n equals a,t,g, or c
  SITE (8783): n equals a,t,g, or c
  SITE (8784): n equals a,t,g, or c
  SITE (8785): n equals a,t,g, or c
  SITE (8786): n equals a,t,g, or c
  SITE (8787): n equals a,t,g, or c
  SITE (8788): n equals a,t,g, or c
  SITE (8789): n equals a,t,g, or c
  SITE (8790): n equals a,t,g, or c
  SITE (8791): n equals a,t,g, or c
  SITE (8792): n equals a,t,g, or c
  SITE (8793): n equals a,t,g, or c
  SITE (8794): n equals a,t,g, or c
  SITE (8795): n equals a,t,g, or c
  SITE (8796): n equals a,t,g, or c
  SITE (8797): n equals a,t,g, or c
  SITE (8798): n equals a,t,g, or c
  SITE (8799): n equals a,t,g, or c
  SITE (8800): n equals a,t,g, or c
  SITE (8801): n equals a,t,g, or c
  SITE (8802): n equals a,t,g, or c
  SITE (8803): n equals a,t,g, or c
  SITE (8804): n equals a,t,g, or c
  SITE (8805): n equals a,t,g, or c
  SITE (8806): n equals a,t,g, or c
  SITE (8807): n equals a,t,g, or c
  SITE (8808): n equals a,t,g, or c
  SITE (8809): n equals a,t,g, or c
  SITE (8810): n equals a,t,g, or c
  SITE (8811): n equals a,t,g, or c
  SITE (8812): n equals a,t,g, or c
  SITE (8813): n equals a,t,g, or c
  SITE (8814): n equals a,t,g, or c
  SITE (8815): n equals a,t,g, or c
  SITE (8816): n equals a,t,g, or c
  SITE (8817): n equals a,t,g, or c
  SITE (8818): n equals a,t,g, or c
  SITE (8819): n equals a,t,g, or c
  SITE (8820): n equals a,t,g, or c
  SITE (8821): n equals a,t,g, or c
  SITE (8822): n equals a,t,g, or c
  SITE (8823): n equals a,t,g, or c
  SITE (8824): n equals a,t,g, or c
  SITE (8825): n equals a,t,g, or c
  SITE (8826): n equals a,t,g, or c
  SITE (8827): n equals a,t,g, or c
  SITE (8828): n equals a,t,g, or c
  SITE (8829): n equals a,t,g, or c
  SITE (8830): n equals a,t,g, or c
  SITE (8831): n equals a,t,g, or c
  SITE (8832): n equals a,t,g, or c
  SITE (8833): n equals a,t,g, or c
  SITE (8834): n equals a,t,g, or c
  SITE (8835): n equals a,t,g, or c
  SITE (8836): n equals a,t,g, or c
  SITE (8837): n equals a,t,g, or c
  SITE (8838): n equals a,t,g, or c
  SITE (8839): n equals a,t,g, or c
  SITE (8840): n equals a,t,g, or c
  SITE (8841): n equals a,t,g, or c
  SITE (8842): n equals a,t,g, or c
  SITE (8843): n equals a,t,g, or c
  SITE (8844): n equals a,t,g, or c
  SITE (8845): n equals a,t,g, or c
  SITE (8846): n equals a,t,g, or c
  SITE (8847): n equals a,t,g, or c
  SITE (8848): n equals a,t,g, or c
  SITE (8849): n equals a,t,g, or c
  SITE (8850): n equals a,t,g, or c
  SITE (8851): n equals a,t,g, or c
  SITE (8852): n equals a,t,g, or c
  SITE (8853): n equals a,t,g, or c
  SITE (8854): n equals a,t,g, or c
  SITE (8855): n equals a,t,g, or c
  SITE (8856): n equals a,t,g, or c
  SITE (8857): n equals a,t,g, or c
  SITE (8858): n equals a,t,g, or c
  SITE (8859): n equals a,t,g, or c
  SITE (8860): n equals a,t,g, or c
  SITE (8861): n equals a,t,g, or c
  SITE (8862): n equals a,t,g, or c
  SITE (8863): n equals a,t,g, or c
  SITE (8864): n equals a,t,g, or c
  SITE (8865): n equals a,t,g, or c
  SITE (8866): n equals a,t,g, or c
  SITE (8867): n equals a,t,g, or c
  SITE (8868): n equals a,t,g, or c
  SITE (8869): n equals a,t,g, or c
  SITE (8870): n equals a,t,g, or c
  SITE (8871): n equals a,t,g, or c
  SITE (8872): n equals a,t,g, or c
  SITE (8873): n equals a,t,g, or c
  SITE (8874): n equals a,t,g, or c
  SITE (8875): n equals a,t,g, or c
  SITE (8876): n equals a,t,g, or c
  SITE (8877): n equals a,t,g, or c
  SITE (8878): n equals a,t,g, or c
  SITE (8879): n equals a,t,g, or c
  SITE (8880): n equals a,t,g, or c
  SITE (8881): n equals a,t,g, or c
  SITE (8882): n equals a,t,g, or c
  SITE (8883): n equals a,t,g, or c
  SITE (8884): n equals a,t,g, or c
  SITE (8885): n equals a,t,g, or c
  SITE (8886): n equals a,t,g, or c
  SITE (8887): n equals a,t,g, or c
  SITE (8888): n equals a,t,g, or c
  SITE (8889): n equals a,t,g, or c
  SITE (8890): n equals a,t,g, or c
  SITE (8891): n equals a,t,g, or c
  SITE (8892): n equals a,t,g, or c
  SITE (8893): n equals a,t,g, or c
  SITE (8894): n equals a,t,g, or c
  SITE (8895): n equals a,t,g, or c
  SITE (8896): n equals a,t,g, or c
  SITE (8897): n equals a,t,g, or c
  SITE (8898): n equals a,t,g, or c
  SITE (8899): n equals a,t,g, or c
  SITE (8900): n equals a,t,g, or c
  SITE (8901): n equals a,t,g, or c
  SITE (8902): n equals a,t,g, or c
  SITE (8903): n equals a,t,g, or c
  SITE (8904): n equals a,t,g, or c
  SITE (8905): n equals a,t,g, or c
  SITE (8906): n equals a,t,g, or c
  SITE (8907): n equals a,t,g, or c
  SITE (8908): n equals a,t,g, or c
  SITE (8909): n equals a,t,g, or c
  SITE (8910): n equals a,t,g, or c
  SITE (8911): n equals a,t,g, or c
  SITE (8912): n equals a,t,g, or c
  SITE (8913): n equals a,t,g, or c
  SITE (8914): n equals a,t,g, or c
  SITE (8915): n equals a,t,g, or c
  SITE (8916): n equals a,t,g, or c
  SITE (8917): n equals a,t,g, or c
  SITE (8918): n equals a,t,g, or c
  SITE (8919): n equals a,t,g, or c
  SITE (8920): n equals a,t,g, or c
  SITE (8921): n equals a,t,g, or c
  SITE (8922): n equals a,t,g, or c
  SITE (8923): n equals a,t,g, or c
  SITE (8924): n equals a,t,g, or c
  SITE (8925): n equals a,t,g, or c
  SITE (8926): n equals a,t,g, or c
  SITE (8927): n equals a,t,g, or c
  SITE (8928): n equals a,t,g, or c
  SITE (8929): n equals a,t,g, or c
  SITE (8930): n equals a,t,g, or c
  SITE (8931): n equals a,t,g, or c
  SITE (8932): n equals a,t,g, or c
  SITE (8933): n equals a,t,g, or c
  SITE (8934): n equals a,t,g, or c
  SITE (8935): n equals a,t,g, or c
  SITE (8936): n equals a,t,g, or c
  SITE (8937): n equals a,t,g, or c
  SITE (8938): n equals a,t,g, or c
  SITE (8939): n equals a,t,g, or c
  SITE (8940): n equals a,t,g, or c
  SITE (8941): n equals a,t,g, or c
  SITE (8942): n equals a,t,g, or c
  SITE (8943): n equals a,t,g, or c
  SITE (8944): n equals a,t,g, or c
  SITE (8945): n equals a,t,g, or c
  SITE (8946): n equals a,t,g, or c
  SITE (8947): n equals a,t,g, or c
  SITE (8948): n equals a,t,g, or c
  SITE (8949): n equals a,t,g, or c
  SITE (8950): n equals a,t,g, or c
  SITE (8951): n equals a,t,g, or c
  SITE (8952): n equals a,t,g, or c
  SITE (8953): n equals a,t,g, or c
  SITE (8954): n equals a,t,g, or c
  SITE (8955): n equals a,t,g, or c
  SITE (8956): n equals a,t,g, or c
  SITE (8957): n equals a,t,g, or c
  SITE (8958): n equals a,t,g, or c
  SITE (8959): n equals a,t,g, or c
  SITE (8960): n equals a,t,g, or c
  SITE (8961): n equals a,t,g, or c
  SITE (8962): n equals a,t,g, or c
  SITE (8963): n equals a,t,g, or c
  SITE (8964): n equals a,t,g, or c
  SITE (8965): n equals a,t,g, or c
  SITE (8966): n equals a,t,g, or c
  SITE (8967): n equals a,t,g, or c
  SITE (8968): n equals a,t,g, or c
  SITE (8969): n equals a,t,g, or c
  SITE (8970): n equals a,t,g, or c
  SITE (8971): n equals a,t,g, or c
  SITE (8972): n equals a,t,g, or c
  SITE (8973): n equals a,t,g, or c
  SITE (8974): n equals a,t,g, or c
  SITE (8975): n equals a,t,g, or c
  SITE (8976): n equals a,t,g, or c
  SITE (8977): n equals a,t,g, or c
  SITE (8978): n equals a,t,g, or c
  SITE (8979): n equals a,t,g, or c
  SITE (8980): n equals a,t,g, or c
  SITE (8981): n equals a,t,g, or c
  SITE (8982): n equals a,t,g, or c
  SITE (8983): n equals a,t,g, or c
  SITE (8984): n equals a,t,g, or c
  SITE (8985): n equals a,t,g, or c
  SITE (8986): n equals a,t,g, or c
  SITE (8987): n equals a,t,g, or c
  SITE (8988): n equals a,t,g, or c
  SITE (8989): n equals a,t,g, or c
  SITE (8990): n equals a,t,g, or c
  SITE (8991): n equals a,t,g, or c
  SITE (8992): n equals a,t,g, or c
  SITE (8993): n equals a,t,g, or c
  SITE (8994): n equals a,t,g, or c
  SITE (8995): n equals a,t,g, or c
  SITE (8996): n equals a,t,g, or c
  SITE (8997): n equals a,t,g, or c
  SITE (8998): n equals a,t,g, or c
  SITE (8999): n equals a,t,g, or c
  SITE (9000): n equals a,t,g, or c
  SITE (9001): n equals a,t,g, or c
  SITE (9002): n equals a,t,g, or c
  SITE (9003): n equals a,t,g, or c
  SITE (9004): n equals a,t,g, or c
  SITE (9005): n equals a,t,g, or c
  SITE (9006): n equals a,t,g, or c
  SITE (9007): n equals a,t,g, or c
  SITE (9008): n equals a,t,g, or c
  SITE (9009): n equals a,t,g, or c
  SITE (9010): n equals a,t,g, or c
  SITE (9011): n equals a,t,g, or c
  SITE (9012): n equals a,t,g, or c
  SITE (9013): n equals a,t,g, or c
  SITE (9014): n equals a,t,g, or c
  SITE (9015): n equals a,t,g, or c
  SITE (9016): n equals a,t,g, or c
  SITE (9017): n equals a,t,g, or c
  SITE (9018): n equals a,t,g, or c
  SITE (9019): n equals a,t,g, or c
  SITE (9020): n equals a,t,g, or c
  SITE (9021): n equals a,t,g, or c
  SITE (9022): n equals a,t,g, or c
  SITE (9023): n equals a,t,g, or c
  SITE (9024): n equals a,t,g, or c
  SITE (9025): n equals a,t,g, or c
  SITE (9026): n equals a,t,g, or c
  SITE (9027): n equals a,t,g, or c
  SITE (9028): n equals a,t,g, or c
  SITE (9029): n equals a,t,g, or c
  SITE (9030): n equals a,t,g, or c
  SITE (9031): n equals a,t,g, or c
  SITE (9032): n equals a,t,g, or c
  SITE (9033): n equals a,t,g, or c
  SITE (9034): n equals a,t,g, or c
  SITE (9035): n equals a,t,g, or c
  SITE (9036): n equals a,t,g, or c
  SITE (9037): n equals a,t,g, or c
  SITE (9038): n equals a,t,g, or c
  SITE (9039): n equals a,t,g, or c
  SITE (9040): n equals a,t,g, or c
  SITE (9041): n equals a,t,g, or c
  SITE (9042): n equals a,t,g, or c
  SITE (9043): n equals a,t,g, or c
  SITE (9044): n equals a,t,g, or c
  SITE (9045): n equals a,t,g, or c
  SITE (9046): n equals a,t,g, or c
  SITE (9047): n equals a,t,g, or c
  SITE (9048): n equals a,t,g, or c
  SITE (9049): n equals a,t,g, or c
  SITE (9050): n equals a,t,g, or c
  SITE (9051): n equals a,t,g, or c
  SITE (9052): n equals a,t,g, or c
  SITE (9053): n equals a,t,g, or c
  SITE (9054): n equals a,t,g, or c
  SITE (9055): n equals a,t,g, or c
  SITE (9056): n equals a,t,g, or c
  SITE (9057): n equals a,t,g, or c
  SITE (9058): n equals a,t,g, or c
  SITE (9059): n equals a,t,g, or c
  SITE (9060): n equals a,t,g, or c
  SITE (9061): n equals a,t,g, or c
  SITE (9062): n equals a,t,g, or c
  SITE (9063): n equals a,t,g, or c
  SITE (9064): n equals a,t,g, or c
  SITE (9065): n equals a,t,g, or c
  SITE (9066): n equals a,t,g, or c
  SITE (9067): n equals a,t,g, or c
  SITE (9068): n equals a,t,g, or c
  SITE (9069): n equals a,t,g, or c
  SITE (9070): n equals a,t,g, or c
  SITE (9071): n equals a,t,g, or c
  SITE (9072): n equals a,t,g, or c
  SITE (9073): n equals a,t,g, or c
  SITE (9074): n equals a,t,g, or c
  SITE (9075): n equals a,t,g, or c
  SITE (9076): n equals a,t,g, or c
  SITE (9077): n equals a,t,g, or c
  SITE (9078): n equals a,t,g, or c
  SITE (9079): n equals a,t,g, or c
  SITE (9080): n equals a,t,g, or c
  SITE (9081): n equals a,t,g, or c
  SITE (9082): n equals a,t,g, or c
  SITE (9083): n equals a,t,g, or c
  SITE (9084): n equals a,t,g, or c
  SITE (9085): n equals a,t,g, or c
  SITE (9086): n equals a,t,g, or c
  SITE (9087): n equals a,t,g, or c
  SITE (9088): n equals a,t,g, or c
  SITE (9089): n equals a,t,g, or c
  SITE (9090): n equals a,t,g, or c
  SITE (9091): n equals a,t,g, or c
  SITE (9092): n equals a,t,g, or c
  SITE (9093): n equals a,t,g, or c
  SITE (9094): n equals a,t,g, or c
  SITE (9095): n equals a,t,g, or c
  SITE (9096): n equals a,t,g, or c
  SITE (9097): n equals a,t,g, or c
  SITE (9098): n equals a,t,g, or c
  SITE (9099): n equals a,t,g, or c
  SITE (9100): n equals a,t,g, or c
  SITE (9101): n equals a,t,g, or c
  SITE (9102): n equals a,t,g, or c
  SITE (9103): n equals a,t,g, or c
  SITE (9104): n equals a,t,g, or c
  SITE (9105): n equals a,t,g, or c
  SITE (9106): n equals a,t,g, or c
  SITE (9107): n equals a,t,g, or c
  SITE (9108): n equals a,t,g, or c
  SITE (9109): n equals a,t,g, or c
  SITE (9110): n equals a,t,g, or c
  SITE (9111): n equals a,t,g, or c
  SITE (9112): n equals a,t,g, or c
  SITE (9113): n equals a,t,g, or c
  SITE (9114): n equals a,t,g, or c
  SITE (9115): n equals a,t,g, or c
  SITE (9116): n equals a,t,g, or c
  SITE (9117): n equals a,t,g, or c
  SITE (9118): n equals a,t,g, or c
  SITE (9119): n equals a,t,g, or c
  SITE (9120): n equals a,t,g, or c
  SITE (9121): n equals a,t,g, or c
  SITE (9122): n equals a,t,g, or c
  SITE (9123): n equals a,t,g, or c
  SITE (9124): n equals a,t,g, or c
  SITE (9125): n equals a,t,g, or c
  SITE (9126): n equals a,t,g, or c
  SITE (9127): n equals a,t,g, or c
  SITE (9128): n equals a,t,g, or c
  SITE (9129): n equals a,t,g, or c
  SITE (9130): n equals a,t,g, or c
  SITE (9131): n equals a,t,g, or c
  SITE (9132): n equals a,t,g, or c
  SITE (9133): n equals a,t,g, or c
  SITE (9134): n equals a,t,g, or c
  SITE (9135): n equals a,t,g, or c
  SITE (9136): n equals a,t,g, or c
  SITE (9137): n equals a,t,g, or c
  SITE (9138): n equals a,t,g, or c
  SITE (9139): n equals a,t,g, or c
  SITE (9140): n equals a,t,g, or c
  SITE (9141): n equals a,t,g, or c
  SITE (9142): n equals a,t,g, or c
  SITE (9143): n equals a,t,g, or c
  SITE (9144): n equals a,t,g, or c
  SITE (9145): n equals a,t,g, or c
  SITE (9146): n equals a,t,g, or c
  SITE (9147): n equals a,t,g, or c
  SITE (9148): n equals a,t,g, or c
  SITE (9149): n equals a,t,g, or c
  SITE (9150): n equals a,t,g, or c
  SITE (9151): n equals a,t,g, or c
  SITE (9152): n equals a,t,g, or c
  SITE (9153): n equals a,t,g, or c
  SITE (9154): n equals a,t,g, or c
  SITE (9155): n equals a,t,g, or c
  SITE (9156): n equals a,t,g, or c
  SITE (9157): n equals a,t,g, or c
  SITE (9158): n equals a,t,g, or c
  SITE (9159): n equals a,t,g, or c
  SITE (9160): n equals a,t,g, or c
  SITE (9161): n equals a,t,g, or c
  SITE (9162): n equals a,t,g, or c
  SITE (9163): n equals a,t,g, or c
  SITE (9164): n equals a,t,g, or c
  SITE (9165): n equals a,t,g, or c
  SITE (9166): n equals a,t,g, or c
  SITE (9167): n equals a,t,g, or c
  SITE (9168): n equals a,t,g, or c
  SITE (9169): n equals a,t,g, or c
  SITE (9170): n equals a,t,g, or c
  SITE (9171): n equals a,t,g, or c
  SITE (9172): n equals a,t,g, or c
  SITE (9173): n equals a,t,g, or c
  SITE (9174): n equals a,t,g, or c
  SITE (9175): n equals a,t,g, or c
  SITE (9176): n equals a,t,g, or c
  SITE (9177): n equals a,t,g, or c
  SITE (9178): n equals a,t,g, or c
  SITE (9179): n equals a,t,g, or c
  SITE (9180): n equals a,t,g, or c
  SITE (9181): n equals a,t,g, or c
  SITE (9182): n equals a,t,g, or c
  SITE (9183): n equals a,t,g, or c
  SITE (9184): n equals a,t,g, or c
  SITE (9185): n equals a,t,g, or c
  SITE (9186): n equals a,t,g, or c
  SITE (9187): n equals a,t,g, or c
  SITE (9188): n equals a,t,g, or c
  SITE (9189): n equals a,t,g, or c
  SITE (9190): n equals a,t,g, or c
  SITE (9191): n equals a,t,g, or c
  SITE (9192): n equals a,t,g, or c
  SITE (9193): n equals a,t,g, or c
  SITE (9194): n equals a,t,g, or c
  SITE (9195): n equals a,t,g, or c
  SITE (9196): n equals a,t,g, or c
  SITE (9197): n equals a,t,g, or c
  SITE (9198): n equals a,t,g, or c
  SITE (9199): n equals a,t,g, or c
  SITE (9200): n equals a,t,g, or c
  SITE (9201): n equals a,t,g, or c
  SITE (9202): n equals a,t,g, or c
  SITE (9203): n equals a,t,g, or c
  SITE (9204): n equals a,t,g, or c
  SITE (9205): n equals a,t,g, or c
  SITE (9206): n equals a,t,g, or c
  SITE (9207): n equals a,t,g, or c
  SITE (9208): n equals a,t,g, or c
  SITE (9209): n equals a,t,g, or c
  SITE (9210): n equals a,t,g, or c
  SITE (9211): n equals a,t,g, or c
  SITE (9212): n equals a,t,g, or c
  SITE (9213): n equals a,t,g, or c
  SITE (9214): n equals a,t,g, or c
  SITE (9215): n equals a,t,g, or c
  SITE (9216): n equals a,t,g, or c
  SITE (9217): n equals a,t,g, or c
  SITE (9218): n equals a,t,g, or c
  SITE (9219): n equals a,t,g, or c
  SITE (9220): n equals a,t,g, or c
  SITE (9221): n equals a,t,g, or c
  SITE (9222): n equals a,t,g, or c
  SITE (9223): n equals a,t,g, or c
  SITE (9224): n equals a,t,g, or c
  SITE (9225): n equals a,t,g, or c
  SITE (9226): n equals a,t,g, or c
  SITE (9227): n equals a,t,g, or c
  SITE (9228): n equals a,t,g, or c
  SITE (9229): n equals a,t,g, or c
  SITE (9230): n equals a,t,g, or c
  SITE (9231): n equals a,t,g, or c
  SITE (9232): n equals a,t,g, or c
  SITE (9233): n equals a,t,g, or c
  SITE (9234): n equals a,t,g, or c
  SITE (9235): n equals a,t,g, or c
  SITE (9236): n equals a,t,g, or c
  SITE (9237): n equals a,t,g, or c
  SITE (9238): n equals a,t,g, or c
  SITE (9239): n equals a,t,g, or c
  SITE (9240): n equals a,t,g, or c
  SITE (9241): n equals a,t,g, or c
  SITE (9242): n equals a,t,g, or c
  SITE (9243): n equals a,t,g, or c
  SITE (9244): n equals a,t,g, or c
  SITE (9245): n equals a,t,g, or c
  SITE (9246): n equals a,t,g, or c
  SITE (9247): n equals a,t,g, or c
  SITE (9248): n equals a,t,g, or c
  SITE (9249): n equals a,t,g, or c
  SITE (9250): n equals a,t,g, or c
  SITE (9251): n equals a,t,g, or c
  SITE (9252): n equals a,t,g, or c
  SITE (9253): n equals a,t,g, or c
  SITE (9254): n equals a,t,g, or c
  SITE (9255): n equals a,t,g, or c
  SITE (9256): n equals a,t,g, or c
  SITE (9257): n equals a,t,g, or c
  SITE (9258): n equals a,t,g, or c
  SITE (9259): n equals a,t,g, or c
  SITE (9260): n equals a,t,g, or c
  SITE (9261): n equals a,t,g, or c
  SITE (9262): n equals a,t,g, or c
  SITE (9263): n equals a,t,g, or c
  SITE (9264): n equals a,t,g, or c
  SITE (9265): n equals a,t,g, or c
  SITE (9266): n equals a,t,g, or c
  SITE (9267): n equals a,t,g, or c
  SITE (9268): n equals a,t,g, or c
  SITE (9269): n equals a,t,g, or c
  SITE (9270): n equals a,t,g, or c
  SITE (9271): n equals a,t,g, or c
  SITE (9272): n equals a,t,g, or c
  SITE (9273): n equals a,t,g, or c
  SITE (9274): n equals a,t,g, or c
  SITE (9275): n equals a,t,g, or c
  SITE (9276): n equals a,t,g, or c
  SITE (9277): n equals a,t,g, or c
  SITE (9278): n equals a,t,g, or c
  SITE (9279): n equals a,t,g, or c
  SITE (9280): n equals a,t,g, or c
  SITE (9281): n equals a,t,g, or c
  SITE (9282): n equals a,t,g, or c
  SITE (9283): n equals a,t,g, or c
  SITE (9284): n equals a,t,g, or c
  SITE (9285): n equals a,t,g, or c
  SITE (9286): n equals a,t,g, or c
  SITE (9287): n equals a,t,g, or c
  SITE (9288): n equals a,t,g, or c
  SITE (9289): n equals a,t,g, or c
  SITE (9290): n equals a,t,g, or c
  SITE (9291): n equals a,t,g, or c
  SITE (9292): n equals a,t,g, or c
  SITE (9293): n equals a,t,g, or c
  SITE (9294): n equals a,t,g, or c
  SITE (9295): n equals a,t,g, or c
  SITE (9296): n equals a,t,g, or c
  SITE (9297): n equals a,t,g, or c
  SITE (9298): n equals a,t,g, or c
  SITE (9299): n equals a,t,g, or c
  SITE (9300): n equals a,t,g, or c
  SITE (9301): n equals a,t,g, or c
  SITE (9302): n equals a,t,g, or c
  SITE (9303): n equals a,t,g, or c
  SITE (9304): n equals a,t,g, or c
  SITE (9305): n equals a,t,g, or c
  SITE (9306): n equals a,t,g, or c
  SITE (9307): n equals a,t,g, or c
  SITE (9308): n equals a,t,g, or c
  SITE (9309): n equals a,t,g, or c
  SITE (9310): n equals a,t,g, or c
  SITE (9311): n equals a,t,g, or c
  SITE (9312): n equals a,t,g, or c
  SITE (9313): n equals a,t,g, or c
  SITE (9314): n equals a,t,g, or c
  SITE (9315): n equals a,t,g, or c
  SITE (9316): n equals a,t,g, or c
  SITE (9317): n equals a,t,g, or c
  SITE (9318): n equals a,t,g, or c
  SITE (9319): n equals a,t,g, or c
  SITE (9320): n equals a,t,g, or c
  SITE (9321): n equals a,t,g, or c
  SITE (9322): n equals a,t,g, or c
  SITE (9323): n equals a,t,g, or c
  SITE (9324): n equals a,t,g, or c
  SITE (9325): n equals a,t,g, or c
  SITE (9326): n equals a,t,g, or c
  SITE (9327): n equals a,t,g, or c
  SITE (9328): n equals a,t,g, or c
  SITE (9329): n equals a,t,g, or c
  SITE (9330): n equals a,t,g, or c
  SITE (9331): n equals a,t,g, or c
  SITE (9332): n equals a,t,g, or c
  SITE (9333): n equals a,t,g, or c
  SITE (9334): n equals a,t,g, or c
  SITE (9335): n equals a,t,g, or c
  SITE (9336): n equals a,t,g, or c
  SITE (9337): n equals a,t,g, or c
  SITE (9338): n equals a,t,g, or c
  SITE (9339): n equals a,t,g, or c
  SITE (9340): n equals a,t,g, or c
  SITE (9341): n equals a,t,g, or c
  SITE (9342): n equals a,t,g, or c
  SITE (9343): n equals a,t,g, or c
  SITE (9344): n equals a,t,g, or c
  SITE (9345): n equals a,t,g, or c
  SITE (9346): n equals a,t,g, or c
  SITE (9347): n equals a,t,g, or c
  SITE (9348): n equals a,t,g, or c
  SITE (9349): n equals a,t,g, or c
  SITE (9350): n equals a,t,g, or c
  SITE (9351): n equals a,t,g, or c
  SITE (9352): n equals a,t,g, or c
  SITE (9353): n equals a,t,g, or c
  SITE (9354): n equals a,t,g, or c
  SITE (9355): n equals a,t,g, or c
  SITE (9356): n equals a,t,g, or c
  SITE (9357): n equals a,t,g, or c
  SITE (9358): n equals a,t,g, or c
  SITE (9359): n equals a,t,g, or c
  SITE (9360): n equals a,t,g, or c
  SITE (9361): n equals a,t,g, or c
  SITE (9362): n equals a,t,g, or c
  SITE (9363): n equals a,t,g, or c
  SITE (9364): n equals a,t,g, or c
  SITE (9365): n equals a,t,g, or c
  SITE (9366): n equals a,t,g, or c
  SITE (9367): n equals a,t,g, or c
  SITE (9368): n equals a,t,g, or c
  SITE (9369): n equals a,t,g, or c
  SITE (9370): n equals a,t,g, or c
  SITE (9371): n equals a,t,g, or c
  SITE (9372): n equals a,t,g, or c
  SITE (9373): n equals a,t,g, or c
  SITE (9374): n equals a,t,g, or c
  SITE (9375): n equals a,t,g, or c
  SITE (9376): n equals a,t,g, or c
  SITE (9377): n equals a,t,g, or c
  SITE (9378): n equals a,t,g, or c
  SITE (9379): n equals a,t,g, or c
  SITE (9380): n equals a,t,g, or c
  SITE (9381): n equals a,t,g, or c
  SITE (9382): n equals a,t,g, or c
  SITE (9383): n equals a,t,g, or c
  SITE (9384): n equals a,t,g, or c
  SITE (9385): n equals a,t,g, or c
  SITE (9386): n equals a,t,g, or c
  SITE (9387): n equals a,t,g, or c
  SITE (9388): n equals a,t,g, or c
  SITE (9389): n equals a,t,g, or c
  SITE (9390): n equals a,t,g, or c
  SITE (9391): n equals a,t,g, or c
  SITE (9392): n equals a,t,g, or c
  SITE (9393): n equals a,t,g, or c
  SITE (9394): n equals a,t,g, or c
  SITE (9395): n equals a,t,g, or c
  SITE (9396): n equals a,t,g, or c
  SITE (9397): n equals a,t,g, or c
  SITE (9398): n equals a,t,g, or c
  SITE (9399): n equals a,t,g, or c
  SITE (9400): n equals a,t,g, or c
  SITE (9401): n equals a,t,g, or c
  SITE (9402): n equals a,t,g, or c
  SITE (9403): n equals a,t,g, or c
  SITE (9404): n equals a,t,g, or c
  SITE (9405): n equals a,t,g, or c
  SITE (9406): n equals a,t,g, or c
  SITE (9407): n equals a,t,g, or c
  SITE (9408): n equals a,t,g, or c
  SITE (9409): n equals a,t,g, or c
  SITE (9410): n equals a,t,g, or c
  SITE (9411): n equals a,t,g, or c
  SITE (9412): n equals a,t,g, or c
  SITE (9413): n equals a,t,g, or c
  SITE (9414): n equals a,t,g, or c
  SITE (9415): n equals a,t,g, or c
  SITE (9416): n equals a,t,g, or c
gtgacttgtagctttaacaaaaattaggttccctagttgcagctgccagggaaagctagtctaatatcaaagcaaaccatccttcttctcaagcacagagtttttaagataggagtgtgtgtgtattgacattttcctagcagtggctgaagtcaaggaccaggagatttagggcccacttggagttcttatggtgaaacagtagtagcttcctagagacctttaaagcttatctgtaatttgtatagttcagaagatactgtatacatcattatttctccctgctttcaaaacaggaagggggtgtggagagtaacacactaaaaaaaggataagtaattaatttctgggtaagaatttccttttggcttaaaatggactgatggtgtaagttcctccctttgcaagcagaagctttgaagatagtgagctagatgaagctctggacatcttgaatgaagtattctgtataagaaccaagtgtataataactgttagtaatagaggctgctcatagaaatgtcattgcattataattgtagggacagtttgtcagagagtaggtagaagattatcagacccaggttttgttcttggctcacatgaagtcatcaagtaggctatttaaatgcttcactttaaccataggctaagattaaattaaaaataaaaagcttttgtcatggccgggcacagtggctcatgcctgtaatcccagcactttgggaggctgaggtgggtggatcacctgaggtcaggaatttgagactggtctgaccaacatggtgaaaccctgtctctactaaaaatacaaaaattagccgggcacggtggtgcacgcctgtaatcccagctactcgggaggctgaggcaggagaatcgcttgaacctgggagggggaggttgcagtgagccgagatcgtaccattgcactccagcctgggggacagagtgagactccgtctcaaaaaaaaaaaaaaaaaaagcttttgtcaattaaagatgcttgtcagtactgagtattcatgttgctatggcacttttataagaaaactgtacacggtcatatctgcttccgaaaataatacatagtgagatagtaattttacaggcaattaagaatttgctggccaggcgcggtggcttacacctgtaatcccagcactttggaaagccaaggtgggtggatcacctgaggtcaggagtttgagaccagcctggccaacatggcgaaaccctgtctctactaaaaaaaaaaatccaaaaaattagccgggcatggtggcaggcgcttgtaatcccagcaacttgggaggctgaggcaggagaatcacttgaacccgggaggcagaggttgcagtgagccgagatcgcgccattgcactccacctgggcaacaagagcaaaaactccgtctcaaaaaaaaaagaatttgctataatagaagatccatgtgtacattctgtatgcaaatcttaggaagatattagatcccagaaggttaaagttccgatctctatatatttgtatatgctttaaggagaagtggcatccatgtagatgtggtaaatggcttataactctcgaggtttccaatttctgctgtggtagcaattctaaactcagatggacttggacactactctggattactgtccctaaatatcaactactgtttataagccagcagaggccaactgaaatagtacacataaagttcctacagcatatccctcagtcagaagtggaaaagattgattaaagttggagtataaacatatggggccctgaccaaaaatattgaaccgtactactagaaatccccattctttagctaaaggataatctgacttcacttttaattcttcattgactattggtgctctgaaagaataggaaataatagcaaaacatgggaactcctagatagcatacatttatttttaaaatgtataccatcggccaggcaccatggctcacgcctgtaatcccagcactttgggaggccaaggtgggcggatcatttgaggtcaggagttggagaccaccctgggcaacatggtgaaaccccatctctactaaaaatacaaaaactaactgggtgtggtagcacacacctgtaatcccagctactcaggaggctgaggcagtagaactgcttgaacctggaagacagaggttgcagggagccaagatcacgccactgtactatagcctgggagaaaacaaacaaaaaacatatggtcaacttcccaagtaaactgaccaatgtcagtttaggttcagtcttactgtaggagtgcctgccgtaggccagcgcctctcaacctttccactaagtacattaagatcctaacagtaatcattgggaccccaggtcatcgtctcaacagaagctccagatttcttcaagtcttggccctcttgttttatatcaaaattttatgtatattatttttatattttcaaaaattctccccagatcatcaagtaatattgagatgctgacatagaaaaaagtagatttccagctggtatgatcagtgataaattggacttcatcaaaattaaaagcttttgtgcaccaaaggatactatcaagaaagtaaaaagctatcccacagaataggagaaaatatttgtaaatcataagtctagtattcagatgtctaaagaactcttagaattcaacaataaaaagataacccagtttacaaaatggatatgaatagacagttctctaaaagagacatatacatggccaataagctcgtgaaaagctgtttaatatctttagtcattagggaaatgcaaatcaaaaccacaatgatatatcatttcacacctactaggatggcaataatcaaaaacacacaaacagatgttggtgaagatacggagaaattggaaccctcaagcattgctggtgggaatgtaaaatggtgcagccacttgtggaaaatagtttgtcagttcctcaaaaagttcacagttaccatatgacccagcaattccattcctagggttacacccaagggaactgaaagcatagattcacacaaaaacttgtacacaaatgttcatagctttattataatagccaaaagtggaaacaacccagttgtccaccaattgggacaaattgaatgaatacacaaaatgttatatccacacaatggaatgttattcagccataagaaaacaatgaaatcctgatcacatgctgcgacacagatgaaccttgaaaaattgtgacatgaaacaagccagacacaaatggccacatattgtatgattccatttatatgaaatacccagaataagctaattcgtaaagacagaaaatagattggtggttgctaggggataagaggaagggtgaattgggaatggccactatgcggtacagggtttctaatgttctggcattagatagcagagatgaaaatgttctggcattagatagtggagatggttgcataacactgaatatactaaaatccactgaattgtacacttaaaaaaatgaagaaagaaggactatgcatgatcaaagaaaaaaatgctttgtgctcaagtagggatagaataaacagtaagactggaaagactgtgaagggccttgaatggcaagctaaggaagttagctttcatcttatagatcgtaggaagccaccagagtattttgagcaggggtggcatgtttaaggtagtgttataggaagtttaatttgtgaaatgagaaagagatactatcagccaggagaggtagaaggttctataaagtcaaattgaacacccgaagtttcagatttcatgaatgaccctgggtatgtgtgtatacacatatgtatgggatttgtagtcatctggggaaggctgaggtgctaatatgaatactgaaaactagagagggtaatatagcagagtagttaaaaatgaaaacactctgaacccacatgctgtctgggttcaaattccagctgggctaccttccagcactgtgaccttaggtaagtcactaaccctgtctgtgcttcagcttcctcttccgtaagataaggatacctactcatcaaggttgttttgaggattaagtgggttaatacatacaaagtgtttacaatgtcaagcttaaagaaaggtccccaaaaatgtcagctgctagtctgaaactccagagcaggtttgagagtaacccgctgttgttctctgccccggataaactatgaagtaacagtcctaaagtgttaaaagacaaaacaaatttttctttgtgaaaaatgaccctttaaaaaaactccatctactaataatgaagcttagtagtagtaaaatgatgatttttagccataaaacgggttttctatatcttcacaaatatagtgtagagtttcacaatattctttgatatgaaccagtctctcatactttctgtatagcactgattcgctaagtaagatgccaaggcatgacctcccttcaggaattgggaatctgcatttttaataagcatcctaggtaattcttttttttttttttttttttttgagacggagtctcgctctgtcgcccaggccggactgcggactgcagtggtgcaatctcggctcactgcaagctccgcttcccgggttcacgccattctcctgcctcagcctcccaagtagctgggactacaggcgcccgccaccgcgcccggctaattttttgtatttttaatagagacggggtttcaccttgttagccaggatggtctcgatctcctgacctcatgatccacccgcctcggcctcccaaagtgctgggattacaggcgtgagccaccgcgcccggccgcatcctaggtaattcttatgcatgatacaggttgagaccagtgccatgtacagaagtgggaaaaatggcttatgaaactcagttgtatttagcacactgtgttagacataaaatttgaaaacccaacctggacaacacagtgagacccagtctctactaaaataaaataaataagtgaacattgaaaaccaatggatagtagaatgtattcagttcagtgagacatgaaacaatatttttgcttaattgaatcaaacatatgttaaaaaaaaaaaaaaaactcaccctactcccaaagcactcaataaattcttcagagaaaaggaagagctttttgtactacattgcctctaaaatcttctgtaggataagacattttaagatcacttaaaatcttgttttaagtttttaagtctcattttaataaccaaataaaatggtttttatttgagccagtttcaagttcttaaagtgacacataggacttaacaaaatccattagttgtcatttgtgctttgcccatttttactgatttcttcatactctgaaggaaaaaaaatgctacaaatgtatgttggtatataagagagtgcattccataaatattagaaattttttttttctttttttgagatggagtttcactctttcgcccaggctggagtgcagtggtgccatctcagctcactgcaacctctgccttccagtttcaagtgattctcctgcctcagcctcctgagcagctgggattacaggcgcccgccaccacgcccagctaacttttgtatttttagtagagatggggtttcaccatgttggccaggctggtcttgaactcctgaccttgtgatccacccacctcagcctcccaaagtgctgggattacaggcgttagccactgcgcccggccagaaaaatattttatagaattcaaacttgtattttcttttgaagggatataaaaagggtgagagaacccaacaaccacacttattcaaatttataaggataattaggagtattctcatggttatctttagaatcttagcagggtaaaaaagagtttattgtttcatttgctgaaactcctgagaagaagtctcaccacatttgtatttacagagattagatttggcaactctaaagacaagagaaattactcatgataagtgtttggaggggttggagagaaaacagctaattaggcacttggcagtgtggcagggcaacctttgggcaacccagtccagattaggttagaagaggagcacggaccttttgtccactgcaaaccagtgccacaaatgaagtgggaagagacaggttaccacatactggttggacttgagagagaaccagaaagtgtacaatcccataagcataaaaaatggggataaaacttcaagtgtatataagggtaagaacaggaggaagcagtaacagagagggcaggagagaaagatcagaaggaatcggacgcctgagaagaggaactgggggctgagtcctgtcctggcctggccgctccccattcctccctctgcctctgagggcttcagttttcccaagtgagaaacagctgtgctagattgcttctacagtcctttccactcctggaccgaaacagttgcccctgcatctaaaatacgtagctctagcatataaaatgcaggttacctcaactcccccccgactcccacatctcactcccttcctttccctgcctgccctaattctggctgcgttctgttcttgcctcatatggactctttttctcctccccttcttttccaatgtcatgcagtctcttaacactgggtttcaaccactatacagaaaaatgttagtgaaaaaggaagaggggttccatgctgcttgattctccctaaccaggcacactaaactaggggtgacagtgtatcacaaagtccagactcacagtcttgctgccccttctcctcttcaaagtttgtttccgaagtaccaccccttgcacctcacatcccagccaactctgcctacctgtcagccccagccctcctcaggcctgcctcagcctcacagccaggatcctaccaacaccaacaccgcgccaaataacccctcccaaaagcctcaccggaactaatctggggactctgcctattattaggaacaccttggatgaagcccctacccgcagaattctggcagtagcagcagaattttcaggcatgtgcctaattttgttggggtggtggttgattattttttttaaatctaggatttctgggatctgaagcttatacaatcttggatatcttctttaagaaaaagaatacaaaaatatcttctataagttttacaaaaatatatgaccatgtgagcacgttgctagctcccgcccccaccccaccccccagagccttggaaggggagtgaaactgaagcttttttagcttcatggcaaatatgcttcttcctgagagtactgggtacattcacagacctttattttttactttctatagatttaatttagttaagtcagttcgaagcgggcaaaggccaaaatttctcacccctaggtggctcaaatttctgagcctgagattttatatcttaaaatccattaaaagaatactcaattttcggccgggcgcagtggctcacacctataatcccagcactttgggaggctgaggcgggcagatcacgaggtcaggagatcgagactatcctggctaacacggtgaaaccccgtctccactaaaaatacaaaaaattagccaggcgtggtggcgggcacctgtagtcccagctacccaggaggctgaggcaggagaatggcgtgaacccgggaggcggagcttgcagtgagccgagatcgcgccactgcactctagcctgggcgacagccgtctcaaaaaaagaatactcaatttttaagaagttaggtgtaggtatgcttatataaaatatttagacatgcataagtattttaagtggcctgaaggaagtacatgtatgctacttttgcaaatattttcgctttttttttttttttttttgnnnnnnnnnnnnnnnnnnnnnnnnnnnnnnnnnnnnnnnnnnnnnnnnnnnnnnnnnnnnnnnnnnnnnnnnnnnnnnnnnnnnnnnnnnnnnnnnnnnnnnnnnnnnnnnnnnnnnnnnnnnnnnnnnnnnnnnnnnnnnnnnnnnnnnnnnnnnnnnnnnnnnnnnnnnnnnnnnnnnnnnnnnnnnnnnnnnnnnnnnnnnnnnnnnnnnnnnnnnnnnnnnnnnnnnnnnnnnnnnnnnnnnnnnnnnnnnnnnnnnnnnnnnnnnnnnnnnnnnnnnnnnnnnnnnnnnnnnnnnnnnnnnnnnnnnnnnnnnnnnnnnnnnnnnnnnnnnnnnnnnnnnnnnnnnnnnnnnnnnnnnnnnnnnnnnnnnnnnnnnnnnnnnnnnnnnnnnnnnnnnnnnnnnnnnnnnnnnnnnnnnnnnnnnnnnnnnnnnnnnnnnnnnnnnnnnnnnnnnnnnnnnnnnnnnnnnnnnnnnnnnnnnnnnnnnnnnnnnnnnnnnnnnnnnnnnnnnnnnnnnnnnnnnnnnnnnnnnnnnnnnnnnnnnnnnnnnnnnnnnnnnnnnnnnnnnnnnnnnnnnnnnnnnnnnnnnnnnnnnnnnnnnnnnnnnnnnnnnnnnnnnnnnnnnnnnnnnnnnnnnnnnnnnnnnnnnnnnnnnnnnnnnnnnnnnnnnnnnnnnnnnnnnnnnnnnnnnnnnnnnnnnnnnnnnnnnnnnnnnnnnnnnnnnnnnnnnnnnnnnnnnnnnnnnnnnnnnnnnnnnnnnnnnnnnnnnnnnnnnnnnnnnnnnnnnnnnnnnnnnnnnnnnnnnnnnnnnnnnnnnnnnnnnnnnnnnnnnnnnnnnnnnnnnnnnnnnnnnnnnnnnnnnnnnnnnnnnnnnnnnnnnnnnnnnnnnnnnnnnnnnnnnnnnnnnnnnnnnnnnnnnnnnnnnnnnnnnnnnnnnnnnnnnnnnnnnnnnnnnnnnnnnnnnnnnnnnnnnnnnnnnnnnnnnnnnnnnnnnnnnnnnnnnnnnnnnnnnnnnnnnnnnnnnnnnnnnnnnnnnnnnnnnnnnnnnnnnnnnnnnnnnnnnnnnnnnnnnnnnnnnnnnnnnnnnnnnnnnnnnnnnnnnnnnnnnnnnnnnnnnnnnnnnnnnnnnnnnnnnnnnnnnnnnnnnnnnnnnnnnnnnnnnnnnnnnnnnnnnnnnnnnnnnnnnnnnnnnnnnnnnnnnnnnnnnnnnnnnnnnnnnnnnnnnnnnnnnnnnnnnnnnnnnnnnnnnnnnnnnnnnnnnnnnnnnnnnnnnnnnnnnnnnnnnnnnnnnnnnnnnnnnnnnnnnnnnnnnnnnnnnnnnnnnnnnnnnnnnnnnnnnnnnnnnnnnnnnnnnnnnnnnnnnnnnnnnnnnnnnnnnnnnnnnnnnnnnnnnnnnnnnnnnnnnnnnnnnnnnnnnnnnnnnnnnnnnnnnnnnnnnnnnnnnnnnnnnnnnnnnnnnnnnnnnnnnnnnnnnnnnnnnnnnnnnnnnnnnnnnnnnnnnnnnnnnnnnnnnnnnnnnntcacgcctataatcccagcactttgggagtctgaggcgggcggatcaccagaggtcaggagttcaagaccagcctgaccaacatggtgaaaccccatctctactaaaaatacaaaaattagccaggcatggtggcacacgcctgtagtcccagctacttgggaggctgaggcaggagaattgcttgaacctgagaggcagaggtttcagtgagccaagactgcactactgcactccagcctgaggaacagagcgagactctgtctcaaaaaaaaaaaaaaaaaaaaagaatgtaagtaatttgcccaagctgcagagctaaattttaaactagataattctgattccaaagcccagataatctggctagaagttgcaccaggggattcactgatttacaaagaattagaatgtgataaaattccctgagtacaggcaagtgtgatttttatctttgctagtaaagccatttagatgtcttaaagtgcctcaatctgttgcacctgttctactaaaacaaagaaatgagtcaacggcctcttttagctttaacattctctctgtctatacatttttatagaataatttttagttattgcagcaggtttcaccagtcagccaacgggtgtgtataacattaatcactagcactacacctcagaagtcttgcttattaagagcactcagcttaagtgaagaaattaaagaattttggtaggcctttgggacagttcaagtttaggttgtttggctgggttgagagagtaaaaaactaacatttcttaacctaaccctttttctttctttctcacaggtaacaactatccaatagcttacctttaaaatgtcccctctattgttcctccctcagacatttttgatcacttgtcccagtttccatgagtcctgtatcacagctgtcacaatgcttgagctatttaggtggaggtaactttcagaaatgaactgctgaagggtgcagagtgctcaagaattagattaacaaagaaagtacacctaaatttagcattaaaatgaacttttaaaatatttttcaataggaggataagcaaacataaaaatgggtgtgcttatgtctataaacaggtgctggagcatagattgttatctggacatcaaagaataatagagctgtagctttaaaagagcacacagctggttattagtgattcactcccaggtcactgccaagtgccaaggcatgtggcaagaatagtagaatggaaatcaggtgatgtggattctaatttgagctctgctctgttaaccttgggcatgccagttatcccctttggaccttagtctcttatctacctaatgaagggtttggagcaggtaattcttcagttctaagtaagaatctgtattcatgaataactgttcagcatatgactcagcccaaggtgtacaggattgctggagtgtggaaggtatgttggctcctgcctgtactagcaacaaggcttaatctagtgaacagaaaggatcaaaggtggctatatccccacctaaatgtccatgatctacaagtgctcttctagctggcagagtgggtcagtaatgagattttgtatctcattatatgaagttctaagcactgaacctaatcagttacccatcacttaagtagacagtgtcaggcagagcttaactctccttcctattttcctttgtcttccttttctctgtaagttctctaacataaggaacttccattttggtgaaagaatagaaaagttgagggacaggccaggtgtgttgtaagtaagactgatccagctgattggtttgccatttagattgcatggcagacatctgccataagcacttaaaacacaccttcaataggcattagaaagcacacacacggccaaacatagtagctcacacctgtaatgccaatactttgtgaggctgaggcaggaggattgcttgagcccagcagttcaagaccagcctgggcaatatagcaagatgccatctctacaaaaaattttaaaattatctgaatgtggtagtacattcctgtggtctcagctactcaggggtctgaggtcggaagatcacttgagcccaggagatcaaggctgcagtgagccatgactgtgccattgcactccagcctttgcgacagagcaagaccctgcctcaaaacacacacactgactagggatggtggcttatgcccagcactttaggaggctgaggcaggcagatcacttgaggtcaggagtttaagaccagcctggccaacatggtgaaaccctactctactaaaaatacaaaaatcagccatgcggccaggtgcagtggctctcgcctgtaatcccagcactttgggaagctaaggcaggaggatcacctgaggtcaggagttcgagaccagcctgaccaacatggtgaaatcctgtctctactaaaaatacaaaattagccccgtgtggtggcgcctgcctgtaatcccagctacttgggaggctgaggcaggagaatcacttgaacccaggaggcagaggttacggtgagccgagatcacgccattgcactccagcctgggcaacaagagcgaaactccatctcaaaaaaaaaaaaagaaaagaaaatcagccatgcatggtgacacacagttgtaatcccatctacctgggaggctgaggcaggagaatcgcttgaacctgggaggcagaggttgcagtaagccaagattgcaccactgcactccagcctgggcaacagagtgagactgtgtcttgaaacacacacacacacacacacacacacacacacacacacacacacacacataatttgctgttgttttgggggcatggcggcacatacctatagtcctagctacttgggaggctcaggcaggaggatcacttgaacccaggaagttgaaactgcagtgagctgtgattgtgccgctgcactccagcctgggcaacagagtgaagtactgtctcaagaaaataaaaaaataaagaaataaaaacataaggtttagatggcaactttaaaatgtgaaaggaggatatacagtttttcaaaattcttctaggagctatgccagcaaaaaggtttgaagacctgaagaccattatatcagtggcataaacatctttaatttgtccttttccttctcctacacctagtcaattgattttttttttcccatttatcaatttcagactctgcctggtttttcactttcccatccattttgttacaatatttttcctcccttgaaattagcccagtctcttggagtgaatgccccatgctccttcctaccgctgtgtctttactacattatcctcccttggaatgccgtcatctcttctctgttcaagaactacttctcccgaccactgtggtcgagattgatttctctttaacctctacaacattggctattccatacagttagcccttagcatagaacatcattgtttgattttgctccttaagaatagaaagcacctcttaaaattctaccatattcccccaatgcctaatgcaatgctaaccacatagtgagtgcttaataaatattgtattgactgcctagagtacagagcacttgttcactcattgttcggccattcagctaatactttttgagaaattttgtgtaccaggaactgtactatgcactggggtacggtagggactaaagtagatgataatccctgctttgaaagactgaaaagtaagatatatggtatgtcaaaaggtaataagtactgagaagaaaaatagaaaaagcaggaaagaagaacaagaagtgtgtgatgggggagggttacagggtggggaggggtagtgttgtatacacttctagataagatagggaagtcctcactgatacttatggtgacattttacaaaggacctgaggtgtaggaaggatttgagcttatctgtgcaaagagccttccaggcaaggaacttaccatgtgaaggcaccaaggctggacctgcttaacattccaggaagggaaagctttggggctggagcagaagggtagaggccagattgagagatgagtcagaggacagtggggcccgggcagagggacagaacctgcgggtgctggcaatcagccttttgatctgagtgagaatagaggccttgagagggctttgagcagaggagtgacctgctgacttaagttgaatagaaccctctagatgcttcattaaggctagactgaagggaggcaaaggcagggtgagatcagtcaggaggcaagtatataatgataatacattgaatataataatgatatattaataataataatccagagatagtggcaactcagaccaggggaagcagtagaggcggagagaagtggtcagattttggatttattttgaaggtagaacagacaggattgctgactctgttgagtagtcagctgggagctattgatggtttctgagcaggagctgaaggaagattaccccggtataggactgctgggaagacgtggtgcaggcagagatcaggtaggaggccattgcaaggatttaagggtgagatccataagggttttaactgcaaatcagcagaggaaaaagggagtggtgatggtcatggtgacagtgatggtgagagagactggaaaggaggaatcaacaggatttcatgactagataacagagaaccaatatgaagaaggaaaacactttttttttttttttgagacggagtctggctctgttgcccaggctggagtacagtgagacgatctcagctcactgcaacctccgcctcctgggttcaagcgattctcctgcctcagcctcctgagtagctgggattacaggcatgcaccaccacgcccggctaatttttgtatttttagtagagatggggtttcaccatgttggtcaggctggtcttgaactcttgacctggtgatccgcctgccttggcctcccaaagtgctgggattacagacgtggagccaccatgccctggcaggaaaacacacttttgaatgttgtgtgacctggagaatggtaacactgttaatttaaaaaaaaaaaaaaagcccagagaaggctgatttagggagaaatttatgccttagttatacagagtttgagatggtaatgaaatatcaaattaaaactgtccagcaaggaagtaggaaatgtggaactgaaaaagaagttagaactaaagatgtggatctgtctttggcataaagattatattaagttacttgagagtagatgagtttccaaagaagcagtgtagcaagaatagtggagggccaagactggatcctgggggtcagcaacatctaggagccagaaaaaatgccttcggtgaaagaaacggaaagatgggtctattcaaattgtagtcagccaacccatgccagaagtaagcacagaaagtaagagtgaacattggccaagcacagtggctgatgcctgtaatcccaacactttgggaggccaaggcgggcagattgcttgagctcaggagttcgagaccagcctgagcaacatggtgaaactccaactctacaagaaattagccggtcctgtgcacacctgtagtcccagctgctagggaggctcaggtgggaggatcacttgaacctagaaagttgaggctgcagtgagctgtgagcatgccactgcactccagcgtgggcaacagcccggtggctcacgcctgtaatcccagcactttgggacgccaaggcaggtcgatcacttgaggtcaggagttcgagactagcctggccaacatggagaaaccccatctctactgaaaatacaaaaattagctgggcatggtggtgcacacctgtaatcccagctactcgggaggctgagacaggagaatcacttgaacctgggaagcggaggttgccgtgagccaagatcatgccactgcacttcagcctggacaacacagagagactctgtcccaaagggaaaaaaaagaaaaagatccaggagatccattcctaggtatatacccaagagaattgaaaacataaaaacatatgttcacacaaaaacttgtacatgggctcatacctgtaattgcagcactctgggaggccaaagcaggaggatcatttgaggccaggagttcaagaccggcctaggcaacatagtgagaccctgtctctacaaaatgcatgaatgtttgtagcagcattcttcataatgttcctaaagtggaaacaacccagttgtttgtcagctgatgaatgggtagattatatgcagagtatccaggctgggcgtagtggctcatgcctgcaatcctagcactttgggaagctgaggtggacagatcatttgagctcaggaattcaagaccagcctgagcaacatagtgagaccttgtctataaaaaatttttaaatgttaaaaaaaagaatgcagagtatccatacaacgggatattattcagccataaacaggaatgaagtactgatacatgctacaacatggatgaaccttgaaaacatgctaagtgaaataagccagacacaaaggtctacacattgcctgacgccatttatatgaaacacctagaataggccaatctatagagacataaagtagatgaatggttgccaggctctgggagttaagagagaatgggaaatgactgccaacatgtatggggtttctacttgaggtgatgaagatattctgaaattagatagatagtggggatggctgcacaaccttttttttttttctttttgagatggagtctcgctctgttgccaggctggagtgcagtggcgcaatctcagctcactgcaatctctgcctcctgggttcaagcaattctcctccctcagcctcctgagtagctgggactacaggcaggcaccaccacgcccagctaattttttgttagtagagacagggtttcaccatgttggccaggatggtcttgatctcctgacctcgtgatctgccctcctccggctcccaaagtgctgggattacaggcataagccaccatgcccggcgacaaccttttgaatatactaaaaaacattacattttacactttgaagggtgaattttatggtaaattatatctcagtagaaaaaaatccaggaaactgtgtatagtcagccctccatatttgtgggttccacattcatggattctaagctaaataataatacaataataaaaatataaataaaaaacaatatgctatatagcagctatttgcattgcatttacattatattaggtattatgagtaatccagagatgatttaaagtgtatgtgaagatgtgcataggttacatgcaatactacaccatattatataagggacttgagcatctgtggtgtctgctgcgagtactagaaccaatccttcatggacaccaagagataactgtattcaaaaccaatgaaaccagtgaaagagaagtttcaaaaagattgaaaacacagcagggcagtcaaggaaaccagggagaaaggaaagactagtggatttgggtattagaagatgaaagattaaaacaaatcattccatatcagcatgcagtccatagactactcctaaaagttcctgagacttctttaaggaatctctttggggtaaaaattattttcatgatactactaagatgtatttgtcttttccctatgttgacacttgcactgatgttgcaaaatggtggtaaaactgctggcgccttagcacaaatcaggacggtgacaccaaactgtaccagtggtcactgcattctttactgccatgcactcacaatcaaaacagagccagtttcacttaagaatcgttgatgaagtggtaaattttttttgttttttttttttgaggcagggtcttacccaggctagagtgcggtgggggcatcacagctcactgccgcctcaacttcctgggctcaggtgatgctacctcagcctcctgagtagctgaggctacaggtgtgcaccaccacacctggctaatttttgtttttgttttgttttgttttgtttttagagatggggtttcactctgtcgcccaggctaaatattgttaattgtatcaaatgtcagtccttgaataaatcttttttttttaactggtatgcaccaccacacccagctaatttttgtatttttagtagagacggggtttcgccatgttggccaggctggtctggaactcctgacctaaagtgatctacccgtcttggcctcccagagtgctgggaggtgtgggccaccatgcctgatcctgagtacatctttttaaacttgtttgaagaaatgggaaatatgcataaaccgcctctgctgcacactggtagagtacggtggttgtcacaaggaaaagcatttgggcgattattcaagttgcatattgatttagcagcttcttttttcaccgaccaccatttttacttgaaagaatgatagacaaactatggttttagacttaggcatctggcagacagtctcttgaaactgtatgaagtgagcctgtcacttcaaggtaaacaaatgacaatatttgtagccagtgataaaatttacactttcaagtaaaaattagaattttggaaaacttgtatccactcccatgagcttgaccacttttcaatatatacagacttttctgctgaaatcaatggtgaaatttaaggaatatgattttttgatatgtattctaatgaaatatgtcagtatttagaagatctgcctaacaacagggaaccagtattttgcagtgatctatgtgtgatgttacaaagtcatgcatggtaaaatatccattcaaagtgcaagagaagccaatgggttttattataacaaaagttcctaactgttaagaaactactacttgtcaagttttgatgtagcgctaaagaatatccaaaattatctgaaaatgcagatactttctctgtctgtgtaaagccagattttctttgtatattttaaccaaactaacatattacaacagattaaatgcagaagcagatttgagaatccagtcatcttctattaagtcagacagaggccataaatttatgaaaatgtaaaacagtggcattcttctcattagatggctttatttctttgattgttttgggaaatatagtggtttacatttaaagtatgttatttatattaatataatgtgtagtagttttactgttaatatttttactgaattaatcatatcttttactttttttttagttttattttcttccttttttttttttttttgatttggagtctcgctctgttgcctagtctggagcacagtggcgtgatctcagctcactacaacccccacctcctgggttcaagcgattctcctgcctcagcctcccaagtagctgggatcacaggcgcctgccaccatgtctggctggtttttgtatttttagtagggtttcaccatgttggccaggatggtctcaaactcctgacctcaagtgatccacccacctcggcctcccaaagcattgggattacaggagtgagccaccacacccagtttttagtcttattttctaacacagtagacattgatatatagttcccacattaacaaaagttgtttggggtgctcaatttatttatttatttatttatttatttatttatttattttattttaattttctttttgaggcggagtctcactgtgtcgcccaggctggagtgcagtggcacaatctcggctcactgcaagctctgcctcccaggttcacaccattctcctgcctcagcctcccgagtagctggggctacaggtgcccgccaccacacccggctaattttttgtatttttagtagagacagggtttcaccatgttaaccaggatggtctcgatctcctgacctcgtgatccgcccgcctcagcctcccgaagtgctgggattacaggcatgagccaccgtgccccgcttatattttttttatttttatttatttatttatttatttttgagacagggtctcaaaaaaaacaactttgttgcccaggctggagtgcagtggcatcatcgtagctcattgtagcttctgtctccccagactcaggtgatcctcctgcctcagcctctcaagtagctgggactacaggcacgcaccacccaccccacccaactattttttttattttttgtagagacagagtcttgctatgttgcccaggctggtctcaaactcctgggttccagtgattctcccgtctcagcctcccaaagcactgggattacaggtgtgagccaccactcccagccaaatttaccagacttaatggaaacagtccatttctgtttcttcagatgaaacctcacaactttaggattaataagtaatctcacaactattgtacaggaaataagaaaacgttcccgctaacaatgcacgttgtgatagatctggtccctgacacaaacagcacttggaactgagtgaagtccagagactgaataatacagttctatccactccctgtgcttgactacaacccctgaagagggcttgtacaaattaaatgtatcccagcagctgcttgaaagaccacagcattggccgggcacggtgactcacgcttgtaatcccagcactttgggaggccgaggcgggcggatcacgaggtcaggagatcgagaccacggtgaaaccctgtctctactaaaaatacaaaaaattagctgggcgtgatggcgggcgcctgtagtcccagctactcggagaggctgaggcaggagaatggcgtgaacccgggaggcggagcttgcagtgagccgagattgcaccactgcactccagcctgggcgacagagactctgtctcaaaaaaaaaaaaaaaaaacacgcattttgaatgtccctagcattagggattataaaggtcccattctagtagaagatcctcaggtttggagtgtactaaaggtcatcatccttcgcctgctaataaatttctgaagtccctgctttaaacaaacaatcaaaaagaaggaacagttacagtgctgccaaacaagttctttttttttttttgagatggagtttcgctcttgttgccaggctggagtgcaatggcgtgatctcggctcaccacaacctccacctcccaggttcaagcaattctgcctcagcctcccgagtagctgggattacaggcatgcactaccacgcccagctaattttgtattttttttagtagagacagggtttctccatgttgaggctagtctcaaactcctgacctcaggtgatccgcctgcctcggcctcccaaagtgctgggattacaggcgtgagccacggcgcccggccaacaagttcttacaaacctctgggttgttacaaacccatctggtgctaataaaggtaaggcatcaaccccaatctccaagctgagaattttatcctcaggactgagcactgcggcctgcattcggatgttagtggggctgtcagaaccgtgtctcatgctgttaaaagtggaagtccttcccactcagacccacggaagccaactctgatgagtgggagggtgagcagaaggggcttcggtcattttttatagattcttcaggtaactctagccaccatattaagcattggctcccacaaaaaagcattaaggctcagaaacatcttgtagggtcacaccctccctaaaaacagcacatccctgaagtggtggctgggcagccaggctccaaagcccgctgagctgagcggcagccaagaacaaggtttggtgtttacatactcaaaatcagcctgggttgtcacagcaactcacctcagcacagttcttccttctccacggcggcttgcttccaggctttgctgttctccgtcaccgtcttaacgttcctgctaacctggcctgctgcattctttttatttttctcccaattcctccgccttcttctcatgtgtttgctagtgtgcaatacctcacctgtttggaactcaacaacgtcccctcctgcaaaacgcacctgaaaacaagaaatagcacacaaggcctctaagtggccagaacagatgttaccaggcctaagtccataaggaaagcacccaagccccttgcttttgtcttaaatctttttttttttacacctttaaaataaggttatggtttctaaggcctgccgtaaattaggagtagggagaggaactattgccaagcaccccaaaagttcaagaggtgactgttgatcccagagtagcaaggaaagggacagacaggctataagaagtggacacaagaactcagaactcaggacagtgtaggccttgttagagtcaggcagacaatttcacatacctcagaacgtcataaagccatcatgactttactctggaatagatacgatccagacacctagaaaatgttaaattagattcaacttaaagaggcagagtaatatgtgtggtgttttttaatttcgagcattccaaatggttaagggttttcatgcttaaagagagaaacttagctacctagaacttatttatgagtgctctagataattatctactgttttatatttttttatttataccccgttactaaaacaaaagtaaaaataaagcaaaagattgaaggcattgacatttagtctatatactttctagttcctggctctagttcttagcaatatttgctgctaacctggtgttctgtctctgccaaatttctgcccatgtgaaatatatgagacttgatcctatttccttgctcattgatctacctgaaagggtcatagatgtctccacctccctagagctagtgatcctatatcccatcatctcagccagctagaaaacgaaccatcacatgccacctcctacccaattacgtgcttcataaacagaatacctggcatatagcaggcatttactaaacacttggtgaatgaatacatgagccagtaatccataagatatctgtagaattaattacagttgagccttgaacagcgcaggtcctatgggatcccaccccttgtacagtcaaaaatcctcataaaacttttttttcttttttttttgagacagaatcttgctcgttgcccaagctggagtgcaatggcgtgatctcagctcactgccacctccgcctcctgggttcaagcaattctcctgcctcagcttcccaagtaggtgggattacaggtgcctgcaccacgcctaactaatttttgtatttttagtagagatggggtttcaccatgttggccaggctcgtctcaaactcctgatctcaggcgacccacccgcctaagcctcccaaagtaggggattacaggtgtgagctgccgcacccggccgacaggtgtaactttttttttttttttttttttttttgagacagagtctcactctgtcaccaggctggagtgcagtggctctctctgctcactgcaatctctgctcactgcaacctctgcctcccaggttcaagcgattcccctgcctcagcctcctgagtagctgggactacaggtgtgtgccaccatgcccagctaattttttgtattttagtagagacggaatttcaccatgttagccaggatggtctcgatttcctgacctcgtgatccacctgcttcagcctcccaaagtgctgagattacaggcatgagccaccacacccggccacatataacttttgactctccaaaaacttaactactaatagaagacttaccaatagcataaacaagttgattaacatatattttgtatgtcatttgtgttatatatgtatttcttaccataaagtaaactatagaaaagaaaatgttattaagagaatcataagcaagaaaaaatatgtttactcttcattcagtggaagtggatcagcataaaggtcttcctcctcatgatcttcaggttgagcaggcaaggaggaggagaaagagaaagggttgccatctcagcagtggcagaggcagagggaagtctaaggggacccttgctgttcaaaattgtgttgatcaagggtcaactatacttgcatgaagctataaatttaagagcctagcctattatgggaacagcaattaaaaaaaaaaacaccagttggccgggcgtggtggctcacgcctgtaatcctagcactttgggaggccaaggcaggtggatcacctgaggtcaggagttcgagaccagcctggccaacatggtgaaataccgtctctactaaaaatacaaaaattcactgggcatggtggcgggcacctgtaatcccagctacttgggaggctgaagcaggagaatcgcttgaacctaggggccggaggttgcagtgagctgccaagatcgtgccattgcactctccagcctgggtaaaaacagctaaactccatctcaaaaaaaaaaaaaaacaccagttgatcctggcaccaggaagatcaaatggcatttgtttgtttgtttgttttgagacagagtctcgctctgttgcccaagctggagtgcaatggcacgatctcagctcactgcaaactctgcctcccaggttcaagtgattctcctgcctcagcctcccgagtagctgggattacaggcacccgccaccacacccagctaattttttatatttttggtagagatggggtttcaccatgttggccagtatggtctcaaactccggatctcaagtgatccacccacctcagcctcccaaagtgccttggtttacaggcgtgagccactgcaccagccagtacagttttttgttttgttttattttggttttttgagacggaatctcgctctgtcgcccaggctggagtgcagtggtgccatctcagctcactgcaagctccgcctcccgtgttcatgccattctcctgcctcagcctccctagtagctgggactataggcgcccgccaccacacccggctaatttttttttttgtatttttagtagagacggggtttcaccgtgttagccaggatagtctcgatctcctgtcctcatgatccgcccgtctcagcctcccatagtgctgggattacaggcatgagccaccgcgcccagccttttttttttttttttttttaatgtatgggggaaaaatgactagaaggacagaaaccaacatataacatgattgtgtgcatttacttatttaacaaataattgagcaatttatttctgtatgatactattctaagcgttttagagttaagcaaactcacagtaaactgtattgcccatgataaaaactgcagttacataatttaaaagcaagaatcgcagcaattcatcaggcacagtgactcacgcctgtaatcccaacactttgggaggccaaggcaggaagattccttgagcccaggaggtcaaggccagcctgggcaacatagtgagaactcatgtccacaaaaattacaaaatagccaggcatggtggcaagcacctgtggtcccagctactcaagaggctgaagttggaggatcacttgagcccaggaggtcaaggctgcagtgagcgatgatcgtgccactgcactccagcctgggtgacagagcaagagaccctgtctcaaaataaataaaaataaaagcaagaattgcagaaagtataaaccatgaccaactcaagagaataatcaatgaaagaataggcagaatgtctttccaaaaagcagttgagagatccccatcctccacatatgcactagtgcagtggggatgttgccaggcatggccgccagacctctagatagaacactgaaggtgagtctgcagtaaagccatggaatgtgctaattttagtttaggaataccaaattttattgaccgtttttaattcaataagcaacccttggccatgtataatcagttcatgacccatcagaagatcctctgtggttcactcatggcctttggactatactctgaatcatggctttagaagacatttttttagtatacttaaatggattttataacttggttgatgcccagattacagactgtgaggagtatctccacataacttgtaactgctatatatgcagtcagcaattccagtatttagcctgatattaatttatatttttcctcataatctgataatacagtgctagcaagatagatcacaaagtgtaaatgagtgtttctggagcatagatgggtacgctcaaatctttgtatcttgttttttaatagagacggggtttcgctatgttgctcaggctggtgtcgaactcctcggctcaagcaatccccttgcctcagcctcccagagtgctgggattatacatgggagccaccatgcctagcttccttgtatcattttttaaaattcaagtaagagaaaatgtctggcaatagttcataagctataaatgaaacctagtcttaggacccagctttatattgcctcaatcaaatattaatatctttagttcaaaatttgtatttacaaaaaacttttggttcttggggataccgttattgccttctctgttgccatccatataatgtatgttgttttttttttctctctccctctgggctgcgtttcatgccagataaacttccaaaccaaactgggatggcaccaggcacaaataacactcttcttatcttttcccccatctaggttacccctttgctttgttttatcggcattaccttttctacaaggagacctacctcatccacctcttccatacctttacaggcctctcaattgcttattttaactttggtgagtaaactaaattagcagtgacaccgcaattagtgggaacctggaaggaacagacttgaacaaaatttccttgagagaatctaataggtagggaagttataatgctcccacttgcaaagagggttgtatgaagaggaacacagcttaacttttcctttttttcttttatgtacattcttctgtcagataaaaacattttgagggtggttacccttgccatacctcatcaacaaagaatcctcagtttctctgtgctgtggatgtaactgaatgaccgagccaagcagtccccacttagattcattcttcacttcagacattcaaaaatacagtaacaagctgggtgtggtagcccggaattcaaggctgcagtgagctatgattgagctactgcactcaagtctggacaacagagcaagtcgcatctctaaaaaaacaaacaaaaaaagaaaagaaataaaataacaccctaataatcttttttattttaataaataatttccatcctctcctccaaaacatgaggttattctgaaaaaaaagatcctgatgccaacattttttctttatatattacgttgtgattggaagtctcaggacggtgggagtgtaaaaaccaggctaaattctctcttcttgcatccaggaaaccagctctaccactccctgctgtgtattgtgcttcagttcctcatccttcgactaatgggccgcaccatcactgccgtcctcactaccttttgcttccagatggtaaacgtctttcccttagcagctcaggctacagctgacagcggttcaggggacaggggtaggcaggggactgtggtatagaaattagcagacctaatttctaacccctctcccagcacttagcagtatgacttcaggtaggtggcttatcacaggcccaagtgttccatccacagattgtaatggtaactctttgcctgcctcaaggaagggccaccagctaaccctttgcatactgtgccattaggctctttggtttaacccactatccaggagcagagtcacttcaaggcaagacagaaaagcaacttagaatgagttaaagaacctaagcctaggccaggcaaagtggctcacacctgtaatcccagcaccttgggaggccaaggcagtcagattgcttgagcccaggagtttgagactaacccgggcaacatggtgaaaccccatctctacaaaaaaaatacaaaaattagccctccagcctgggcaacatggtgaaacaaaaaaaattaaaaattagccgggtggggtggcatgcacctgtggtcccagcatctaaattctcatctcagtttagccctcattttgccaagaagccttgagcaacgctcttcccattacaggttttcagcacctccatttgtaggaatttattaaggcttttaatgatgggatgaggagaaaggaaaaaggaaagagaacattgaatttcagagcaaggagaagaaatagtagtgatgctagaataaatacttctgcctctcctaggcctaccttctggctggatactattacactgccaccggcaactacgatatcaagtggacaatgccacattgtgttctgactttgaagctgattggtgagtgatggtcactgcctgccttccttacatgtaggtccctcccccatctcactaaaaacttcctcggcaccccccctccgccccccgccatacacttctggctgcactcagtctacaggccacatcctcagtgtcctctcccaccaccctacccatccgttctctctctgctcaggtttggctgttgactactttgacggagggaaagatcaggtaagtacccattcatcggcagagaggttcaagacttaatgaaagggaagaaaaaagttgttaacaaaagactgaacccaaattccagagcggagcctctccctcattccccagcctgtgcaatctccctttcagatagcactgagcaaggatcaacaaatctaatttgcccaggatccagctcttgcacaaagtccagagatcaatgccagcaaggcatttgctaaagcagcaacagccagctatgcacacacatacgcatttccacaagaagcaactatttgtcatcccccaaagagaaggctatttgaagaaccccagtcagtggggcacacaggtggggaacactcaaagtggctcttgtggggagattcaaggctatcctgaaccatgcattctcttcttggcatagaattccttgtcctctgagcaacagaaatatgccatacgtggtgttccttccctgctggaagttgctggtttctcctacttctatggggccttcttggtagggccccagttctcaatgaatcactacatgaagctggtgcagggagagctgattgacataccaggaaagataccaaacaggtaattgcccctcttggtccagatgtttgtgtaggtatttcactcactctgaagtgactcttctgaaagctgcattctccagcatgaccctggcatagagacctgagtcatgcaggccctggactgttgtaacaggcactctgtgccaggagtgggccctttttagtttagggttcttccagttatccattctaacactagtacaaacataaaaatccacatttatgccacaggattttgcctgaaccagtcacatttctgcctttaaagcctattttcatgtatatatgaaatatatttatgattgataggtaggtaggcaggttgataggtaggtaggtagatagaggctgggcacagtggtttcacctctataatcccagcactttgggaggccgaggtgggaggatcacttgagcccgtgagttctagaccagcctggcaacatagagagactctgtctctacaaaaaaatacaaaaattatcagacatagtggcatgcatctgtagtccaagctacataggaggctgaagtgggagaattgcttgagtccaggggaggtgggtcaaggctgcagtgagctttgatcacaccactgcactccattctgggcaacatagcaaaatcctgtctcaaaaatatttatcagtaggaaatgcaggagggcacagtggctcatgcctgtaatgccaacgctctgggaggccaaggcaggaggatcactggaggccaggagttcaagaccagcctgggcaacatagtgagaccccatctctacaaaaaaaaattatccaggcaaggtggtacatgcctatagtcccagctactcaggtggccaaggcaaggggatcgcttgagcccaggagttcaaggccacagcgagcaatgactatgcctctgtactctagccggagtggcagagcaaggccctgactctagaaaataaaaattaaaatggtaaaaaaaaaaaaaaaaaaaaagtttaattgccagaagaattccttcactgagaacttgtccatcctgtgtttcagcatcaattcaaccaagaaatgaaggagcagattcaaagtggttatttttattatcttacctccactgggttttcagtcccaatggagattgtgagacctggcaagaccttgagatcagtagcatccctgaggggtaaacacaagactggtccactgtctgctgccctgactttcctacaactcttaagaggtttgcagtccccattcctcatagccagccatagaaatctttccctgaaacaggaaacactttgggcagcagagcttctcatcccattccaggtagacaaccacacccctaaacactcctctccataactgaaggtcagagggtgaagggaatagtctctgctctctgtgaccaggaacttcactcgttcctttccagcatcattcctgctctcaagcgcctgagtctgggccttttctacctagtgggctacacactgctcagcccccacatcacagaagactatctcctcactgaagactatgacgtgagtgtctactaaagcagcagcagcatgactgcaccagagctagaaaatggacaggcaaggatccctacagatagcagagaagtaggaaatatcatctacaagtgcatgttggttttgctctagatctgtgagttgtcaatgccagccgtgctgggacatgttcatcagccagcactgaacaaccttcgcgggcacagggctgtgccaggtgcacatttagcacccgttgccttctctaggagccgctcctagcttgccttatcacatccacgtgacccctcagagcacagcagcttctgattctccatcctattttcttctcttgactgatacatttgggcacttctagggaattcagaaaccaagggaaggggggaagtgctggcttttgctcctgcccagctgaaaggcttgaaaacagttcagtaattctgggcaggtttctctccttaaattaaaatccaatatgggcccctctgtacttaacattccaaatgctcattccaaacactttgccaacgaaggcaaacagtagagaagttaaatacagtgctgcccttgaggctctccaagggaaaggcgaatgaatattctccaggccctctgcttattcctctctgcctattgtgaaggcaatcaggccagactattgagggcatctggcagcaggactcaggcaggtatgaagtagccagccacaagtgtgaaaaggaagagtgctgagagaaactgcctagtcatgtgatatccctaatgcactgtgctttcttccctcaagaaccaccccttctggttccgctgcatgtacatgctgatctggggcaagtttgtgctgtacaaatatgtcacctgttggctggtcacagtaagtagaaaagttgaaacaaggtcctatttagacaagccatgggggccagtatggggagtggcaagagccctaactgagctattccctctcaggaaggagtatgcattttgacgggcctgggcttcaatggctttgaagaaaagggcaaggcaaagtgggatgcctgtgccaacatgaaggtgtggctctttgaaacaaacccccgcttcactggcaccattgcctcattcaacatcaacaccaacgcctgggtggcccggtgagctgctggtggggagcctggaccctggttccttccttccactgtcttcccagattggagggcaggggtgtaccatgtcacccctatgcgtctttcccatctgggcagaaccccctgtcgctcacactgactttgacccccacctatacccccctcccaaaaaaaccattactgtcatatttgaaaaaaaggcaagatataaaagtgcgttaagacctgggtgttactccagctctgccaatggacttatgtcctccactgccctgtttatcaacagctttacttgtttgtccccaccactagagtgtgggcagcttgagtagagtgtctggttcaccactgatctcagcatcagcctcagtcactgctgctgaaccaagtggctcgtgcgcacacggtctccagctccgccttgggtctgctttccatctctaaaagtaatcagtcagcactgcctcctgtaccctctgggggctacacgtgggaacccaccagcactccaatccaatcctcagggtgaggacccagaggcaggtggcgggatgcaaggaccagtcagtttgagggtcgccccacccacccttttctccagctacatcttcaaacgactcaagttccttggaaataaagaactctctcagggtctctcgttgctattcctggccctctggcacggcctgcactcaggatacctggtctgcttccagatggaattcctcattgttattgtggaaagacaggtaggcctccagggtgggggtgaaggggaatataagggacaagatgctgatgagctcctcctccctccccaggctgccaggctcattcaagagagccccaccctgagcaagctggccgccattactgtcctccagcccttctactatttggtgcaacagaccatccactggctcttcatgggttactccatgactgccttctgcctcttcacgtgggacaaatggcttaaggcaagtgaaggcctgcttgtgagactgggagggactcactgcaacctcaaaggttgcaaaggacactccaggcctgtctaccttagtggcctctctctccacaggtgtataaatccatctatttccttggccacatcttcttcctgagcctactattcatattgccttatattcacaaagcaatggtgccaaggaaagagaagttaaagaagatggaataatccatttccctggtaagttaatacagctaaactaaaactaccaccaggttacagaatagagcaacagactggaaaaaaacaatagtattagaaatctggggtgaattccaaggattagcctggctactaaggaacacagtatgggcaatgactactgtgacttattgaggcatgctaggaaacatctggaagggctatagaccaggaattacaggagtaactaaccagccttccaaactcctcttgtcttgcaggtggcctgtgcgggactggtgcagaaactactcgtctcccttttcacagcactcctttgccccagagcagagaatggaaaagccagggaggtggaagatcgatgcttccagctgtgcctctgctgccagccaagtcttcatttggggccaaaggggaaacttttttttggagaaggcgtcttgctttgtcacccacgctggaatgcagtggcgggatctcagctcaccgcaacctccacctcctgggttcaagtgattttcctgcctcagcctcccaagtagctgggaatacaggcacgccaccatgcccagctaatttttgtattttcagtagaaacgggatttcaccacgttggccaggctggtctcgaactcctgaccgcaagtgatccacccgcctccgcctcccaaagtgctgggattacaggcgtgagccaccgtgcccggcccaaaggggaaactcttgtgggaggagcagaggggctcacatctcccctctgattcccccatgcacattgccttatctctccccatctagccaggaatctattgtgtttttcttctgccaatttactatgattgtgtatgtgccgctaccaccaccccccccatgggggggtggagaggggtgcaaggccctgcctgctccactttttctaccttggaactgtattagataaaatcacttctgtttgttcagtttttcaccactagcattcctgactgctctctttcacagttcttctccatcatcagggttctctcctttagcacatgggaatctgggagctaaagcctgccttcaaagcatggaaccaaactgcaaactctgtaacctcctatctgtccctgaagtcccggggaacaaacagttttacaccactggatactttaggaaccccaaaacaaccaggtttgcaagaacagtattcataggataaacaaatagcaaatgtacagccttggcttccccaaactccacagtctcagtgcagaaagatcatcttccagcagtcagctcagaccagggtcaaaggatgtgacatcaacagtttctggtttcagaacaggttctactactgtcaaatgaccccccatacttcctcaaaggctgtggtaagttttgcacaggtgagggcagcagaaagggggtagttactgatggacaccatcttctctgtatactccacactgacctaagaaaagaacagttttgtcagccaactctgtcactcagtagctgtttcagcccttctttagggcaggaaaactatggctgagctagtatttcagctgtgctgttgaatatcaaatccctacaaaggatgaagaaggtcctaactgtgacttccaattatggcagcagccctcaaaggatgtgccctggggcagggtgtggaactgtcatgtgtcttctagctcattgtaagcattgttaaaatgcctactgctctgggaattctatactaagttcagctctaccaagaatttcagggttgagcccagaccttaccttgccatgggcaaaggcccctaccacaaaaacaataggatcactgctgggcaccagctcacgcacatcactgacaaccgggatggaaaaagaagtgccaactttcatacatccaactggaaagtgatctgatactggattcttaattacctaaagtaaaaaagagagaaaagtcagccccagaaacattcccagaaccagccttcaactaacaggtttcaatacctcaccttcaaaagcttctgggggccatcagctgctcgaacactgagcttgtgtaaaagttgaactagaagggggaaaaaagagttcagagctagatggagaccacagtccttctgtccagtcatcgaacaaggaaaaccccatggataagatgagttccctgtgtgctttatatctagactggactcctgaaatgttaggaacaaacagttgccaagcatatggctagctgtacagtgatgggttcagactccctctttcactcagccaggaagctactgcaagaacaggagtggagtttccacaaacatagaaaaataataacagtccttgtcctggtattaatcatgttgttctcccattttctcgcttaaaaatccacatttagttctcccttttcctcttcctcccttcttccctactgacaagttcattctaactttgttctaaggcttcttacccatgaggccacaaaagcggtcaaaggttctgggaattcgggtctggggattcacttcaatcagaacattcttctgtgtatggatataaacctgtagcaagccagctcggttcaggggactatccatcagcatcagcaaactctgagcaaagcagaaaccgagacatggttaaggctgaagagaggcagcactcagctgccaacccttccatacagaggctcaaagggttgtgagcactgtccctggagttacctggtgggtgatatctggccgcgcttccccagggtcccgtccattcttcaacaatatagacttgtgcttgtcacagttgagtagctcatatgtcttccctacctgaagaacagggaacatgacgagagaacagcataagcttctgttacctagccccgtggttcttcaagtgtggtccccaaactaccagcagcagctgcacctggaaacttgttaggcaaattctcaggcccaccctagacctactaaaccaggaacactgggggtggagcccagcaagcccttcgggggattactgtgcagccttatttgcactccccagtgaatggtctgagagggaaacaggaggaagggcacaacctgtgacttcacattatctactaatacactggatttaattaaaaaacctgtggctgttaggcaaggccaatgagacatcctggaactaggcaggagttagtagttagcaaggctgaatgctgtgtttattacaggagcagtaagtaggtactgtgcaaaatatcgagtcaccaccctcagtttgcgtacaccaaacatgcactaagtgaagagctgcaaatctgaacaagaaatgtgaaggccgggcgtggtggctcacgcctgtaatcccagcactttgggaggccgaggcgggcagatcacaaggtcaggagattgagaccatcgtggctaacacggtgaaaccccatctctactaaaaatataaaaaattagccgggcatggtggcaggcgcctgtagtcccagctacttgggaggcagaggcaggagaatggcatgaacccaggaggcggagcttgcagcgccactgcactccagcccgggcaacagagcgagactccatctcaaaaaaaagaaatgtgaaaactaatgatgcaggaggcagtttaatcaaagaaaactctcagaagtaaaaggaagaggggttattcccagttttaagacgggcatgggggcagatgcagtggctcacggctgtaatcccagcactctgggaggccaaggcaggcaaatcacttaaggtcaggagttcaagaccagcctgggcaacatggcgaaaccccatctctactaaaaatacaaaaattagctgggcatggtggcacatgcctgtagtcctagctacttgggaggctaaggtgggaggatggcttgagcccaggagacagagattgcagtgagccaagactgtaccactgcactccagcaagaccctgtctcaaaaaaaagaaaaaagaaagactggcatgagcaaaggtacagatggaatcaagacaaagtagccaggtgtggtggcttatgcctgtgatcccaacactttaggaggccgaggtggaaggatcacttgagcccaggaatttgagaccggcctgggcaacacggtgggaccctgtctcacaaaaaaaaaaaaaaaaattagccaggcgcagtgccatttgctggcagtcccagttactcaggaggatgaggtgggaggactgcttgagccagggaagtagaggctgcagtgaaccatcacaccactgcactctgttgcccaggcaacagagcaagaccctatctcaaaaaagaaacaaaaaagaaaaagtggaaacgaagaaaggaaattttgaggaaaattgggagctgagacactaaagggcagtgattatatatgaagctgctttgtaaaccacagaatcctaatgtatcaagcacaaagccaaaaataattctggagtaagcagggcaggatgggaatgactgacagacactatcctaacaactctctgtacactggaaaagacatcagaagtttgatgttaaagaagtggactacatctgtagcagctaaaagaaataattccaagttgcaatttggagtcccaaggagcattagggtggtcagtaaaaagtctaaaaacaaactgttatatacaaatacaagttttggaaggttaagtttttatgtatcactggaatgtatatgtctagcaacattcttgagatatatggctccaaaaagtctgcgaaaaaagggatgtagattttgaaattgaatagttgaagtaatgtcacagagagcacaaagaacaaatgaccaagaactaagtccatgagacacccttagttatagaagaaaaaaaccttcttgaatgaataatacagtttcaacccattagtaggatataatcatgttttctattcttttaatagattacaggcgcaggcctgtaatcccagctactctggaggctgaggcaggagaatcgattgaacccgggaggcggaggctgcagtgagccaagatcgtgccactgcactccagcctggtagagactgagactccatctcaaaaaaaaaaaaaaaaaaaagtgtatttagaacgaagattaaaatcctggcctgacttctaaaccaatgcgatttcttctgggcctattcaattagttctaacgggtaagagaaaggaggaggaagaacactgcccaaggctttaagatagagaactgctggttctattacatgtggggaaagagatgaatgatagataaaaatgcagatgtaaaagttttaaataataaccaggtctggacagtgtatcataggtggatattagagagaggtgactatggatactaatgaattgaaacacgaagcccttacaaaaagtgtgggcagactaggctacataactacgtttctcatctgcccagtaacttgtcttgggatgtggaatgacgcaaggaacgaaactttcctctgcttagactactataccacagaatcctggtaaaccaattggaagcaaggaggtgagggctagaatatcattcaaaaagagcaaaagaaaatgagtactaccggccgggcacagtggctcacgcctctaatcccaacactttgggaggccgaggcgggcggatcacttgaggtcaggagttcgagaccagcgtggccaacatggtgaaaccccatctgaactaaaaatacaaaaaaattagccgggcgtggtggcacctgcctgtagtcccagctactccagaggctgagtcaggagaactgtttgaaggcgggaggcagaagttgcagtgagccgaggtcgcgcaactgcactccagcctgggcgacagagcgagactccgtctcaaaaaaaaaaaaaaaaagaaagaaaaatgagtactaccatcccaggatgtcaaatcaacgcaaagccaaccaagccaccttccttcaaaagcatctttcacccctctctgctttctacatccactctgggccccttaccctcattccacggagtcccaacctatcgatttactacttctccacttcctgtcccaaactaccttgactgtctccagactggccccttccagcaccacaataagcctacggcctccgatcttgtttcctgcccctagtcggggccgcttgggtggcagagcatcccagtcctgtgcctgctccccaccgcttcgttcacgaggcttgaatccatcactgggcgcggccatcttgcaacaataccggaagttgcgctaacgctcttaaataagaacagcgcggcttctaatcacaaatttccttc

SEQ ID NO: 7562 - DNA, 5775 bp, Homo sapiens
cgggtccgtagtgggctaagggggagggtttcaaagggagcgcacttccgctgccctttctttcgccagccttacgggcccgaaccctcgtgtgaagggtgcagtacctaagccggagcggggtagaggcgggccggcacccccttctgacctccagtgccgccggcctcaagatcagacatggcccagaacttgaaggacttggcgggacggctgcccgccgggccccggggcatgggcacggccctgaagctgttgctgggggccggcgccgtggcctacggtgtgcgcgaatctgtgttcaccggtgagcaacctccgcctgctcgccggacgcttccagtccctcccccaaaccccttgccctgtccccgcgcccctccacgggcctagcatttcctctgagcagcggcctggcctgatcaccacccatctccccacagtggaaggcgggcacagagccatcttcttcaatcggatcggtggagtgcagcaggacactatcctggccgagggccttcacttcaggtaatggcgggcagagcctgctgaccctgacctttcacccttgacgccgacccagcagtggctatagtcggacgtgcaacaggattcaacgctgctcttttcccaccctcctcatccctgcccctaggatagtgggtgctgcgagaacctccagcagcatacaaactgttgttttccagagggacaagagaatctctccttgtctgtggtcgtggagaggagcaggccaaaaaacgcgtggtgaggggaaaccgggcaaggctagtgaaactgcggccttttctttttttttttttggagagggagtcttgctctgtcgcccaggctggagtgcagtggcgcgatctcggctcactgcaacctccgcctcctgatttcaagcgattctcctgcctcagcctcacgagtagctgggattacaggcgcccgccaccacgcccggctaatttttgtattttagtagagacggggtttcactatgtagatcaagctggtctcgaactcctgacctcaaatgatccgcccgcctcggcctcccaaagtgctgggattacaggcgtgagccaccgcgcccggccgaaactgtggcctcttaatacctatccctgtcctctccaggatcccttggttccagtaccccattatctatgacattcgggccagacctcgaaaaatctcctcccctacaggctccaaaggtaggtctgagcacttggtaatcacatggcaggtgggatgatcaaggtagctggcaagaaaccccaggggaatatggtagtgtcaggcctttaggcctctttccacatctgcaagagctgtaacaaaaatacctgcctcctggggtcaaagcagcaaattctgaacacactgtgtttgcgtgctttttactgtctcctccctgacgtgtattcaataagagtattgtttgtccctcgtcttgttcactgcctagatcaaagctttgttttaaagccttttttttctaactgcttgacttactatatctacagttacatccactagtacactctgttctggagaagtttgtccctaagcttgactagttcacctgttctctccttctagaccatacataaaagccgtgcctttgagttccccagacctcttcctcctccccacccacgcacacatatacaccctgggtcaggtagctcacctgtaacctgtaatgtacttctttgtgctatacctagtgcaggtcgcttattcatttactagactgggccctgggaataaaagattcattaaacacaattcttgtcccccaagtccttacaggagacatgattacggtacagcacgaaagcgcccacgttagaggttgcacagagtacagagggggaaagagtagtcagctctgctggtgacggggtttgcagttcaaggcttcacagtgggtgagggtgcatttcagctgtgctgcgtcttgtcttccttgtcagcctgattaactctcctccccccagggtagtgccaggctgtacaccattgcacagggcatacagggaggaacatgaaggagaaaatgcttgggaaagggtgtttggccttgaccagccactgctgacctcaatctcagacctacagatggtgaatatctccctgcgagtgttgtctcgacccaatgctcaggagcttcctagcatgtaccagcgcctagggctggactacgaggaacgagtgttgccgtccattgtcaacgaggtgctcaagagtgtggtggccaagttcaatgcctcacagctgatcacccagcgggcccaggtctgactcccaccaccatctgcgtggtgtcagcctttccttcctaggcccagagtattgggaattaggaaaggcagcttattagaaaagcattgtcaccctagtgccatttccacctaaaagctgtgctaattgccactgtgaaataaggagagccagcattagaactcgatagcactcggtgttaggaagcacagaggaaaatggccaagtcttggcttttcctgcacctcttcgagcagagaggcttatgttacaggtttgcctgacaggaagctaaggcagtgcatgttgtattgagagtgaagggttaggggtcgcaaccttcctttcagctccccagtcccctcaaaccacccctcccttcccctcttcacccctgccctcaggtatccctgttgatccgccgggagctgacagagagggccaaggacttcagcctcatcctggatgatgtggccatcacagagctgagctttagccgagagtacacagctgctgtagaagccaaacaagtgggtgagtcgcaagagccgtggggtgagggcttctgagatgcaggaggaggaaagactccatgggtggggctcctgacccaggacagggtctccctgactctctcccaccacagcccagcaggaggcccagcgggcccaattcttggtagaaaaagcaaagcaggaacagcggcagaaaattgtgcaggccgagggtgaggccgaggctgccaagatgatatccttctgctggagagatctcagcccagcccctagggcacctgagttccccattctccttcatgggcaggctgatgagactaaggcgaatgcgactccgtgctctctggcccttggctccttgttgggggtggggactacagatgagatctgaaatcttagtggtagtacctgagccatgactccccactgtaaggccagatcaatagcattggtggccttgccttcatttctggtgctgcccctagttcctggcagcagcctgcagggaggcccacaggtggggtccacggtagggctgggcacaagccacctgagcgcaaccttggatctgacagcccagaggaggactggagcaagggagtgtggtaaggacagggccagggattgagacctgcccttgcgtgtaccttaaccctcctcaccttggagaagcactgagcaagaaccctggctacatcaaacttcgcaagattcgagcagcccagaatatctccaagacggtgagtgtgtcagcccagcgtctctgatggggctgccttgagaaagtgctttcagttaaggcacattgaggtgagggaattcgaaccttgcttgttccggtttctactcagattggcttctctggccggcgcggtggctcacgcatgtaatccccgcactttgggaggccaaggtgggtggatcacctgaggtcaggagttcgagaccagcctggccaacatggtgaaaccccatctctactaaaaatacaaaagataatgagcccgctgtggtggcgtttagctatattcccagctacgcaggaggctgaggcaggagaatcacttgaacccaggaggcggaagttgcagtgagctgagatcatgccactgcactccagcctgagcaacagagcaagactccgtctcaaaaataaataaataaaaaattggcttctccgatactcctcctgtcaagaatgattcctctgggttccctgaccttttgttctaatcatagctgctgctcagcgctctggatccctaagtgcgagcagaaaccatgtgttactcattgctgcacccctgccctaatctgcatgtgttccatgttaagtagctgctgaattgcaggggtcggaattgaggtctttgcttaatgcaagcatctgtcttatttcctgccctgtagatcgccacatcacagaatcgtatctatctcacagctgacaaccttgtgctgaacctacaggatgaaagtttcaccaggtgagagatgtggccacactgtggggtatcaccaagaacgtgggacctgagtctggttgtttgggctctggagcctgctacagctattcatatggctcagagacattgaaccaaaattagaaaagggggtggttgacagtttctatcttgcatctcataggattgattttatgagatcaaataggattattcacataaaaagcactttaattataaagttttcatctaaccaaaaagtgatgaaagatgatactcagttttcttactcaagagccctcaaactcctctggtgaatggagggatgttaggaaaggagatgagaaatagcagtggccatgagaacatgcctcctcctttcatgagcctgagattcctggctgtcaaccctgtttatcttttctcttgggagcaaaggagggttcaaagctgagtggggcctgaagctgtcaattaacatgtgcatttctcttctctgtttcttgttcatctggcgatctggcaccacaggggaaggtaagctgttgttgcttctgtggggtcctgcaggccaccttctccagtacccgcctcctaccctaccccctttcccacctccccgaagacaaaccctcaatcagggtaggagggtcgtagagggaatggcctagagtgtcctgcctctcacatttatgtcccctaataatgtcattatctatcttttttttcctacagtgacagcctcatcaagggtaagaaatgagcctagtcaccaagaactccacccccagaggaagtggatctgcttctccagtttttgaggagccagccaggggtccagcacagccctaccccgccccagtatcatgcgatggtcccccacaccggttccctgaacccctcttggattaaggaagactgaagactagccccttttctggggaattactttcctcctccctgtgttaactggggctgttggggacagtgcgtgatttctcagtgatttcctacagtgttgttccctccctcaaggctgggaggagataaacaccaacccaggaattctcaataaatttttattacttaacctgaagtcaaggcttcacgtgttcatgaactgggtaactggcagcaagcatgcgcacgttcacatgtgcgctcctgggtctgtctttgtgtgtgccagcagggggcgcaaaagaatctggctggggcggctaaggggaagcaaggcctgggctccgaaacaggacccaagctgggaaggctggccctgagttctcgaggcccagctgtgctcttcacacaccctccatttctcccacatcacccatttttttaaggctggacagccatggctttgctgagccagattaaaaatctgatgaccccaacaggagctgcttccttggcagcagggttccttgtggctgtggggagcctgcctgtgcctgttgaggcacttctgtgcccagaagcccagtggatcgcgtggc

SEQ ID NO: 7563 - DNA, 738 bp, Homo sapiens
ctggagcccggggtcctccgctcaactcaggacgttgaggctgcattgagccaagatcatacctctacactccagcatgggcaaaagagcaagattctgtctcaaaaataaataaataaattttgtttttaattagccaggcatgatggcatgcacctgtagtcccagctattcaggagaccaaggtgggaggatcatttgagcccaggaatttgagactgcagtgaactatgatgatgccactgcattccaacctagatgacagaaggagacctcatctctaaaaataaatatatatattttttccaaccactttttatctataccccaatgtcttacattccataaaacatcatgttttgaattccagtataactttatcgttaaacatgtttctttgcagaagcatgtataagttagggtccacaagattatttgcataagctaatttacaaaaaaaattatataatcactgacatgaaagcatgtctgggcagccatgggagctcatatgaggcgtccagttcagtcgccttttaaaaatgatatttgcattagctgggcatggtagcatgtgtctgtagtcccagctactcaggggactgaagtgagaggatgcaccagagccccagaagtcaaggctgcagtgagccatgatcacatcactgcaccagcctgggcaacaggagtgaggccttgtctcagtcagtcaatcaatcaatcaataatggtatttgg

SEQ ID NO: 7564 - DNA, 1316 bp, Homo sapiens
cttggctggaagtcttccagctctatgaatttatacactgagtcttgtcttgtgtcctcttttcctagcaaacaatatggcatctaaaacccagttctactctgataattttttctttacaagatgctacagtatgatacaccatgcccacctggagagaggataaaggtgatggtggtaggacagaatttccatccgcaatctccgttttgagcaaagaagcatggaggatggaagtcattgctgggaccccggagtagagtggtggtgggggaacagggggaacatcagactgccgaggtatgagtttgggttctcatcttcttcccaggaggcttttgaaaccccaggatgatgcctcctagaggccttgctgtcaaattcaataggcaataacatgaaggatttactcagccaggctcatgagaccagctctgaggaagctgtgcttttcttgtactgatcggtgatgtgcatcaccctaagggatagtaaacagatgaaacccagaaagtccagtcaaaagagcaccctctgggaatgaagatctagtgaagactggggagacagatgaggaaagagtcctgaacaggagccactcattccagctttgtctccatagcctgcccgcccacgatggatgaagtgcgtggaggagacaggcacgttcttcgagcccacgctggcggctttgtttgttcgtgaggcctttggcccgagcacccgaagtgctgtatgtgagagctcttcccagcccacatccctccaccccttcctacccaaagcagccttccctcttctattaactttgactttctcagtggtgtgtgtgattggggaattgggcagtcagagaagggccactgagagagggaacccaaaggcctgctccatccctggtgtggaaacagttcagcttcaggccacaaattctccatgacatgctctcacttggacaagtcacccaactttcctggtcttgtgtttcttcaaccatcaaatgagaaaatcgagccaggctcggtggctcacacctgtaatcccagcactttgggaggctgaggtgggcggatcacctgaggtcaggagttcaagaccagcctgaccaacatggagaaaccccatctctactaaaaatacaaaattagctgggcgtggtggtgcatgcctgtaatcccagctactcgggaggccgaggcaggcgaatcgcttgaacctgggcggcagaggttgcagtgagccgagatcacgccattgtactctagcctgggtgacaagagtgaaactccatctccaaaaaaaaaaaaggaaaattg

SEQ ID NO: 7565 - DNA, 2839 bp, Homo sapiens
ttcctttctccacagatcctttagttgctttagttgagctgctcctctagcagcagctccagcccaggcagctccttggggccaagcccttttccaagggtcagaagctgtgggcagggccaggctgaggcctctcctgatcctgtccccctgtccctggacctcactcccacaggccatgaaattattcactgcgatccgggatgccctcatcactcgcctcagaaaccttccctggatgaatgaggagacccagaacatggcccaggacaaggtcaggccaggcgtcctggctggtgtgggagcctgtgcagggaatggagtattggaacaagcgagatggggattggaagcaaatgccaaaggcccccccaggcacatgctaagtagggaagccactgggctgtatactcacactggcaacaatgtgagaggctgggacagggcaacgagtgggagaaatttcctctggtagactcggagagtattcctagcctcttctgtgtctctctccaggttgctcaactgcaggtggagatgggggcttcagaatgggccctgaagccagagctggcccgacaagaatacaacgatgtgggtccctgtgttttccagctccttttcagtccttgacttctcgtcacttctctgaccctcctaagtctttgttggacaatcagttttccctgggtgacttagctctgtccttactctggtgctggctggggttgatggggaaatatccacactgtacgtcttgctggcagaagaacagaatcttttcaggtcccaacgcatgtgccaacacacatgcatgcatcctgtgacttgtctgggcgtgttcatctgtgtgctgatatgtgtaaagcctgggtgtgctgtgtagtgatgccattgggctgctctctcctaatccctggatgcctgcctgtcagggcttgcctgtttggggtcaaatggtcccattggtgtttgtcagcgtgcatctatagaagtctctgtgtgcccaagtcacctcctgcctcttccccagatacagcttggatcgagcttcctgcagtctgtcctgagctgtgtccggtccctccgagctagaattgtccagagcttcttgcagcctcacccccaacacaggtatgacagcaggggagacacaggcactccatcccagagagacccatccatgattcacaggaaaggaagccagggctcagggcaggcagcatgaacagtaatggtagttgggagggactgtgtaggtctcagggtggcagggcaatacgtggtgggggctggagttcacatgtcctcttcccacaggtggaaggtgtccccttgggacgtcaatgcttactattcggtatctgaccatgtggtagtctttccagctggactcctccaacccccattcttccaccctggctatcccaggtatgggtcactctgtaagggtaggtagggagtttcccaagaggggccgacaggtgttatgatggatgggacttacggttggagaattggggtcacaaatgctgagagattctgggggtcaaataagcccttgtctccctagagccgtgaactttggcgctgctggcagcatcatggcccacgagctgttgcacatcttctaccagctctgtgggtaacaggggccactgggaggtgggataatagggaacctaagggaagaccacaagggaggcctggaggggaaagggaggttatttgagggtttgaggtggggcagtcctgggaactttgccatgctcctgggagctgattcagtctgtggtaccacccacatcctcacctaggcagcaccaaccctatgttctcttgctgtatgttctcttgtcccattttcaacagtactgcctgggggctgcctcgcctgtgacaaccatgccctccaggaagctcacctgtgcctgaagcgccattatgctgcctttccattacctagcagaacctccttcaatgactccctcacattcttagagaatgctgcagacgttggggggctagccatcgcgctgcaggtatgcaagtgtcaagggccacagtttatgtgtactggcagactagaaaacatgtcctcaagttttccttccaccattcctgacacaagtacagttgcatggctttctgcccttcgcatccccactgaatagacggcaacttggggatccccctcctaccccagagatcctccattttaggacatctataggtcttctgggaagtactctttcttctggctcagatcaacttagtcagtgcagaaccagtgaggcaagggccatgggttttgggtactgtgtggagggactttcaaatggccacaggtctagagcctgatggcccttctctacccacccctacccaggcatacagcaagaggctgttacggcaccatggggagactgtcctgcccagcctggacctcagcccccagcagatcttctttcgaagctatgcccaggtaggcagcggccacctcccgccacagcttgctttatgtcagttgaacgccttattactgaagctcatggaagtcccctcttcagacactccgtcaaataccccaaaccctcttctgcagatgtcctcactgttatcttttctcttccctccctaccccttggaatcacccctcagatgactacaggttcttctacctaattcagcacccccacaactcaaaaggtagaaaaaactctattcccaagttcctccaggagaggaggagaccaacttttttttcctctcatacccccaaaatacagatgccttaaaaatgagcctgtggttgggcacagtggctcacacctgtaat

SEQ ID NO: 7566 - DNA, 5850 bp, Homo sapiens
aggatcaagtcttccataccagggaccaggccaaaaccagactgccactgcccctacttgggccccactgtccccagaaagcagctgctgtgatcatgggcaatatctttggaaaccttctcaagagcctgattgggaagaaggagatgcgcatcctgatggtgggcctggatgccgcaggaaagaccaccatcctatacaagctgaaactcggggagatcgtcaccaccatccctaccattggtaagagcacagcttggatgtgggctttcacgccggcagctgaggcagggcagggacctattcctggttccccaacctggcctcttctccccaggcaagtccatacaatttgtggggttcagaaaagagggtggtgttgtttagcttactaccaggtgctgaggctgctgtttgcccacctaacctggctctccctgatgcgggaacttccatggcctggcactcaacagctgccctcaggcacggagttggtttcttctctgtgttgtttggaaagcaggtaaaaggctttgatgttcctgccaaaggcttggaattacttgggtttagatctttggtggccaatcttggttacagtttgctgaagggaggtctccctacatttgctatgtagatgggggctccagtcagcattgtcagctggctctgcctttggggctccaggatgccagcttacttccctttcttcactctgcctctcaggccccacatcttagctgaggccgactctggtagccaaagtaccagagcagggctgagtcattttgtaggagggagcaccaaagactgagtggaaaagtcaggaaagttggcccacgttacccaggcaactgtgaacctctcaaccaacttcctcatcctctttgacttctcttaggttttcattttggccttcaggctgctagcttaacgattatcaggtctgaggaagccttagcttttgttccattgttggtgttatggccaccactgggggaaagcagaaccaaactcattgtggtggtgtttgcggggctagtgtttgaggccaagtggccattgcctgttttttttccaaagggttcaatgtggagacagtggagtataagaacatcagctttacagtgtgggatgtgggtggccaggacaagattcgacccctctggagacactacttccagaacacccaaggtatgctcaggcctagcgtgggttggttgggtatgagcagagagtgtggctgtctttgttaatgggtggccaactgttaccctgctgcagctcctgggggcagaagaaagggaggaaagggagcaaatatttggagggtgtcaggcaggtgtggtcttttggttggggggagggggttacctgtcatcttagtgcagcccatgctctgccttcctagggttgatatttgtggtcgacagcaatgatcgggagcgagtaaatgaggcccgggaagagctgatgagaatgctggcggaggacgagctccgggatgctgtactccttgtctttgcaaacaaacaggtgagacttcttcccacccctgaatttgggagacagcaaactggctgtggaaattgttggctcttgggcctattatatggttaacccttttagtatgctctcaatgttagaagcgtgggaaactgagcacttggcttctttatgcccctcttcttgtgccccaccccaagctttatttagcaacatttcagtcctcaggaattgtctcaaatctttctttcatcttgcctgttatctactttaggagaattggcctcactcctgctgtcagacagacctgattctttggtcagtctgaatcacgtctcttgcttccccaccatcctcgtatttggtttccaattcttcagtacagtgacctctagtgctttggatcttgagttctaggtgactaaatccaaagtagctccttaggatcttgttctgggtttcctaaaataaaggaggaggggaaggtgctggtacacatttctttggtagatgggtgttctagaagcctttaaaaaatcctgaggcttctttttatgtgtctcccacgtgctccaggatctgcctaatgctatgaacgctgctgagatcacagacaagctgggcctgcattcccttcgtcaccgtaactggtacattcaggccacctgtgccaccagcggggacgggctgtacgaaggcctggactggctggccaatcagctcaaaaacaagaagtgaaagccagacagccctaacaaagcaccccacccacccctgacatacctactgtcaccctgccccagtcctaccccttcctctccatgcaagtgtggccagggccctgggtatcatgtccacatgcccagcaagagccttgcctcccctgcctcccctcctttttcctgtccacctatatgaccaatccctaattgctgtcctgatgatgagtcattccaatttactggatttaaaacaaaaagttgttacggtttcatggggtggcccctctctctctcaccctctgggtttcgggaggtcgagtggggtattctctttgtttggcagtggttgctgtcctcttggcatctgagtcctttccctgtccccacaagcccttctactccctgtttgcctttcctttgccaccctctccctgttttacatggaaattgcacgggcctctctgtgtttgcgtgcatgtgtgcgcctgtatatacatgtatagagagatatatttgtgggggccggggggagcggggagggggtggagtgaagctcagggcttgcagccaggacactgcccactggagcctgtcatctgccccttccgtgttggtgagattaagggaagaaggtgggagggcattagtcaagccggactgccccagtctttgactggttaccctcctctctgcaggtaggtttttctggatgataggacagatgatggattcttcaccaccattttccttgtactcttctctccacccttcttagggctggaggatggcatttatctctagatgactgttcccaaggagatgccactctgctctgccttactgttgggaaggagagaggaacccactcactcttatcagcttagagtgttcaactgatccttccccaccatcttcagatctgttcctctggagcttgactggggggtggggatggcaagtccatggtgtgtgttagggacccagggcattgggggaagggaggcgaaggcctgaggttttccatcttcattctcttttgttattaggagaaggtgaggcatgggccaatcccattcctgccttccagtgccccaccacccttctgatcttaggggttggatgggtcatctgtccttggtcagaattttctcaccctagtactcctactggcctgaccagggctgactgggtattctaatgaggagctgggaagtggggtgacatagctgaccttagtatcaacccccctcttctccaactcttgttttctagtccaggatatgctaaaggacgaagattttctattgtttccaggccctcagaccatccttgctgtcccttcaccctccatgcccctgccatcctcactcacttctcataaatggatctgggggttagagtggaggaaataaaatcctgaagtggttgtcagtgcttgtgggatgcagtggtcttcaggattctccccgcattattatgtagttgttcagaagctgttgctactgcgtctctctgtctgcagggggcacttgttcctgaggtcctcgcctgggtcctgacttctgtagtttctgtgaagacgtggctgtcctgtgggctcctgtgtgtgctggctgcgccctgagctccgagacagctgcccataacctgctaaggtcagggcccagggccccccacagcatggctgagggaccccttcccagtagggctgtcccaagccccactccatggggccaggtttcctggccacttttgttgatagcagatggatcaatattagtaaccccatccaagattgaactgtgaaagagaggttccaggggtatctccctcagtgccagttacttagtgatgtgttacccaggatgcagcaggtgtgtgcaggtatcttgctctctaggcctgtgtgtgtgtgtgagtgtgtgtgtatatgggtgtgggtgtgtttgtgtgtggtggttgtggggggggtgttggaggttctatttcatttaaaaatgtattcatttccctggccccacagatgcttccctccatactttttatttgctctgtttcctcagatttattttgtcttgccccattgcctctccttccttgaactctttccttttcaatctcaactcattcactgctgttgctcatttgcccttttccatgtattttttcctacttaggattttccactctatctttgtggttcatgaggactttgcctcttctcctgcctcattccctgactttctctagttagatgtcagtcctaaataggttttcctcacttcaggcctcacccctcaccttgtttttttgggggctccagggaccaatctggggctggaaatgttaggaggttgccttggtgctgccccagatctgtccagcagggggcagtaagtgatcttggtagtatccctggctgctaagcccttggcaggggtggtcctttctacattcccattcacttaacagctcttttgggattgggtgtttcattccatttctgcccactccctctcctctcctctctggtaggtttaattttatgctttccctgattccagctttctgcttcctgaggactcccgctccccccaccccaaagtttgtctgtggtgttatagtggtaactgcagttcctcctctggaatgtagactgtatatgtttaataactcaccttctctatccttgctcaaaatgtgggataacgcgatgactgtgaccctggttggaaattaaacttgttttatgcagctttggagccgaccttcatctttgctgtgcagcagccgtgggacagtagtttcatggtgaggggagtcctgtttctggtccctctctccatagtgctccttctttcagcaaaggggtaaaaggcacacttgattgatagagagtaaggttatggaggaacttagtgccactccacactggttatttcttcccatcataccccgcggcgggggagcccaaatgaattgggcatcagagtgtgagggcttcgtgactttcctcctctagttctaaagggtttaaacctgaaatcagctgtatttctcacctgttggtagactgtatggacttcactggctgaagggccctgaacttggagggccccatgtgcctctactctcagatctcctcagccttgcacatgaggtgcttctagtttgaacagagaccccctcactagtctagttctggactttggcagtgaataaacatgaaggataaacgtctgggcagtgtaatgaccttaatccttcttacaactgatggccctgcatcagctctacttcaggcgtgtggtttttcattgtcaggatgccaagcctcatccagagatcccacaaatgtcttgaggaatagaccttttccataaagcctccatcctcccatcgcactcccaccactattctgttcctcccctgctaccagtgtctggctccaggcaaagaaagggatggtgctacctttagggtgggtgaggtctgggtgagccaggcaagccttccccaatcttaatattttcttaagctttgaggacagaggtcttcccagcctgcttttgtgggaaagggataggatttaggcatataataagtttgagagccccaagta

SEQ ID NO: 7567 - DNA, 5852 bp, Homo sapiens
aggatcaagtcttccataccagggaccaggccaaaaccagactgccactgcccctacttgggccccactgtccccagaaagcagctgctgtgatcatgggcaatatctttggaaaccttctcaagagcctgattgggaagaaggagatgcgcatcctgatggtgggcctggatgccgcaggaaagaccaccatcctatacaagctgaaactgggggagatcgtcaccaccatccctaccattggtaagagcacagcttggatgtgggctttcacgccggcagctgaggcagggcagggacctattcctggttccccaacctggcctcttctccccaggcaagtccatacaatttgtggggttcagaaaagagggcagtgttgtttagcttactaccaggtgctgaggctgctgtttgcccacctaacctggctctccctgatgcgggaacttccatggcctggcactcaacagctgccctcaggcacggagttggtttcttctctgtgttgtttggaaagcaggtaaaaggctttgatgttcctgccaaaggcttggaattacttgggtttagatctttggtggccaatcttggttacagtttgctgaagggaggtctccctacatttgctatgtagatgggggctccagtcagcattgtcagctggctctgcctttggggctccaggatgccagcttacttccctttcttcactctgcctctcaggccccacatcttagctgaggccgactctggtagccaaagtaccagagcagggctgagtcattttgtaggagggagcaccaaagactgagtggaaaagtcaggaaagttggcccacgttacccaggcaactgtgaacctctcaaccaacttcctcatcctctttgacttctcttaggttttcattttggccttcaggctgctaggttaacgattatcaggtctgaggaagccttagcttttgttccattgttggtgttatggccaccactgggggaaagcagaaccaaactcattgtggtggtgtttgcggggctagtgtttgaggccaagtggccattgcctgttttttttccaaagggttcaatgtggagacagtggagtataagaacatcagctttacagtgtgggatgtgggtggccaggacaagattcgacccctctggagacactacttccagaacacccaaggtatgctcaggcctagcgtgggttggttgggtatgagcagagagtgtggctgtctttgttaatgggtggccaactgttaccctgctgcagctcctgggggcagaagaaagggaggaaagggagcaaatatttggagggtgtcaggcaggtgtggtcttttggttggggggagggggttacctgtcatcttagtgcagcccatgctctgccttcctagggttgatatttgtggtcgacagcaatgatcgggagcgagtaaatgaggcccgggaagagctgatgagaatgctggcggaggacgagctccgggatgctgtactccttgtctttgcaaacaaacaggtgagacttcttcccacccctgaatttgggagacagcaaactggctgtggaaattgttggctcttgggcctattatatggttaacccttttagtatgctctcaatgttagaagcgtgggaaactgagcacttggcttctttatgcccctcttcttgtgccccaccccaagctttatttagcaacatttccgtcctcaggaattgtctcaaatctttctttcatcttgcctgttatctactttaggagaattggcctcactcctgctgtcagacagacctgattctttggtcagtctgaatcacgtctcttgcttccccaccatcctcgtatttggtttccaattcttcagtacagtgacctctagtgctttggatcttgagttctaggtgactaaatccaaagtagctccttaggatcttgttctgggtttcctaaaataaaggaggaggggaaggtgctggtacacatttctttggtagatgggtgttctagaagcctttaaaaaatcctgaggcttctttttatgtgtctcccacgtgctccaggatctgcctaatgctatgaacgctgctgagatcacagacaagctgggcctgcattcccttcgtcaccgtaactggtacattcaggccacctgtgccaccagcggggacgggctgtacgaaggcctggactggctggccaatcagctcaaaaacaagaagtgaaagccagacagccctaacaaagcaccccacccacccctgacatacctactgtcaccctgccccagtcctaccccttcctctccatgcaagtgtggccagggccctgggtatcatgtccacatgcccagcaagagccttgcctcccctgcctcccctcctttttcctgtccacctatatgaccaatccctaattgctgtcctgatgatgagtcattccaatttactggatttaaaacaaaaagttgttacggtttcatggggtggcccctctctctctctcaccctctgggtttcgggaggtcgagtggggtattctctttgtttggcagtggttgctgtcctcttggcatctgagtcctttccctgtccccacaagcccttctactccctgtttgcctttcctttgccaccctctccctgttttacatggaaattgcacgggcctctctgtgtttgcgtgcatgtgtgcgcctgtatatacatgtatagagagatatatttgtgggggccggggggagcggggagggggtggagtgaagctcagggcttgcagccaggacactgcccactggagcctgtcatctgccccttccgtgttggtgagattaagggaagaaggtgggagggcattagtcaagccggactgccccagtctttgactggttaccctcctctctgcaggtaggtttttctggatgataggacagatgatggattcttcaccaccattttccttgtactcttctctccacccttcttagggctggaggatggcatttatctctagatgactgttcccaaggagatgccactctgctctgccttactgttgggaaggagagaggaacccactcactcttatcagcttagagtgttcaactgatccttccccaccatcttcagatctgttcctctggagcttgactggggggtggggatggcaagtccatggtgtgtgttagggacccagggcattgggggaagggaggcgaaggcctgaggttttccatcttcattctcttttgttattaggagaaggtgaggcatgggccaatcccattcctgccttccagtgccccaccacccttctgatcttaggggttggatgggtcatctgtccttggtcagaattttctcaccctagtactcctactggcctgaccagggctgactgggtattctaatgaggagctgggaagtggggtgacatagctgaccttagtatcaacccccctcttctccaactcttgttttctagtccaggatatgctaaaggacgaagattttctattgtttccaggccctcagaccatccttgctgtcccttcaccctccatgcccctgccatcctcactcacttctcataaatggatctgggggttagagtggaggaaataaaatcctgaagtggttgtcagtgcttgtgggatgcagtggtcttcaggattctccccgcattattatgtagttgttcagaagctgttgctactgcgtctctctgtctgcagggggcacttgttcctgaggtcctcgcctgggtcctgacttctgtagtttctgtgaagacgtggctgtcctgtgggctcctgtgtgtgctggctgcgccctgagctccgagacagctgcccataacctgctaaggtcagggcccagggccccccacagcatggctgagggaccccttcccagtagggctgtcccaagccccactccatggggccaggtttcctggccacttttgttgatagcagatggatcaatattagtaaccccatccaagattgaactgtgaaagagaggttccaggggtatctccctcagtgccagttacttagtgatgtgttacccaggatgcagcaggtgtgtgcaggtatcttgctctctaggcctgtgtgtgtgtgtgagtgtgtgtgtatatgggtgtgggtgtgtttgtgtgtggtggttgtggggggggtgttggaggttctatttcatttaaaaatgtattcatttccctggccccacagatgcttccctccatactttttatttgctctgtttcctcagatttattttgtcttgccccattgcctctccttccttgaactctttccttttcaatctcaactcattcactgctgttgctcatttgcccttttccatgtattttttcctacttaggattttccactctatctttgtggttcatgaggactttgcctcttctcctgcctcattccctgactttctctagttagatgtcagtcctaaataggttttcctcacttcaggcctcacccctcaccttgtttttttgggggctccagggaccaatctggggctggaaatgttaggaggttgccttggtgctgccccagatctgtccagcagggggcagtaagtgatcttggtagtatccctggctgctaagcccttggcaggggtggtcctttctacattcccattcacttaacagctcttttgggattgggtgtttcattccatttctgcccactccctctcctctcctctctggtaggtttaattttatgctttccctgattccagctttctgcttcctgaggactcccgctccccccaccccaaagtttgtctgtggtgttatagtggtaactgcagttcctcctctggaatgtagactgtatatgtttaataactcaccttctctatccttgctcaaaatgtgggataacgcgatgactgtgaccctggttggaaattaaacttgttttatgcagctttggagccgaccttcatctttgctgtgcagcagccgtgggacagtagtttcatggtgaggggagtcctgtttctggtccctctctccatagtgctccttctttcagcaaaggggtaaaaggcacacttgattgatagagagtaaggttatggaggaacttagtgccactccacactggttatttcttcccatcataccccgcggcgggggagcccaaatgaattgggcatcagagtgtgagggcttcgtgactttcctcctctagttctaaagggtttaaacctgaaatcagctgtatttctcacctgttggtagactgtatggacttcactggctgaagggccctgaacttggagggccccatgtgcctctactctcagatctcctcagccttgcacatgaggtgcttctagtttgaacagagaccccctcactagtctagttctggactttggcagtgaataaacatgaaggataaacgtctgggcagtgtaatgaccttaatccttcttacaactgatggccctgcatcagctctacttcaggcgtgtggtttttcattgtcaggatgccaagcctcatccagagatcccacaaatgtcttgaggaatagaccttttccataaagcctccatcctcccatcgcactcccaccactattctgttcctcccctgctaccagtgtctggctccaggcaaagaaagggatggtgctacctttagggtgggtgaggtctgggtgagccaggcaagccttccccaatcttaatattttcttaagctttgaggacagaggtcttcccagcctgcttttgtgggaaagggataggatttaggcatataataagtttgagagccccaagta

SEQ ID NO: 7568 - DNA, 171 bp, Homo sapiens
cccaagtgttttctttcttcttcttctttttttttttttttttttttgagacggaatttggtcttgttgcccaggctggagggcaatggcacgatatcggctcaccacagcctctcctcctgggctcccgggttcaagcaattctcctgcttcagcctcctgaggagctgg

SEQ ID NO: 7569 - DNA, 409 bp, Homo sapiens
aggctgttctcaaactcctgacctcaggtgatccacccgcctgggcctcccaaagtgctgggattacaggcgtgagccactgcgctcggcctcagcaggtatttgttatgtgcctaccatatgccaggcatagcatccagtctgagtgagctttcagtaaagtcagtagagaccctggggattagttcagtttttgaagtactgtgtgctaggcactattcttggtactggagacagagcagtgaacaaaacacataaggagctgatatcttaggcagaataaaacaatcagcaagaaataaatatataatgtatcagatggtgataaatgttgtgaagaaaagtaaagtgggataaatggggtagggagtggtgtgtgtctgtgtgtgtgtgttatacatgtggttgt

SEQ ID NO: 7570 - DNA, 171 bp, Homo sapiens; identical to SEQ ID NO: 7568

SEQ ID NO: 7571 - DNA, 409 bp, Homo sapiens; identical to SEQ ID NO: 7569

SEQ ID NO: 7572 - DNA, 4196 bp, Homo sapiens
caagagattggagcctatttagtggattttatgcagccaaagatgtttcttgttgttgttgttgttcttgcttttaactaatttgcctcccaggagacagttgaaatgtctagagacattttgattattatgcctggcaggacgccactagtggcatctagtggatggagggtaagggtgctgctaagcgtcctcccatacacaggacagcaccccccacaaagaattatccaaccccaaatgtcagtagtgctgaggctgagaaaccccactctgctctctaaccaaaattagacacagaaagtggagacattctaccaccctgacaacatcaatggcttttgcccatttaaaacaagaaagaggaatatgtatccaacccaaaacaacatcttaacattctttctaataggcttttgcaaaaatagttcatattttataactgtcttgcagcatggggtataagtgtaatcattgtaaaaatgaaacctaatcattgtaaaaatgaaacctaatcatggtaaaaatgaaaagagtgcctcaaaacatctgaagttcttagcagagggcagcctgtcttcagtgggcacttttggatggaggcaggactagggtatcagtaggagtgagaacaaaggtcagaaaaatgagtacacagcacatgtatactgattaatttctttcttttttccttcttttgatggagcaagactgtaacagaagcctgagagtgaggaagggctttgccaactattactgtagacacagtagtttactcaattttatgaactcttagtcctgggctggaattcacgcctctgctggaattgcacagacaaaacgtgcttgcgaggagtaaggtggcaacaaaagaaaaatgcaggcaaaaacacgcctcattttgaaaccggatctgagcatcctagagccagagcctctcccagccaacattgctgagttgagcagagtgacagactccacactggagccagccccgcagctggccataaggaggagccacgagcaggtgctgggaagacaggctcttgaacgcacactatgctgatgtctctttctgtgaagttttctacatgagtgacgttctcaaagtctgcaacacagtctgccatgagatgccttttttcctctgggaacacaatgctactttcgtgattggctgagtaatggcccccaaagatgtactcttcatcctaatccctggaacctgtaaacatgttaccttatatggcaaaagagacttcgggcaggcacctgtcatcccagatactcaggaggctgaggcaaaagaatcgctcaaacctgggaggcggaggttgcagggagccaagattgtgccaatgcactccagcctgagcaacaaagtgagactctgtctctaaaaaaaaaaaaaaaaaatttctcagatgtgactcagtgaaggattttgagatggggagagtatcttggattagccaggtgagcctgatataatcacagagtccttataagagggacaaaggaagagtcgattagaaacagaccatgtgatgacagaaacagagggaggtcagaggtgaaaaagagaagatgctgcagtgctgcctctgaagatgaaggaaggggccatgagccaagggatgcaggcaacccttagaggccaggaaaggcaagggaacggatgctttcctagagcctccagaaggagcacagcctggtcaacactgatttgagccccataagactgagctcagtcttctgacttccagaactgtaagagaatagattcgtgttgtttgcactttatggccatttgttacaggagcaacaggaaattaacataccatgtttgggccaggtgcagtggctcacaggtgagcctataacccccagcactttgggaggccaagatgggaggatcgcttgaggccaggagttcaagaacagcctggacaacatggcgaaactccatctctataaaaaatgcaaaaattagccaggcatggcggtgcatgcctgtagtcccagctcctccggagactaaggtgggaggatcgcttgagcccaggaggcaggggttgcagtgagccaagattgtaccactacactccagctggggcaacagaatgagaccctgtctcaaaataaaaacatatcatgtttgaagaaccaccaataggtatcttgctctgtgacttgtgatccttaagtcaacatatatatatatatatagtcacaggaagtcgatacatatatgggataatcaccaatctctaagatacatagcatgctcataaaatagccaagctctgtgctgagagacaaagacataaggctcattggtaacggtggtaatagcagctctcggtctgagcgatgtttggcatctgaagtcaccattagcattttcagagaagtccagctttttaccatataaccattcattctgtcttccaatgtgatccttaaggaaaaaaaaaattcccccatagtcgtgtgatgtttaaaatgtgtttattataccttgcctgtcatttttctggcttttagctaaaatgttttgaattgagtggtgatattcccgacttaactctgaaccctctctattcaggtctgtgagaactcctgacgtctgaagcttgactcccaagtttccatagcaacaggaaaaaaaaaaatctatccaaatctgaagattgcggtttacagctatcgaacttcacaactaggcctcaattgttccggttttttattttctttacaatttcacttagtctgtacttcatcattttgacagcatcttcctccctcctttaattaatggaatcttctgaattttccctgaatgtttaaagatcatgacatatgacttgatcttctgggagcaggaacaatgactactttttctggtgtgttaacatgtcgctagccagtgctccaggcacccagctttgtctgtgggttagtattggtgtatgtatgagtatctgtatgtatatatacacggtatttatagagagagactatcctggagaagcctcgttttgatgccattcttccttgcaaggttaagcaaggtgggtggaaactaagacacctgaaccctccagggcctcccgcatcaaggtcagcatgaggacagaccacagagctgtcacttttgctccgaagctacttctccactgtcccgttcagtctgaatgctgccacaaccagccaggcaggtccacagagagggagagcagagaaagaagtcctttctctttattgagttcgaggactacaaccaatttacactgccatctgatgccgtgatcctgagccaaggaggtgaggagcagagcaggcaatttcaccaccaaatgccaagaaaagggctgacattttctttcatgggcaccaacctgcatttgtatgtgtcccgaatccacagtcgtactgattctaatggggacacagatcatggtagagaatctctccctcctcagtaaatgtacaactgcacctgtcatcatggaggtcatacatgcatacaaagaggtgtacaggtaccatcttgtatacacatatatacccacatgtacagacatacatttatgcacattcacgctgtttgtttcatatatacaggcataaaatagagtaaatacaggtagttttaaaagtacccttttgtgtgaattgactaccgttgtttgcaaacccgaaaataaaagacgttcattatgtatgaaaagtaactgatttgtattctgtgagcatgtaaaagcggaaagttagtgcttgttctaagattaccttcttgttgataaaccataaatgaatcatcaaagctcacaccaaatttttctatcaaataaaactagtgacagcttgtggctttttattagagctcgccacgaactagggtaaggtgagtgtcttagcatattttaatgcagttgcttactaaaggttttaaccgcacatgcacacacacacgctttcttatgcaatctatgtttgcacttgtgctttcagttagccttctgtaggaagtagaagtcatatgttgtctttgttgtagtgaaattatacagatagagttccatatattgtatttgtttcaatggtaaatccttttggaacatatagaatgcagagatttttttttccattaaaataaatgggtattggtggttaaaactgctggacagtaa

SEQ ID NO: 7573 - DNA, 4200 bp, Homo sapiens
caagagattggagcctatttagtggattttatgcagccaaagatgtttcttgttgttgttgttgttcttgcttttaactaatttgcctcccaggagacagttgaaatgtctagagacattttgattattatgcctggcaggacgccactagtggcatctagtggatggagggtaagggtgctgctaagcgtcctcccatacacaggacagcaccccccacaaagaattatccaaccccaaatgtcagtagtgctgaggctgagaaaccccactctgctctctaaccaaaattagacacagaaagtggagacattctaccaccctgacaacatcaatggcttttgcccatttaaaacaagaaagaggaatatgtatccaacccaaaacaacatcttaacattctttctaataggcttttgcaaaaatagttcatattttataactgtcttgcagcatggggtataagtgtaatcattgtaaaaatgaaacctaatcattgtaaaaatgaaacctaatcatggtaaaaatgaaaagagtgcctcaaaacatctgaagttcttagcagagggcagcctgtcttcatgtgggcacttttggatgtgagtcatggactatgggtatcagtaggagtgagaacaaaggtcagaaaaatgagtacacagcacatgtatactgattaatttctttcttttttccttcttttgatggagcaagactgtaacagaagcctgagagtgaggaagggctttgccaactattactgtagacacagtagtttactcaattttatgaactcttagtcctgggctggaattcacgcctctgctggaattgcacagacaaaacgtgcttgcgaggagtaaggtggcaacaaaagaaaaatgcaggcaaaaacacgcctcattttgaaaccggatctgagcatcctagagccagagcctctcccagccaacattgctgagttgagcagagtgacagactccacactggagccagccccgcagctggccataaggaggagccacgagcaggtgctgggaagacaggctcttgaacgcacactatgctgatgtctctttctgtgaagttttctacatgagtgacgttctcaaagtctgcaacacagtctgccatgagatgccttttttcctctgggaacacaatgctactttcgtgattggctgagtaatggcccccaaagatgtactcttcatcctaatccctggaacctgtaaacatgttaccttatatggcaaaagagacttcgggcaggcacctgtcatcccagatactcaggaggctgaggcaaaagaatcgctcaaacctgggaggcggaggttgcagggagccaagattgtgccaatgcactccagcctgagcaacaaagtgagactctgtctctaaaaaaaaaaaaaaaaaatttctcagatgtgactcagtgaaggattttgagatggggagagtatcttggattagccaggtgagcctgatataatcacagagtccttataagagggacaaaggaagagtcgattagaaacagaccatgtgatgacagaaacagagggaggtcagaggtgaaaaagagaagatgctgcagtgctgcctctgaagatgaaggaaggggccatgagccaagggatgcaggcaacccttagaggccaggaaaggcaagggaacggatgctttcctagagcctccagaaggagcacagcctggtcaacactgatttgagccccataagactgagctcagtcttctgacttccagaactgtaagagaatagattcgtgttgtttgcactttatggccatttgttacaggagcaacaggaaattaacataccatgtttgggccaggtgcagtggctcacaggtgagcctataacccccagcactttgggaggccaagatgggaggatcgcttgaggccaggagttcaagaacagcctggacaacatggcgaaactccatctctataaaaaatgcaaaaattagccaggcatggcggtgcatgcctgtagtcccagctcctccggagactaaggtgggaggatcgcttgagcccaggaggcaggggttgcagtgagccaagattgtaccactacactccagctggggcaacagaatgagaccctgtctcaaaataaaaacatatcatgtttgaagaaccaccaataggtatcttgctctgtgacttgtgatccttaagtcaacatatatatatatatatagtcacaggaagtcgatacatatatgggataatcaccaatctctaagatacatagcatgctcataaaatagccaagctctgtgctgagagacaaagacataaggctcattggtaacggtggtaatagcagctctcggtctgagcgatgtttggcatctgaagtcaccattagcattttcagagaagtccagctttttaccatataaccattcattctgtcttccaatgtgatccttaaggaaaaaaaaaattcccccatagtcgtgtgatgtttaaaatgtgtttattataccttgcctgtcatttttctggcttttagctaaaatgttttgaattgagtggtgatattcccgacttaactctgaaccctctctattcaggtctgtgagaactcctgacgtctgaagcttgactcccaagtttccatagcaacaggaaaaaaaaaaatctatccaaatctgaagattgcggtttacagctatcgaacttcacaactaggcctcaattgttccggttttttattttctttacaatttcacttagtctgtacttcatcattttgacagcatcttcctccctcctttaattaatggaatcttctgaattttccctgaatgtttaaagatcatgacatatgacttgatcttctgggagcaggaacaatgactactttttctggtgtgttaacatgtcgctagccagtgctccaggcacccagctttgtctgtgggttagtattggtgtatgtatgagtatctgtatgtatatatacacggtatttatagagagagactatcctggagaagcctcgttttgatgccattcttccttgcaaggttaagcaaggtgggtggaaactaagacacctgaaccctccagggcctcccgcatcaaggtcagcatgaggacagaccacagagctgtcacttttgctccgaagctacttctccactgtcccgttcagtctgaatgctgccacaaccagccaggcaggtccacagagagggagagcagagaaagaagtcctttctctttattgagttcgaggactacaaccaatttacactgccatctgatgccgtgatcctgagccaaggaggtgaggagcagagcaggcaatttcaccaccaaatgccaagaaaagggctgacattttctttcatgggcaccaacctgcatttgtatgtgtcccgaatccacagtcgtactgattctaatggggacacagatcatggtagagaatctctccctcctcagtaaatgtacaactgcacctgtcatcatggaggtcatacatgcatacaaagaggtgtacaggtaccatcttgtatacacatatatacccacatgtacagacatacatttatgcacattcacgctgtttgtttcatatatacaggcataaaatagagtaaatacaggtagttttaaaagtacccttttgtgtgaattgactaccgttgtttgcaaacccgaaaataaaagacgttcattatgtatgaaaagtaactgatttgtattctgtgagcatgtaaaagcggaaagttagtgcttgttctaagattaccttcttgttgataaaccataaatgaatcatcaaagctcacaccaaatttttctatcaaataaaactagtgacagcttgtggctttttattagagctcgccacgaactagggtaaggtgagtgtcttagcatattttaatgcagttgcttactaaaggttttaaccgcacatgcacacacacacgctttcttatgcaatctatgtttgcacttgtgctttcagttagccttctgtaggaagtagaagtcatatgttgtctttgttgtagtgaaattatacagatagagttccatatattgtatttgtttcaatggtaaatccttttggaacatatagaatgcagagatttttttttccattaaaataaatgggtattggtggttaaaactgctggacagtaa

SEQ ID NO: 7574 - DNA, 200 bp, Homo sapiens
gtccgtcgtacatctctggttggtgagtgagtctatgaagacagaagtaccagttctcagcatgggccatggactcatcttgtccacctcatgatatgatctgagggtgtcataatcagctataaaggtaattgcatactcaaagatgagacggaccattctcagttgatgaccacattaagcatagtcatggccatctg

SEQ ID NO: 7575 - DNA, 200 bp, Homo sapiens; identical to SEQ ID NO: 7574

SEQ ID NO: 7576 - DNA, 1217 bp, Homo sapiens
ccagaaataaatggcctaaatggaggaggaaagacccaaagtcttcctctaatgtgttctgtctccaagcagtgaagagaatgctttggttttaaactagttaatcagaatgatatagccctccttcctggaatgaacctttctcactgccccccttctccaactgttggtatgtctcaatagttccttccccacatatgcaagaggctgccagaatcttagaaatagcagcctggtcttcagaaactctcccctagttcctacctttcctcctcctcccctgctctactctctcctcactgtctaagactattctgagttgtggatactggacactgtattttgaaccagttctttggctctcttctcagccacctgatcatttattaggcatatctctttggtggttcatcctactttctctccagatatcatctggattcctggtatatctttgtgggggtggggagcagccctaccctgtaactgtaccttgtccagctcctcaaatccaagtttctcagaacccagggcttgaaaggaaagattcaacactaaagctgtagctaataaacacacagggttggaagttacccagcctacttgtagacatagaaaccttggccagaaaagcaatgacttgtccaagtcactaagaatagtaaatgaaacagaactgaagtcccacagtgtctggttattgtttttaatgtaaatgtactactgtactatagcatacatacacaaaggcaaacaaatcagaaatatacagattgagtctctgaatgaagtttacattttggttctgaggatgaagctcggaattttttatcttgcccaaattcctatctaaggggtctggggagtatgccctagaaaccacaaattctcatcacatgggttttatttaaccttgtatatcatgacttattttccaatctgactttggcataacaaggaaaaaaatcaaaatgttttaccccaaaatatatttccttgccataccttgaaattgccctgcaaagtctctcgtgggaaaaatccacattatatggagaatctccttccccctttgttttccttcctctctttccagatctgggagataatcagctaagagccaggcacccttttaggtctgataagaaacattttacaacctgctcgctctctgaagtctgctttctgagagattcctctgcacaatacaacttggt

SEQ ID NO: 7577 - DNA, 1287 bp, Homo sapiens
gtgaatggcatagatgttgttcagatttactttgaaagaatcaagtatgtgaatggatggatgaatggaattgtgaagcacagatgagctctttcacactccaaggacacagctcatcctatgcttttggacacttcttccctgtttattacaatgactattctccaggttgttgcactaccgctgtatctgtacataattctaacttggcacctgtggccttttttgtgctcttatgtgtctgtatttcccggcagagtatacgcccttgaatgccaggaacttgtttccttagtcttttttatatatctagcatataagatattgcttagaatatggtagacatcactgaagatttgtttcagtagttcatattttgtaatgatactgaatggttaaacaatccctttctaatctgtctagcatatatgtgacttttgtttatcaagtgtcacacaactgcttcaaggcagctgtgagatactagaaagcaaaaattcttactcctatgtctgtgtcatcccagatgtgtgcctccagatggcagtatactacactatctgtaaaatatatttgcaaagccaggcacagtgttacgcgtctgcctcaggaggctgaggcagaagaatagcttgagcccaggagctttagtctagcctgagcaatataatgagactccgtctcttaaaatatttgcccaaacattgaacctaaatttgaccatgcccctagaaataattcctaatctttagaaaatagggcagagaaacattattttacaccatggagatgagatcagcagaatccagactataagaaactacaggacacatgacctagtttcttctgtaaataacttgcaaggatgaaagatggaggatgaacctatagatttaaagagacttaagagacatattaaccaattgttaattggatcttatttgaattgtgatttgaccgaactgtaaaacgaatacatttatgagacaatcggggtaatttgaacattggtggggtatttggtattagaataatggttttatcattatgttagaaagaagggtcctcatctacattctcaaacatctgtggctgatatgatatgattcttggaatttgcttcaaaataataagtctggatgttaagtgcattggaaatattgatgaaacgaaattggccttgataattgttgaagctgggtgatggctaaaatgatggttcattatatatgttcatctctatttttgtatgtttggcattttccgtaataaagtttataaaaataa

SEQ ID NO: 7578 - DNA, 4158 bp, Homo sapiens
gtgcacgccgaatatctggagaaactaaagctgggcggttccccaaccaatggaaactccatggccccatcctcgccagatagcgatccctagtatgtaccgcttgcgcccgcacagacttctgtttgtctgccttgcttaaaatgcatcccgcctggagcacctctcgtaccatgtgcggtctcatgggcaggagggaggcttttgtttccttggcagaccctctgaatcacgcttgcaaactgttgccaggccctgttttcagttggcacgtttttcagttgctttcaaaatcgcttcttggttaccctgtaaaatgtttcggagaagcctatgccgcttggggttttaggtgctgtaactgttcaccctgcttttgggcggggggggggggggtggggggccaggggtgggcggggagtgtgtgtgtctgcctgtgcgccctgtggtgtttttggttcttttatatttcacacatattcgggggtgcgtgcccctttttgataccccccttgtggtttgtttggtagtggaggcctttaaagtctgaccagcttggttgtgtggcatcttttagtatttttttcccttgagttgttttctccttcacagcgttcgcccttgttgtcagggaggccttctgtggtgggagttggtttaaaaaatcagttttgaattcgtaaaaacattaggaaatcctacatcttgtgctctttctgcactcgacagtcgctctagcctctgaagtggtatctcatttgcccctttcagaaatttctttttctatttctatgtaggtcatttggttttcaaaaaattttcacaagtaatttttcactgctgactttaaatcgctatttcccatgtagattaaccttactgaatagatgctgctggggatctgctagccaaacgcatctgatcagaaaaactgtattcacagaatttgatttcccatactcaacttccaactcccattgccccttactggataccatagaagaaccatggttctctggatttaagtttgtttttgaaagaaagtggtttccattccatatttgaatgtagtgacattccgcttaacctccctgactcccagtaaccacaggaatggaatcttttgtggtgattacatcccaacagagttagctctagcgatgttcagctggtacagaattgtcaaactattaggattcctgaacaatctctcaatgatagagagtaattgttttgtctcacagtaccaccttttctgggtgccaaattaaaagctctcacgtttgcctcagtacttgcttgaagtcaggaatcccatctagaatagctaaatctctcttctggaccttccgctgttcccccagccatgtctgacattaggtagaaggaaaacctattttgtgaagagggtattcgaatgaaaagatcattcctaatttctagagcaacctagactatgtcatatctcttaaacattattgacaggtattggggtcccttaacttttttttttgagatggagtcttgttctatgggtcactgttacgcactttctattaagaaattttgggtttcgctatgtaaattctaggttcctcttctggatttcatctcccatgacagttgaggaaatgtctagtttttgaagagagtatgggtgggggctgggggaccgggcgcggtggctcacgcctgtaatcccagcactttggaaggccgaggcgggcagataacgaggttaggagatcaagatcagcctggccagcatggtgaaaccccgtctctactaaaaatacaaaaactagctgggcatcgtggtgtgcgcctgtaatcccagctactcgggaggctgaggtaggagaatcgcttgatcccgggaggcggaggttgcagcgagccgagatcgtgccactgcactccagcctgggcgaccgtctcaaaaaaaaaaaaaaaaaaaaaagactgattttccccctcgtccctgtcccccaatggacaagtgcctactttttcttattctaaaaaaaatttgaagacgacatgttggagtaaaggtaagtttggttgcttgatacagaatttgctctggatggttaacatattttctaagaaacctatgttctgttgatcaggtcacctttgaaagaagtaaccctgaaaggggtgaaaggtggccataaatatttttaagtcctgtagaaaattgataaaaattgaagtgtgtatgtgtaagagcttgtaaagaaacagcaacattagagggcccttgtgggatagatggtttaaagggctctgatgctggagctgctccttgtctcacttgcctttaagtggagttcaattgtaagaaaaagcatgtcctccctccatagttgttgactgggaaaagggagattagagcttacagcactaacagctggccagagttttatttttcagagttccttttgtggaagcatcagtcaaaacaaatattctcagcatcattcttgtattgcaatcatctttctgaatgactgttggcctattagaatatggactttttgaggactaggacccagactgaatcctcccccatatcctcagagcctagaacagtgcctgaaatttggagacatttgtctttgatccacagattagaaatgtctacaagtgtattcccgatttctgagcttcataatgtacctgggacaatctgttattccctcaggctctcatctggcctcacagtgaaactgcattcgataattcactgaaggcttttccaattcaaaatggttgatgagccatagtaggtgctcaataagtatttgttgattagaggaatggatgaaccaataaaaccctattaataagaatttttctttttaggtgaatggcatagatgttgttcagatttactttgaaagaatcaagtatgtgaatggatggatgaatggaattgtgaagcacagatgagctctttcacactccaaggacacagctcatcctatgcttttggacacttcttccctgtttattacaatgactattctccaggttgttgcactaccgctgtatctgtacataattctaacttggcacctgtggccttttttgtgctcttatgtgtctgtatttcccggcagagtatacgcccttgaatgccaggaacttgtttccttagtcttttttatatatctagcatataagatattgcttagaatatggtagacatcactgaagatttgtttcagtagttcatattttgtaatgatactgaatggttaaacaatccctttctaatctgtctagcatatatgtgacttttgtttatcaagtgtcacacaactgcttcaaggcagctgtgagatactagaaagcaaaaattcttactcctatgtctgtgtcatcccagatgtgtgcctccagatggcagtatactacactatctgtaaaatatatttgcaaagccaggcacagtgttacgcgtctgcctcaggaggctgaggcagaagaatagcttgagcccaggagctttagtctagcctgagcaatataatgagactccgtctcttaaaatatttgcccaaacattgaacctaaatttgaccatgcccctagaaataattcctaatctttagaaaatagggcagagaaacattattttacaccatggagatgagatcagcagaatccagactataagaaactacaggacacatgacctagtttcttctgtaaataacttgcaaggatgaaagatggaggatgaacctatagatttaaagagacttaagagacatattaaccaattgttaattggatcttatttgaattgtgatttgaccgaactgtaaaacgaatacatttatgagacaatcggggtaatttgaacattggtggggtatttggtattagaataatggttttatcattatgttagaaagaagggtcctcatctacattctcaaacatctgtggctgatatgatatgattcttggaatttgcttcaaaataataagtctggatgttaagtgcattggaaatattgatgaaacgaaattggccttgataattgttgaagctgggtgatggctaaaatgatggttcattatatatgttcatctctatttttgtatgtttggcattttccgtaataaagtttataaaaataa

SEQ ID NO: 7579 - DNA, 322 bp, Homo sapiens
cagattttttttttttttgagatggagtcttgctctgtcacccaggctagagtgcagtggcacgatcttggctcactgcaagctccgcctcccgggttcacaccattctcctgcctcagcctcccaagtagctgggactacaggcgcccaccaccacgcccggctaattttttgtatttttagtagagacggggtttcacggtgttagccaggatggtctcaatctcctgacctcgtgatctgcccgtctcggcctcccaaagtgctgggattacaggcgtgagacaccgcgcccggccagcagatttttttttaagtttag

SEQ ID NO: 7580 - DNA, 322 bp, Homo sapiens; identical to SEQ ID NO: 7579

SEQ ID NO: 7581 - DNA, 126 bp, Homo sapiens
agctactcaggaagctgaggtggaaggatcgtttgagcccaggaggtcgaggctgcagtgagctgtgatcatgccactgcactccagcctggggtgacagagtaagaccctgtctcaaaaaaaaaa

SEQ ID NO: 7582 - DNA, 28514 bp, Homo sapiens
ccaccgctgggtccccagcattaagccctggagcatgagcccagtgaactttgaaattcaggaaggaattcacaggaaagctgcggcgaggcgggcagaaaaccacaggcttccaagaaacgcgtgtctgccgccccctcctcccaccctgaggccagtcctagagcgaaggccctcctccgacgtcgtcaccaagcccaagggaagggtggcaggtgctcagcgggcagacgccccgccccgccccgccaggttctgttgggggcgaggcccgcgcaagccccgcctcttccccggcaccaggggcgggcccaggtgcgcccagggccggggagcggccgcgcaggtgcctgccctttgcgcctgcgcccagctcgccctgcctagccaggtgcgccccgccccctgcctgcccggccaccttcgggagccgcttccaataggcgttcgccattggctctggcgacctccgcgcgttgggaggtgtagcgcggctctgaacgcgctgagggccgttgagtgtcgcaggcggcgagggcgcgagtgaggagcagacccaggcatcgcgcgccgagaaggccgggcgtccccacactgaaggtccggaaaggcgacttccgggggctttggcacctggcggaccctcccggagcgtcggcacctgaacgcgaggcgctccattgcgcgtgcgcgttgaggggcttcccgcacctgatcgcgagaccccaacggctggtggcgtcgcctgcgcgtctcggctgagctggccatggcgcagctgtgcgggctgaggcggagccgggcgtttctcgccctgctgggatcgctgctcctctctggggtcctggcggccgaccgagaacgcagcatccacggtgagggccgggcgggtaggctggaggcggggcgcagggggcagaggctcgggggtcaacgggggtctgagcagggagaactggcgggggaggaaactgggggctacttgatggcgttcagcgggtgtggtggaaccagccctggaggattgagccttgaaatgaggtttgggagccttcgacagcgaagacgggcggaggagcgagggttaggagagtttccttcgggtggaggaagagtcaaggggtattgaccaagaaggcgtggcactgccccttcctgtggcaagaacggggtgaggagccgaattgaagaccagccttctcctggcggtggaaagttccatggccaaagctcagggagaggccaggcctgtgagatggtgggggttgggttgggtgacctggtggccgttttagactcggaagaagcccatctcacccctgcctctttggagattggacaagagcctcccctgaagtttttgtagttgagttgcagtaaagtaggtgcccgagaaggagggagcaagaaaggaaacaagctttggggaagaggaagctctgctaaggctcgagagagtattggcgttgagcagctggtgttggggtctttggattggcccttagaagtcggtggtgaataaggtgatttaaacttctacactcttaaggaagtgtggtctgaaaggtctctttgaacaagtgttgttataaccttaactgcttcagacaagcaccagcgtgttttgaaaagagctctcttgaaagcaagaattcattgattcagcaaaacttactgaggccctgctacgtgtcaggcactggcgctggttataacagttaactcagactagctgggttcctgcattcacagagctaatattccagtgggagaggcagagctagtgaaggtttaaaaagcacttgccatgagattaagttactgagaattaaatgaaccaggtgaagtacaccaacagggtgacgtaagatgttgggggcggctttagctcaggtggtcgggggacgtctccgtgaggagggtgacatctgagctctaacatgaagaatgaggcagtagccacacggagacctgggggaccagtgtccagttgcaggcaatagagtacaaaggccttgaagctggaacaagcttggttgggttcagggaaaagacagagccagcctggctggagcaggcgtgaaggaggggaggactggaggaggatgggaggtgggagaggttggctgcagccagatggcctagggctttatagacaggtgctggtgcttgaacccgggaggcggatgttgcagtgagccaagatcgcgccactgcattccagcttgggcaacaagagtgaaactcccatctcaaaaaaaaaaaaagaaggccgggtgatgtggctcatgcctgtaatcctagaactttgggaggccaaggcgggcagatcactggaggccaggagttcaacaccaccctaggcaacatgatgaaaccccgtctctaccaaaaatacaaaaattagctgggcatggtggtgcacacctgtagtcccggctactcgggaggctgaggcaggagaatcgcttgaagcccagaggcggaggctgtagtgagctgagatcaagccactgcacagcagcctgggcgacacagcaagactcagtctcaaaaaaaaaaaaaagagcaggctaggtgtgtaccaagtcatcacctgtggtaacttctggggactggttaatttctctgtgccctaggcaggagaaaaaagtgaattggtggggagaggctcagctgtaggtgactgggagtcaggaatgcagacgttgatcattcttgcaattcgaaccagaatttggcagctctgctggactttttcagtttaagtaattacgttaggatgtacctcccagttacctggcctcttgctacctctggtgcttactctgagctgggacatggcctcttgctacctctggtgcttactctgagctgggatgtgccatttaacctttgaaacagccgggtgcggtggtgaagttacttgccttgcccgaggtcactcggtagtagtaattgacaaagccaggtctcactgcagaggccttctctgttcagagtggcctacctgactgctgctgccgactggacctactgacctttcagaagtactagtgtctgactgggtgaactcatgccctcactcatcgtaagttctgtttgtttgaaagcttgaacagcttaatcggaggcagaaggcagttttgacttttttttcctcgctccttcctgattgcttctgttttctccggaagcgagtcatccactgggagtgtggtgttgctgaagctccatgcagtggctcaggtgctgctggatgagtgtggtggtgagggaggagtgaacagagaatgtgtgagggagggaggatgggggttggtcaaggaatttattctgtatgaaaacatgagggggcggagggccgaggtagatggtagggccagcagattgttggagttgaggttctgaagggaatgaaccagacagataggatgcagtgggtagtgagtgagatgcatgagagggaggttctgaagaggtggcagttactgagacaggtctaggtgtgaccctgagaggaagcgggggggcgagggtgggaggagatcaggtggaggtcttgggacctagaggtcagaggaccatctacctggatatagaaatctccaagaatgatcataagagcagcgggagaggtggcaggcccggagctaaagttgggaaggaagaagtagttgtctgggttggcagataacgtgccaggcggggtagtgaatgatttactctaataatggaagtctcccagctggggattttggggagggtggagggagaacagtccagaagcagctcccaggagcaaggagacctccccacttggaagggccccaggaggtgtgccctcaggggagattccaattaggtaagagggtggcaacaatgttcagaggagattgaggacatggaagatttgctcaagaccagtcctgagtaccagagggcccaggagttgggggaggggagatggggacaaagcaggccccaccgtgtgagagtgagggttaactcaggggtcggggcttcttgtgagaagcatcatgtggtctatgattgatgtgttggtgacgctctgagtagtgagggcaggtgggaagggacaggtggacgggccggacaaagagtgtcctgactccaacctctgcagacagaggtggggggaaagctgagcttatgccaggtgagaaagctcccctatctagcgttagggacagttaccgtctggagtggaaagcacgcagagattataaactgtccactcccaggaagcttcacacagcctttatgtgacttgtactttttccagaattgggattttttaaacgtaaaaatgtagtttttggctttgcctgaaagacatgaagatgtaatggaaccaaaccagaacacaggcctgttttcctgcccagcagtccctggcaggagccgagtacctctttcaggcaggagatatgccattccctagcctgtagatcttactcagcttgcctcatctcagctactgcttgccctctgtctctgtaggcctttggcttgtgacccctaccttaaacatatgctccatttagtaaatggtaacacgtaacagttctttataaattgcacattacagtgtgagacagagagagagcatgcgcgcgcgcgtgtgtgtgtgtgtgtgtgtgtgttacggctggctgttggggaaatccttatatcaggtagctgcagatatgcaggatttttttcttttccttttccccacccaggtggtaaatcctggtatttggagggtcctgaaatgtgtaatgttgctcaacaccaggccagatcatatatttcctcagcagaatagaaacttgaaaggtcctttaggagtggccagttaggtgtagttcttgctgccaataactttgtgcctggccctgggcatcagaacttgtgttaatggttacttggcttaaggtcttttgtttttgtttttgtttgtttttgtttttttgggtttttttttgagacggagtctctctcatcgcccagtctggagtgcagtagcgcgatctcagctcactgcaatctccacctcccgggttcacatcattctcctgcttcagcctcctgagtagctgggactacaggcgcccgccaccacgcccggctaattttttgtatttttagtagagacagggtctcaccaccgtgttagccaggatggttcaaggtcctttgttgattcttcttgggaatttccactggaggcaagcagggcaacacttatttgagaacctctcctgcacctttttttttttttttttttttttgagacagagtcttgctgtgtcactcagactggagtgcagtggcgccatcttggctcattgcagcctctgcctcctgggttcaagtgattctcctgcctcatccgcctgagtagctggggttacaggtgtgcaccaccacacccagctaatttttgtatttttagttgagatgggatttcttttctttttttttttttttttttgagacggagtgtctcgctctgtcgcccaggccggagtgcagtggcgcgttctcggctcactgcaagctccgcctcctgggttcacaccattctcctgcctcagcctcccgagtactgggactacaggcacctgccgccacgcccggctaattttttgtatttttagtagagacggggtttcaccgtgttagccaggatggtcttgatctcctgaccttgtgatctgcccgcctcggcctcccaaagtgctgggattacaggcgtgagccaccgcgcccggcctgagatgggatttcaacatgtgggccaggctggtctcgaactcccgacctcaggtgatctgcccacctcagcctctcaaagtgctgggattacaggctcgagccacgtggcccagccctctcctgcacttccaagggattttcgaaatgcatggacctctcaggttaattatagtgtctgtagaaccttaactgctgtaagctttccagcagactccacagacgtgttattagttgccaccctttctttactttcctcctcacccccatggatagtcgtgaccctggtggtcagagataagatgacagaagagctaaagtaaagctggtgttggcgatcagctgggaattctctaaaacagcttctcacattattcttatcctccatagaaggagtgcttgtcctacttgcaggcaaggcagtttggttccagggtagttcgaaatcttattcactgatatagtcagcaaatgtttattgagcacccaccaattgccaggcactgactcactcaaattagagcactgaacaaaatagaccccctcccccatccgtggcagacgtgtcataatgagaggaagacagtacaataaatgaacagatgaatgtatgtctggtgatgagtgtcagggttggtgtgcttagcactgaaaatgggggcttctgaggttcaaatggttgcagttcctaaagaaggttgagggccttgccttcaggtcaccgcgggagactggcccctttccactggaaacattgctttgcccagtcagtatttgagagctcagcctgcaatggagaaatcacacttctcctctttcaccctgctccccaccctgtttctcattttacccatccccagccatttgcagaatgcatgcagagcttctgtttgccatgtctggaggctacaggggaggctgaataaggggtgataagcctgtggctcatgtgaggcgggagagagcccagcaggagtcacactgaaatgactccattagccccaggaggccttggcccaccggccatgactaatgtggacattagagtgtggattccgatgtcctgcaagatcctcctcacaagtgtcatttcatggtttttttctggcaacatctttttgaaaactccctgtaaagaagtgctgatgttgatgctgaggcccaggaactttggagtttatttacctttttttgttgttttattttccttggcaggtgaagtaggagctagagtttacttattttgaagtttatttgaaatatgctttttatgattagaagccattttagaaatgagggcgaggccgggcgcggtggctcatgcctgtaaccccagcactttgggaggccgaggcaggcgggtcacgagatcaggagatcgagaccatcctggctaacacggtgaaaacccgtttctactaaaaatacaaaaaaattagcctcgcgtggtggcgggcgcctatagtcccagctatctgggaggctaaggcaggagaatggcgtgaacccaggaagtggagcttgcagtgagctgagatcatgccactgcactccagcctgggcaacagagcaagactctctcaaaaaaaaaaaaaatgttatgctaagtgagaggagccacttacaagagaccaccacatgtttggccgggtacagtggctcatgcctgtaatcccagcactttgggaggccgaggtgggtggatcacgagatcaggagttcaagaccagcctggccaagatgttgaaaccccatctctactaaaaatacaaaaaaaaattagccgggtgcagtggcaggcgcctggaggctgaggcaggagaatcgcttgaactcggagggtggaggttgcagtgagccgagatcacgccactgcagtccagcctgggagacagagtgagactccatctcagaaaaaaaagagggcaagaattcacatgttgttttactcacacgtgttggagatggagctcagggtgattcctgactgggcccagggtccatggcctcagaagtcccttaatctgaagtccttcacttttatgtgatactgctgggcacaatggctcacgcttgtaatcccagcactttggggggctgaggcaggtggattgcttgactgaggagtttcaacatggtgaaacaaaaaatacaaaaaactagtcagcctgtagtcccagctatgtgggaggctgaggtgggagaattgcttgagcccaggaagtggaggttgcagtgagccgagatcgcaccattgcactccagcctgggcgacagagcgagaccccatctcaaaacaattttatatgtgatagtttgtccatgtgtatgccagggtctgtcatttagagtgtatggcatgttcttaaaggggtgggggaacaaaaagatactataatagtttgtgaccttttgaagggccgctctacatgaatagatatatagtatgtctgtggtgttaaaattttgtggggcgattaggaaaaacatttccaaaaagtcttagggggaaggtagtaatgaaaaaaggttgagaaacaccattccagagagagggtccaagagctttcctcagttctgaaaatggtccatgatttgcacaaggtaaagaatggctgaatgcgaattaacagcagacagtttcttagaagatttgaaactattgtttccttcccagctattcagatggactgctcgggttcttgttatggattgaggcgagggtagacttaatagtcttgtttcagagtggaatatggagtgatggtaggcatgagtagtgatgagttgcattgtgctgataggttatgaaatgtaaattttttattttttgatatggagtctctgtcgcccagactctggagtgcagtggtgcgatctcggctcactgcaacctccaccttctgggttcaagcgattctcctgcctcagcctcctgagtaactgggattacaagcatgcaccaccacgcccggctcatttttttgtatttttagtagagacggggtttcaccatgttggccaggctggtgttgaactcctgacctcaggtgatccacctgcctcagcctcccagagtgctggggttacaggcgtgagccaccgtgcccggcctgaaatgtaaacttttatatctaaatattttatatagaaaataccaagattttatatctgaaacaccaagattttatgagcctcataacttaagtaggatttgtaattgtaaatgttctttcctcataaatacctgaggtttttttttgaaaggttctgaattgtctcaataatgaaaacttccagacacccaagcctagaggagatgggtagttggtagctttctgtactggaaacagaaacactcaaatatatagaacctagccagctaaccaaagtaggtagatttatagatcatcttaaaataaggctgattacacagtaaatgtcacctttggaatctggcttggtagaattgaaataggcttcagtacctcctgtcattcagtacctgttttcttgaactcctgacttcaggtgatctgcctcggcctcccagagtgctgggcttacaggcatgagccactgtgcccggcctcagtacctctttttaagatgctctcattcattccctggtgaaaagatgcttgaagtgcaagtgcaagtaggtgtggaaagcatggagggtttgtgttgcttcatttgttttggtatttgttttttccaccagtccctccctctggctttctgcctcccagcccagcatatcctgatcttgtagccatgcaggactttgacccgtgtggtggtttgccattgtcttcctccaggtgaagataagacatcattggtttggcttgaggttgtacttttggccttccctgtatatcctcttcctccttatcctctccgtcagcatgcttggttggactctgtagtgaaatgtgtcattctctttattctgactgtccctatattagtcctgtcttcataaaaaatacaatcgtaaagatacaatatctactatttgttaaaagttttgtgctaggccaggtgcggtggctcacgcctgtaatcccagcacttcaggaggccgaggcgggtggatcatttgagcccaggacttcaatactagtctgggcaacatggtgaaacctcgtttctacaaaaaatgcaaaaattaaccgggtatggtggcacacgcctatagtcccagctacttggaggctgaggtgggtgggtcactgagcacaggtcaaggctactgtgagccaagattgtaccactgtactccagcctgggtgacagggcaagtccctgtctcaaaaaaaaaaagaaagctgtgtgctaaatactattttaagcaattataatggattaaaaactcctttaatcttcacaacaatgttttttctttctttttttttgagatggagttctttgaaactcttggattaaatgactcttcagagctttctttgctttttgatactaaggagtggcatgtctggggatttttatagcaaataacttctccttggctactatccttagaattccaagtgtttttaatgaaaagaggagacttgtttttagtgatgttagttgtttttaggaaaggtgttctgcagtgtttttcgctaaggtggctcacgcctgtaatcccagcactttgggaggccgaggtaggcagatcacttgaggttaggagtttgaggccagcctggccagcacagcaaaaccctatctactgaaaatacacaaagtagccaggtgtggtagtacactcctggagtcctagctactcaggaggctgaggcaggagatgacttgaacccgggaggcagaggttgcagtgagcctagatcgcactattgcattccagcctggacgacagagtgagactgtcttaaaaaaaaaaaaaaacataaaatggagaggtagaccagcttacgggaggtgttgcacttccctctgccactggagagactctggatctgcagccagggagcttgtgaaggcttcttgtccacggaaatgagggcggcagttgtgactttctggatggtggcccagaggaagcaacactggcagagcctcttctgtgaagcagctctgcgagcaattttgtgacattgaaagagcaaaggataaaacgttgaaagctgatccagatctagaaaagtgtttggcaattgctggaaaaggtgtagaaatgatgcttgctctgtatcgtaagttatatggtgagaagaccacaagcacggttcaaactccccttagaaattcttttgcacagaaattaacactttaatcctaaatgtttccaatgttttaacttacagtatgctaaataaacattctttctgtttgtttgttttgttttgttttgttactctgtgcatttatagccaatagagtttttctttccttatttttttgacacagggtcttgctctgtcgcccaggctagagtgcagtggtgcgatctcagctcactgcaacctccgcctcctgagttcaagtgattgtcccgcctcagcctcccgagtagctgggactacaggcgcgcgccactgtgccgggctaagttttatatttttagtagagatggggtttcgccatgatagccagggtggtcttgaaatcctgaccacaggtgtgagccactgtatctggccaaaaaaatttttttattttttgtagagacagggtctcactatgttgcccaggctggtcttgaactcgtgacctcaaatgatcctcctgcctcggcctcccaaagtgctgggattataggtatgagccaccatgcccagcttgacaaaaaaatttttttttttttttgagagatgaagtttcactcttgttgcccaggctggagtgcaatggatcagctcactgcaacctgtgcctcctgggttcaaacgattctcctgcctcagcctccagaatagctgggattacaggcatgcaccaccacgcccggctaattttgtatttttagtacagacggggtttctccatattggtcaggctggtctcgaactcctgacctcaagtgatccacctgcctcggcctcccaaagtgctgggattacaggtgtgagccaccacgcccagctgacaaaaatttttaaatgtcattgagcagtatcatttttcccactgattatgagattgctttgtgtgatcacacactgacgggcaggccaattgctgcttgtattcagtatttggccccttatagaaaacatttgcagacccttgttctagaaaaaacagatgggtgggaggaggaggaggagaagcatttcaggagtggctttgggctttcctgtcctgcacgtggtgaggcaagaagctcttgtgcctcagctcatagcactcatgggagtctgtcaataactagaaccctaggagttatttttgcttgttttaaaaataagcttgttttggggccaggcgtggtggctcacgcctgtaatcccagcacttcgggaggccgaggcgggtggacttacaaggtcaggagatcgaaaccactgtggctaacatggtgaaaccctgtctctactaaaaatacaaaaatcagccgcgtgtggtggcgggcgcctgtagtcccagctactcgggaggctgaggcaggggaatggcgtgaacccaggaggcggagctttcagtgagccaagatcgcaccactgcactccagcctgggcgacagagcgagactccatctcaaaaaaacaaacaaacaaagcttattttaatggatataaaaacatgaatgaaataagacaccaagttcaaggtggtagggggttaatttggaagaggcagagcaaatgtgattgaatgaggggtatgcaaagggtttctgctctatccatatgttttatttattaatttatttttggagaacaaagtctcgctttgttgcccaggctggagtgcagtggcgtgatctcggctcactgcaacctccacctcttgggttcaagcgattctcctgcctcagcctcccgaggagctgagactacaggcacgtgctaccacacccggctaatttttgtatttttcagtagagatggggtttcaccatattggccaggctggtctcgaactcctaaccccaggtgatctgcccagcaggcctactctatgttttagtccttgagaatgttagaatttgatgacactgagatgtggatataccagacatggggtattttctgtactcatcagcatatttgaaatatttcattaaagttcttactttgcaaagtagacacagctgcaattatgcatttttggaaaatgattaggtactatctcatctgttttgtttttttgtttttttgtttttgagatgaggtctctgtcacccaggcctgagtgcagtggcgcaatctcagctcactgcatcctctgcctcccggtacaggtgatcctcctaccttagcctctcaagtagctgggactgcaggtgcacaccaccacacccggctcattttttttgtatttttgagctcaagcaatttgctcgtctcagcctcccaaagtgctgggattacagatgtgagccactggcccagtactatcttgctaagcctataaaattagattagattggtagtacttgggacccctcagaattctataatgtccttcttagaaggtgacagcagatctatccagcagactgtagattgttgtcttagtcaccggctgattgtcttggttaaagctctagtgacttcagaaccagagaaacttgttttccaacacattcaaagaccagtttgctttgcaattttgcaatagctgacattcagaatgcctgcgaggattttgtaagtgaggttcatatttcggataatgtgtgacttttgccatttctgatgcttttccaaaagaaagttactcttccctaaaggcaggaattctacttttgcttagatattctgaagcttatgagttcatccaaatttggttcctttcagcattttcctgttggtccgtctccgttttgaaaacatacagaatgtacttaattttgccctaccatttgtgagcatacaaaatagcacttgagtcatatttttcatgattgcttcccaatactattctaagaccaacatagcattttgtcatttcataataatagaattcctcattaaggaataactttctaaaaatgtgtccagcccatttcccccccagccctggccgtttcctttggtatgttggtgtccgtgaccctgtcattgagtgtgactgaaaacagaggcctggcagagggcctggcctttgtgagccctcagattgtgataaagaccctgaggaatgttttggcttttaggcaacctcagttctgttttcctgctgcctgttgatgcagtggctttttcttcccatcagtctgaagggtcgtgttagtgcctgggctctcatcagaccacagggaactcatcctggcactgctggctgcctcactttaaccacctcaagtctcagcattctcgtttgtaaagcggagatattattacgtgattcacagttttattgtgaccattagaggtagggcacatgatatgccaggcatcatgcttggcgaaggcaataagtaatgcagccaggtgctgtggctcatgcctatgatcccagcactttcagaggcggaggcagcaggatcacttgagaccagcctgggcaacatggtgagaaccccatctttacaaaaaattaaagttagccaggcgtggtggtgggtgcctgtagttccagctactcaggaggctgagatggaaggattgcttgagctcaggaggtcgaggctgcagtgagctgtgatcatgccactgtactccagcctgggtgacagagtaagactgagtctcaaaataaataaatacaaggtttttgcagaacagtgaatgagaaaatgcactgttgttatttgtggtggaagtgaatactatatggcctgtgtttcctgaaggaacactgcctccattaaaacaaatgagcaaacaaaatcccttttcatgacttcagttctctcaggcctgagagtaaagtttacatcatagatgcttaaaaacaattcagttagtgaaagcatgtgacaagatgagacgatttgtcttcaacgaggagcttccttccatactcacaaaaagatgtgtgtcttaacatagtaaggacatggttaaatttagtcttatttggacctaacttcagccaattaatctgctacttagaactcttttactcaaatgaaatttgagtaaaaaaaaaaaaaattttttttttggccaggtgcggtggctcgtgcctgtaaacccagcactttgggaacccgaggcaggtggatcacctgaggtcaggagttcgagaccagcctcaccaacattgagaaaccgcgtctctcctaaaaatacgaaattagctggtgtgatggcgcagtcctataatcccagctactcaggaggctgaggcaggagaatcacttgaacctgggaggtggaggttgcagtgagccgagatcgcaccattgcattccagcctgggcaacaagagcaaaactccatcttaaaaaaaaattattataataattttcaagtatatacaaagcagtgacacattttgtaaacccccatgcaccatcacacagcttcaacaactaccaacatctgtctttcagacatgtttttagtccaagttttctcttaataaagagactttttctttttcttttttgtttgtttgagactgagcgttgctctgtcgcccaggctggagtgcgatggcaagatcttggctcactgcaacctccgcttgcgggctcaagtgattctcctgcctcagcttcctgagtagctgggactacaggtgcccaccaccatgcccagctaatttttgtatttttagtagagatggggtttcgccatgttggccaggctggtctcgaactcctgacctcaggtgatccgcccacctcaccctcccaaagtgctgggattacaggcgtgagccaccatgcctgaccataaagacatgtttctaaattctcctgggacaacagtgaagttctacctttccttcctactttaccgaaggaacctgaaaataaggctgctttctgaaacttaaactactaagtcagtgatatttagagcagatgtaagcagctgtctagacacagaatggcttcccaggctcgcaagacttgtcatgaagcccccagcacgtcaacagaaagcatccaagctagaagaggcactggctcacagcagcaccccagaaaggaagcgtctcagggacagatcgtgaccgtgctccggaagagctgtcctcagccgctactgtgagcatttggcctgcctgacagattctgttggtgagaatgttcttaggaatcatacagtaaactaactttattctgacttcaagcatcgtgttccattgatgcttgctttccaaggtgttttgctgattcacatcagcatgcaacctgcttgacagaatacagtgatgttctcactgtaaattcatcacctgctgctgtggtctcatgtatcatcccgtgcgctgttagctgaggccagtgctcctgtgtctcctcagcacgagggcactggcaagagtgcatgtctgggcctataaagatgttggccaggttctaggcagggttgaattcaccaaggtaactgccatccatccctcaataggcattttttctcctacacaccctcaggcacatgccacgtgtacctggcacccttacttacgaagttaccgaattcctgccatgatactgtgggtcaccctgcttcattctcaggtgtggtgtcgggtggttcctgcctgggcgccgggtgttgttgggccctccctcaggttattggtttttgttttgagatgtaattcacatgccatatgattcacccatttaaggtgtacaatattcccctgaagtttattgtggaaaaaggctgtgtctgacactgcttaggaagctaagacacaaagcagccagaggggctgccagggctcactgtggcagggcggcggagaggctgctggcgcctctgtagctgttgggtgctcttgccttgatgctgttttcagctttggattgtaattgggtcccacgtgggtcctcttcatctcgtcttgttggtggcagtgttgctcccagcgttggggtgggcagagtcacacaccagaggacctcctcctgctgttttctctggaccttgttgattatgtgttttgtgacctttggcatattgtacctgttccaggtgtacagccagctggttttggttgatgtgtaatggacaaaaggtgcccctatttaaaaaaaaaattttttttctgcttgtagtcccagctactcaggaggctgaggtgggaggatcacttgagcctaggaggcaaggcttcagtgagccatggtcctgccactgcactccagcttaggtgacagaggaagaccctatctcaaaaacaattatataggccgggcgcggtggctcatacctgtaatcccaacactttgggaggctgagatgggcggatcacctgaggtcagaagttcgagaccagcctggccaacatggtgacaccccatctctactaaaaatacaaaattagccaggtgtggtggtgcatgcctgtaatcccagctacttgggaggctgaggcaggagaacagcttgaacctgggaggtggaggttgcagttagcggagatcacgcctctgcactccagcctgggcaacaagagtgaaactctgtctcaaaaaaaaaaaaattatcataaaatcactcgttttaagtatatcatccaaggattttagcaccttctacagagctgtgcagctattgccacaatccaattttagaacattttcatcatcccctaaagatccttttacccatcactccccattcccacccccagtaccaagcagccactcatctacttcctgtgtctattgatttgccttttatggacatactgtacactttcattcatatgaagtgtctagataaggtaccctctaacgggtgacttttcatggttagcttttttcaaatgatagggaatttcctgcttcagaagatgctttttctgctgtgctacttacctgtgatctattgtgtgggtgggatttccttggaggcatgtatgtgtttgtttgttttgcagagtagcaaccttttttgtccgttgattagtgttctgtggaacatctggtttcatgcccatcactgtgacatatttggggagacacaacagaagatatatccctagtgggtgaaacaaacctaacaaacatgaaaacaactagcgaggagtcaatgacaacatctaagcaagcgtttggctgtgggatgcttttattggagacatgtttatcaagcatcctgtgccaggccctgtgcaggttggaatgcccttgtgctgagcaggcagaggtgggtgaaggccagggttagggaggggtgataaccgtgatacaggagcagacatggagccacacagccaggctgttttcttttcaggtcgccttcaatccttccagtggaaaggcttattttggtgcaggtgttgcttctagcaattgtttctctctccctttcaagagagcgtaccgaccttttgcaagaagtgtttctggctggaattttataacattggcttttgtttcccttttactaaagtagggccagatttgagggtgccttgaaacccaggcccatcttggtgtgcccaaataggagctgtaacaagccgtggtgcaggggtaggacctgtgttgtctttggagccatgggctgggctgcaggcactcgagttaagaagcttccttctgaggctcttccagtaatttgagtgtcctgtggcctgcctgggcagagagtggacaggaaagatcaggaaaagcacgtgtgaggactaccgagggtgctgatagcgcctctccttcccaacttcacttctctggctctgacctttcagccctaagctccccttggccctgtgggatggggcagcatccagaagggtcttggagtcaggttttgttttgtttttttttttttaagtcatgtttccattgggcgtagtggctcgtgcctgtgatcccagcactttgggaggccgaggcaggcggattgcttgatctcaggagttgaagaccctcctgggcaacatggtgaaactccatctgtactaaaagttcagaaaaaaaaagcccagcatggtggcgcacgcctgtagttccagttgcttaggagggtgaggcaaaagaatcgtttgaacctgggaggcagaggttgcagtgagctgagatcgagtcaccacactccagcctggcgatggagtgagactctctctccaaaataaataaataaagttatgtttctacactggatgtgcatgtcttcaataatggggacaggggacaaaacacacaactgaaatacagttcagtgggtgggttgctgtctttattgttgggtgatgtgtttatacaaggaaggaagcactgagtgggcctgttgacgatctgggcttgggaaacagctcacaggggaactgctggaactcaaggctctggttctcctgggggatccatgtacaggtctgtgcgtgtcctttgttgccaggattgccctgccaagctaaccgggttgtgcttcgcgtttcagacttctgcctggtgtcgaaggtggtgggcagatgccgggcctccatgcctaggtggtggtacaatgtcactgacggatcctgccagctgtttgtgtatgggggctgtgacggaaacagcaataattacctgaccaaggaggagtgcctcaagaaatgtgccactgtcacaggtgagatggcagtagttggagcttttgtttttttccttttttttttttttttttttttttttgagacggagtcttgctctgtcgcccaggctggagtgcagtggcgcgatcttggctcactgcaagctccgcctcccgggttcacgccattctcctgcttcagcctcctgagtagctgggactacgggcacccaccatcacgcccaactaattttttgtgtttttagtagagacatggtttcaccttgttagccaggatggtctcgatctcctgatcttgtgatctgcctgcctcagcctcccaaagtgctgggattacaggcatgagccactgcgcccagcccctgctttttttttagacagggtctcactgcagcctccacctcctgggctcaagcagaacctcccacctcagcctcctgagtagttgggactacaggcacatgccaccacaccttgctcattttgaaattttttatagaggcgggggtctccctatgttacccaggctggtcttggactcttggcctcaagtgatcctcccacctgggccttccaaagggctgagattacaggcgtgagccactgtgcccagccagattttgctctttagagacaatttattaactggaatgtggatactttcctctctttattagttcttgacagtggaatctgggtgacgttttaaaaagcagaagaaacaggcaccgtgtgaatgtcctggtggccgtacagtggtttcacagcagaccctcactcctcctcttcccagaaagggagcaaaacaacagggcagagctggggccagcgtgacccagcttcctttctcccactttactaagtgcaagtttcagagcagaccaaagaggaagtagccttgccttcttgagcagaggctttttgatccactccgacagggctgcccctcttgttccctgggtatttgggttattttattttattttgagacagagtcttgctctgtcgcccaagttggagtgcagtagagcaatctcggttcactgcaacctcagcctcctgagtagctgggattccaggtgtccaccactacgcctggctaatttttgtatttttagtagagatggggtttcgctatgttggccaagctggtcttgaacttctggcctcaggtgatctgcctgccttaacctcgcaaagtgctgggattacaggtgtaagccaccgcacctggccgctatttgggttatttttaattgtgggacaagtgacttgaatagctcacccagccaagttaccgatcaagttaaaacaaacatacgtcctggaatccatcctctttgcggccctcacctgcgaggagttctgtggaatcaaggtaattttgaccctgataacctcacagtttaaattaaaacctaaacctcccagcagcgtgccctggctcttagctgagtgagaaggacttcctgagagctggtggtgatgagacattggccctttggggctgctccatcccgagtgttccagagacccgagggtttggccatccaaatcctatgttaaagattttcacttttttctttttttctcgcttagtcgcctaccaggctggagtgcagtgatgtgatcttggctcactgcaacctccacctcctgggttcaagtgattctcgtgcctcagcctctcaagtagctgggactacaggcgtgcacctccacacctggctaatttttgtgtatttggtgaagatggagtttcaccatgttacccaggctggtctcaaacgcttgagctcaagcaatctgcctgcctcccaaagtgctaggattacaggcgtgagccactgtgcccagctaaacatttcactttaactgaaaaaacaaacaattacactggcctttaagtaaaaaataaataaaaatattttcagcggcactccccctaacatgtttttttgatgacttggtgttgtctctgtgagccaccgttgacccagttactgtatttctatcgtcagctgtgattcattatgaaggaggacttgggagaactatcttttgctaccttttctgagctatcccagtcaagagttgcctttagcaaatgtatctgtccatcctggctgtttgttacctcctcaggaagggagctgaagtgttgagaactcaggcagtagacagtgaacatagccaggggacatgagtggctgtgtgttcctgggagcaggcaggttagctgtctccctagagtccggccccgccttgcaggtccagaaagcacatattggcatctgactggctgcaatgtgtgtctctcgaggcgctcccatgtgagtctgtaaagagctaaacactgccagggctgctagtgcctggggtcctttgccggcatattctctcccaggcaggcaggctctgtgggaaggcaagtgagaatgagactgccagtgtattaattcatcatgagaaccaggaccgccccggggagcaggcactcgtgtccccgggcccacgcctttagtccgcataggcaagtctctagtccagttgccagaagactgcttgatgaagagagaggcagaacgcggggagctggtttgcaaggtgaccgtttaatagcatcaggctaggccaggcccgaggatgcggaggagccagggttccctccatcttggacgaggtgtgggagataagcgctgtgtaaaatgtatcatgtgggccgggtgcggcggctcacgcctgtaatccagcactttgggaggccgaggtgggcagaccaagaggtcaggagatcgagaccatcctggctaacacggtgaaactccgtctctactcaaaatacaaaaaaaaattagccgggcctggtggcgggcgcctgtggtcccagctactccagaggctgaggcaggagaatggtgtgaacccgggaggtggagcttgcagtgagctgagatcgcgccagagcactccagcctgggcgacagagcgagactccgtttcaaaacgaaaaatttgtcatgttaacctttaaaaaaagtgtcgtgttttgttttgtttttctccccccaaagagattaggtctttttatgttgcccaagctggtctcaaactcctggcctcaagtgatgccccccacccttcacccagtgtaagcactggtattacagttgaattagttagatgagttgatacagttaagcaattatttggccctggaagtcactgtgttttgattgtttgtttctttctttgagacggagtttcactcttgttgcccaggttggagtgcaatggtcaatggtgtgatctcggctcactacaacctctgcctcccaggttcaggcgattctcctgcctcagccacccgagtagctgggattacaggcatctgccatcacgcctggctaactttttgggtttttttgtttgttttttgagacggagtctcactctgttgcccaggctgagtgcagtggtgcgatttcggctcactgcaacctccgcctcccgagttcaagcaattctcctgcctcagcctccggagtagctgggactacaggcgcgtgccaccacacccggctaattttttgtatttttagtagagatgggttttcgcagtgtcggccaggatggtctcgatccctgacctcgcgatctgcccaccctggcctcccaaagtgctgggattacaggcgtaagccaccgcacccggccctaacttttgtatttttaataggttttgccatgttggccaggctggtctcaaactcctgacctcaggtgatccacctgccttggcctcccaaagtactggaattacagccatgagccaccacacccggccaagtcactgtctttttaaggtcactttgcacatctctgctctgattccctgcaagttaatcttaagtttcctcttcgggaggcaatcttggttccttatttccaagttgtggtctggcatgcacattgaaggtcccatgtaaaggagaagtggatgctgtggtgagaggcgcacagggccagctcattctttgtccctggcagtctctcgaaagctctttcactgtgctgtttctttgtccccttgcagagaatgccacgggtgacctggccaccagcaggaatgcagcggattcctctgtcccaagtggtaggttcttaaagagacccgcgatggagtgaggccaccggatgggtcattgtgaaaggacacttgtcatttgggaactgtcacaggcttccctctcatggttctgtttactcaaaattggcaaaccgggggctctgcctgggctgccggcttctggctccagcatccttatgggggagtttatactgtccagctgacacaggggccggggatcctgcagcacttcctggctggcccccatctcctcctggaggatgggatggaggtggctgctgcccatgaggctcaggcccctccttgctgtgcgggcctccagctgctctgctgaccccactccccacccaccctcctgtctgcctgttctgtctcctctgcttcctttgctccctgttgccatcgctgtcccctgccccgtgggcatcctctgtcctctgccacccccgcctccccgccactgcagcttgtgatctcaagatgtgtgttagcttgctttgtagtgctggcggctgctgccccattcctcctttatggtttaaggactctgcatcgggcgcctggggtgagtggtcccgatgcactaccaggtagcaaatgcaccctcggggcagacctcaggccatggactctgggaggctgctgtggagggggtactgcaccgcacccctgctggaggatgggactcccccggcagctgctacccaccgagtgcactgtagctcagcagctgttgggccggctggcttgcagagtgctggggcgttagggtggtcactttccagctttgctaggcctggagtcctgtgcctgtcctggctttgctctgcctggctccctgtttatcctctgctagcccccccacacaccagctctggtttccatcttgttggagaggaacatgtccccctcactgtattagaaagtgtgaacaagaccgtgttccctataatattaggagctgtggcaggcttggtttctataggaaccctgaggtggcggcagggccaccacatccagcactctcagtgtgtgcgtagagcccattagggctggggtgacgtggcagagccggccatggaaggggctacacaccccttcttaaaggcgtgtccacactcctcagtgggcccttccagacccagacccagctaggcctgtgtcctgtgtccggcccagcctccctaacacagatgtttgtgtttcagctcccagaaggcaggattctgaagaccactccagcgatatgttcaactatgaaggtaaaactccaaagaggccaggtgcggtggctcacacctgtaatcccagcgctttgggaggctgaggtgggcggatcacgaggtcaggatatcaagaccatcctaacatggtgaaaccctgtctctactaaaaatacgaaaaattagctggacgtagtggcatgcacctgtagtcccagctactcaggagactgaggcaggagaattgctcaaagcctgggaggcggagggtgcaatgagccaagattgcgccactgcactccagcctgggcaacagagtgagactctgtctcaaaaaaaaaaaaaaaaaaaaaaaaaaaaactccgaagaaacttatatatggggcaaaacatgtattcttagttgggtattgagagacacttgcggattttcactgaggaagttgtagagcagggctctcccctccccaggtggtggcagccccctgaggttggggtcaaggtgacaggccccacgtggatgccgccagcagtgggaaggaggctgcgcctgtggagatgtgcgttagaggcgtagcctggcacgtggctctgcaatttacattgtccctgaacctctcgccagcggcttggctgtgggcaagtgactgttgccccgcctcagagttcccatgtataaaatgaagggtcccagataggtctcatagagactcagccactgcatgtaaaaggcctagaacagggcttggcagagagcagccttcaaagctccgaagccgtcacctggacccaaggagcagcgcgtcagagccgctgcactggtcttgggtgtaatttacaggcttctttaccagagagatgtttctccgtctgctggagccgcaagcctcctcaggcactttctggcttgcttcccctccttgcgggccctactaatttgtattccctgggctgtcttactcctagaatactgcaccgccaacgcagtcactgggccttgccgtgcatccttcccacgctggtactttgacgtggagaggaactcctgcaataacttcatctatggaggctgccggggcaataagaacagctaccgctctgaggaggcctgcatgctccgctgcttccgtaagtctgcagcccctcagcccaggaagccctgcccttgaggaccccggtccatctccccatccctaaaatatgaaggccttggaaatgctgttcttgggcccaccagggcagcaaggcctctaagccccagaaaagctggaagaaagcccctcagaaagagctccccatggaggccctggctgaggggatcccctgcggcagctctgtggaatgggggctgtgagctgacctcaggctgtgtgttctcttccaggccagcaggagaatcctcccctgccccttggctcaaagggtaagtggccccttaccctcctcctgccatcagcctgcctcctcccttccttgactgagctcagccctgcccagctgtggtttacattatccttcactgtgaacatcatcttggcagaaagtcatgtttctgcgtgagaatggcgaggtggtggtttgtcccaccgttcagtgtacacagttggggctggagtgagtcagtcacaaggcaggccctgcccaggcggcgtgggtgactggggatgaggtcttcctgttgagcatttgaggactgctgcacacgggcctgaggctggcctgaggtgtggagggagcgctgctatgtggggcataagagttggtcacgggtgacaggacggaggaccacgggccagggtgtttcccaacacagtctggtctgagcgggaggccaggcctctggcctgtgtttctgagcttgagttgcaggtgataatgttggcacaaaagacctgccatgccagtctggcctctttctccacctgtttcccggtgaaggagccaggacctggcctgcgagtctgtcctgttctagcagtgaagcctggtttgccaggcacggggctgggaagcaagcagtctgggtctggagggtggccccaaaaaggccaactctgcagctccacagccacatgggggaggctgccacaggtcacactccttagccggatcccctcctgaagaaaagcatctgagctgaccagcgagactgcagtggggcagacactattaaatttgctggcacagctctgagtaccccctcgcttccaccctgacttcatcccgcagtagctctcagccctcccagcccctgcagggccacgtctttctctattgccggtcagcgtgtgtgtgcacaaagcccctaaggtttcatgtgtacacaccggtgctaagtgttttttacacccttgtgcatctctcggcctggggctcctgtgcaggttgccctgagagttgggtttttagttcaaaaagaaggaacacagatgactactctgctggcgacacggccactctgctggcacgcacatagcatggcgcctccttttttgggggactctccttggtggcatctctggcaggctgtgtcctctccagctgcagttctggaccctgtctgggttggggaggggcatttggtcctcaggctgagcccacctggattccccaggcccttggtgagcgccactctggctgcaactccccttgcctggcccgtcctgaggcccctctctcgtcctcagtggtggttctggcggggctgttcgtgatggtgttgatcctcttcctgggagcctccatggtctacctgatccgggtggcacggaggaaccaggagcgtgccctgcgcaccgtctggagctccggagatgacaaggagcagctggtgaagaacacatatgtcctgtgaccgccctgtcgccaagaggactggggaagggaggggagactatgtgtgagctttttttaaatagagggattgactcggatttgagtgatcattagggctgaggtctgtttctctgggaggtaggacggctgcttcctggtctggcagggatgggtttgctttggaaatcctctaggaggctcctcctcgcatggcctgcagtctggcagcagccccgagttgtttcctcgctgatcgatttctttcctccaggtagagttttctttgcttatgttgaattccattgcctcttttctcatcacagaagtgatgttggaatcgtttcttttgtttgtctgatttatggtttttttaagtataaacaaaagttttttattagcattctgaaagaaggaaagtaaaatgtacaagtttaataaaaaggggccttcccctttagaataaatttcagcatgtgctttctttatgggagtcctaatttcaaccctaccaaaatgatcacaagacactatctgaggtgtcccattctagaaatagacccctcaaaatagcgtctttcagatctttttgaatgaatccacaagatgaaataaatgtcctattactgagtgcccgtgaactttcgccaaacc

SEQ ID NO: 7583 - DNA, 125 bp, Homo sapiens
cagctactcaggaggctgaggcaggaggatcgcttgagcccaggaggccgaggctgcagtgagctgtgatcatgccactgtactccagcctgggtgacagagcaagaccctgtctcaaaaaaaaa

SEQ ID NO: 7584 - DNA, 249 bp, Homo sapiens
gggaggccaaggcaggcagatcacctgaagtcaggagttcgagaccagcctgaccaatatgatgaaaccccgtctctactaaaaatataaaaattagctgggagtggtggcaggcacctgtaatcccagctactcaggaggctgaggcagagaattgcttgaacctgggaggtggagattgcagtgagccgagattgcaccactgcactccagcctgggcgacagagagagattccattaaaaaaaaaa

SEQ ID NO: 7585 - DNA, 322 bp, Homo sapiens
cgataacagtagttggggtcatgccccctcattccttcagtaaattttaacggagcaccttttatgttccaggcactgcattcagttctggccattcaaattgcctaagacatggtctctaaccccggggactgaacttcccagagagcatttaaattttgtttcctgctgctctctaccccatctggttttcgggtcaggaatggtctggtctctctctctctctctttctttctctctctctctctctcaaattaaataccaactatgtactggacactaaagattacaaaatgaataaaactccgtccatgctcttgaa

SEQ ID NO: 7586 - DNA, 282 bp, Homo sapiens
ggccgggcacagtggctcatgcctgtaatcccagcactttgggaggctgaggtgggcggatcacctgaggtcaggagttccagaccagcctggccaacatggtgaaaccccctctctactaaaaatacaaaaaattagccgggcgtggtggcgggtgcctgtaatcccagctactcgggaggctgaggcaggagaatcgcttgaacctgggaggcagaggttgcagtgagccgagatcacgccattgcactccagcctgggtgacagagcgagactcctttc

SEQ ID NO: 7587 - DNA, 103 bp, Homo sapiens
cccagcactttgggaggcccaggcgggtggatcacaaggtcaagagatggagaccatcctggccaacagggtgaaaccccgtctctactaaatatacaaaaaa

SEQ ID NO: 7588 - DNA, 1675 bp, Homo sapiens
aggccaccggagcccacagctcaacaggcttgggtccccttccatgctgtgggaagtttgttctttcgctttttgcaacatagcttgctgctgctcactctttggtttcgtgccgcctttaagcgctgtaacactcactgcgaaggtctgcaacttcacttctgaggccagccagaccatgaacccactgggaggaataagcaactctggacacaccatctttaagaattgttaacactcaccaggagggtctgcggcttcattcttaaactcagcgagaccaagaacccaccaattccggacactgtggagagggaccagtggtgggcagggctccagaactccaaagatcgtatgttctttgtcttctgctaccagggtggatatggaaggaccatcaggtgggggtggggctaggcgtgcctgagctcagactctccttgggtgggtcttgctttggctgctgtgggggatagaggtgagattcccaggtcagtggagttgtgtacctagaaggattatggctgcctctgctgagtcatgcaggttgtcagggaagtgggggaaagctagcttccaggcacgctgaaaggctggtctcactcccacaatgccccttgtgatagcccggagtctgtttccaggccgaaggcgaatctggcttgaaaacttacctgaggctttctgcctcccgactgacaaagaaatgggcttcagttcttaccccgcctgtgaagtctgcaagcctgattcacgccctcccccgagttctggccaggaggcttccagccccattcaattttttacaaagttcagctagagaggttcttctccctgtgaagttttaccccctgctcctctggccacccccccgatggatgtctgccgtgccaggcaggaatgggctacttggggatccagcggccttccagtgcctttgtgctacttcctctactcctgtatgttgctcagctcggctctctaacttgactcagctccaggtaaagtcacgaacttctcccacaaacagactttcagcttctccagtgggggtgtgtgttcatgagacgagggtctccctttcccatttccgtggttaggggacttaaagtatttggggtgtctcccaggtcctgcaagagcagtctgcttccttcggagggtctgtgggtcctgtcaggattgctggtctgctcttgcagtccatctggagctaaaattcacaacgcaagcctccgcatgctgctctgtccagagctgccatctagttctgcctcctgtctgtcataatccctcatgacccttgagctttttttttcatatgattgttggcagcatgtatgtcttcttttgagaagtgtctgatcatgtttttgcctatttttaaaggttttttttttttgtaaatttgtttaagttccttgtagatgctgtatattggatctttgtcgaatgcatagcttgcaaaagttttctcccattctgcaggttgtctttttgctctgttaatagtttcttttgctgcccagaagctccttagtttaattacatcccattcgtcaatttttgcttttgtcacaattgcttttggtgtcattgttataaaattttcgcccgtgcctatgtcctgaatggtattgcctaggttgtcttccagggtttttatagttttgtg

SEQ ID NO: 7589 - DNA, 131 bp, Homo sapiens
tttttttttttttgagatgaagttttgctctgttgcccaggctggtgtgcaatggcgtgttctcagctcactgcaacctccgcctcccaggttcaagcaattctcctgcctcagcctcccgagtagctggg

SEQ ID NO: 7590 - DNA, 556 bp, Homo sapiens
gcaaggagttcagggtaaatgtctagtgtcaaagttctggcaggctttactggggaaagtggtccccagttggtgtgagaaaaaaaaaaagtagaaatgctgattcccatgatctggtaggattttgattctgcttctgaatggctgaaaagctttccaaaacagcttccatggtttatgccacttttatttatgtctcttactcttttgtggcagagtggttgcagtaggaagtgaagaaaaaatttatccttaccacaccttcctcccaaaccctgttagttcaactaggtaataagcccaccattaggatgcctcagaccataaggagctgttcatttcaggactgttcctcaggatatgggcattgatttagttaatttggcaagtcttcacaagtattatcttttaaagtaagacctacacaaaaagaagcagtctcattagaagaactctgaggcctgtgcaaagaatgcatgtggcttcagagaaaatgctactttgaaaaagcatctctgagtctttaaataattaagaggttgttagagcaatgggg

SEQ ID NO: 7591 - DNA, 556 bp, Homo sapiens; identical to SEQ ID NO: 7590

SEQ ID NO: 7592 - DNA, 1051 bp, Homo sapiens
tggcactccagctggtcctgcataggaccgagcctgtgcctgtggctcctcaggcagagtggcaggtgtttgcagtaagcagtgtcagctattactactttatatttgactgatactataacaccagtatgatcttcctaaatcatataacaaaatctaagttaaaataacaaaaatgaaatacaatgactattcatgggtatttggtattgtgctaagtcctagacagttatttggataattgcaacaatatttacaccgtgacatggtttggctgtgccccacccaaatctcatctggaattgtagctcccataattcccacacgtcatgggatggacctggtgagaggtaattgaatcacaggggtgggtttttcctgtgttgctatcatgctagtgattaagtctcatgagatctgatggttttataaacggcagttcccctgcacacactctcttgcctgccaccatgtaagacatgcctttgcccctcctttgtcttctgccatgattgtgaggcctccacagccatgctgaactgtgagtccattaaacctctttcctttataaattacccactcttggatatgtctttattagcagcatgagaatggactaatatacactggaaactgagacttcatttggtcatttttgacaccatgccaccagaataaaacaggtacaggataatggatcctaccattgattggaaatgatcatctgcaggaagagcaccaatggaatacaaagggtggaacccaaatgcctctatttcagcatgtccagtgtcaaatgttcaaagaattgtatagcactttatataaataagactccaataattaaacttttctatatttctctgtcacttaagggatcttggaagctgagtttcctttggcgccaaagagaacatggactggacagaagaatttggaagtcataagtacaaactataactttaggatttgttacagaaataagtattgtatcttctactatattttcatttttatggttttataaataattctaaaatgcagctaattt

SEQ ID NO: 7593 - DNA, 159 bp, Homo sapiens
aaaagtaagtaagtgtgtgtcaagccagccttctgagggaaactggatcccatctcatagggaaactctggagtgctgtatatgtagaatacacatcagagttggtcacaaatgaggaagatagagattttctcttcttcctttcttacccaccaactt

SEQ ID NO: 7594 - DNA, 1606 bp, Homo sapiens
cccggcaccagtgagttatacctgagttaatcaaaaactctgagctgcatcctggccttgaacttcagtggatttgaaatttatcatgtataggtcattttcaagtggatgcatgtaagaaatgcattctctttaggggtcctctcacctccccgcaaatgcagcccacctcttgtgcttccaaagccctgggagaccaagccactcacctgggaactgatagccatagcttggagcaaatccggggtagccacggccataggtcgccacgaagttgggatatccttgaacacaaagagaaagatcagagtcctgttagtacagccgcctcaggtctggggtaaaatctcacggagggtggcaatgaggaaagcctgagttattttccttcacagaataatttgtctctcatgagggtttttttattaagggtctgggtcacctctctcctgtggccgggggcgctgctgtcagctgttgctaattaacccatatttgggcagccagaccccgcaaagcccatgtactttcctgaaccttcagagtaaatgccatgcatcagcaccaaacacaaagcctgcgcctggctctgacatttggagagcttaccctgcatgtactttaccttaaagctattgacagtaggagattaaagtcctcgtgatgcatcctcccaaggcagtggacaacagagccagcaccagacagagcatgcgaactcaggagtcacagtttagcggccaaactcagggctcaccctgggcctctggaaaacgctgggcctgatgagccatggcccacactgcagttttgacactccacggaggtgccaagatctttggagaatggtgagaggctggatgtgttaagatgcataccacaaagtgtagctccgactcaggagccccgtgccgtgtgactggatgggcgtttcaccacaagcgtattgtttctagacccctgtctcagcaggcaagctagggggtgagtggttcactgaaagacacttgtagaaactgccactgggctggccactgggcacacaagaaactcagctggcaagtccaggggctggtgtgaccatctcagatctgtcactaacccccagtgatgtgaggtgtcattcagctctcagggagtcattgtggctgctcaggccacttcgttcttcaagtccctgcctgattcaggctaaatgaaggccgtatgggtcaggctcactctgcctccctccactcagtgtatatgtaacctcagtacattcttgctcttaagatgccaccacggccacccaaccaccgagaacgtgactttcgctttgactttggaggtgaatgtctgtggtcattttttggctgcccagcccctgagcctctccctgtgtgtaagtcttggagagaggcccacccccccggccatcacagaagctgagaaggcctcagggctcttcctggggctggaggctgggaggcaggcctgtgaacctgggctcgacagacggaagccctccttaggatctgcctctggagctggtagggcagaggaggagggactggctccgaatttattctggtgtcagtagcagaatctggcatccagtgttggc

SEQ ID NO: 7595 - DNA, 1606 bp, Homo sapiens; identical to SEQ ID NO: 7594

SEQ ID NO: 7596 - DNA, 9085 bp, Homo sapiens
acatttcaaggtgttcatgtccagtggatttccatgatgtgaaatgttgccaagaatccaatcctcaaatgtaggcttactaatgtttcaaatacctgcaggctagtatgatggtgactagtatattcgccatttttatttctttatgacatagttatgagcatggtggtgatagcaagaagtgtttttgaaagatcaatgcaaaataaaaataaaaaccaattcaagaagaattaggaaggcacaaaaaaaattgagtatgctgataaagagaatgaattagtctgggtaataacgaaatgaaaaagaaaaggaagactaaaaggtacaccgtgaaggaaacatacaaaggccttcttaatgaattggatgtcagttacccttagaagctgctagtggacttcctaggactgcgacgtgatcctgatccagggcagtgagtgcaactccatttcgagcgttaccagatacaacagccttgagcagcagtgatttaactaagctctgatttttttctgggtcagctggacgtattggtatcaaggtttcatatatacaaccatcagagcctgttggaaacaagcatttgttgttggttattgaaggatacttctatatctattacagttaaatgtactaggttgtttataagattttaccaatttgataaaacagccaaccagaaaaataaacaatcccatcactgtgctttctcttaaagagtaccacaaatttaaactggggaaagaagtactattaataaaaatctcagtaagaaatgtaatagtcaagaaatacaaactgtaaatacctgcaataacttaaaatattgagggggactcccaagaatatagatcatctagtccctaaaaggatatatccctcattagaaagtaattagcatctggtctatacgttacctttctttcttgtttgtttttttgagacagggtctcactctgtggcccaagactacagtgcagtggtgtgatcacagctcactgtagcctcaacctactgggctcaagtgatctatctttcacctcagcctcccaaatagcggggactacaggtgcacaaacctcacccagctaattaaaaaaaattttcttttagacatagggtctcgctatgttgcccaggctggtctccaactcctgggctcaaatgatcctcctgccttggtctcccaaagtaccgggattacaggtgtgagccagtgtgcttagtttattataattcttcctacctcatcaccctgaaaaccttatgaaattgctctttcttgtgggccaactgaatttcggcagtttcatgtggttctagcaattgttacgtaaagatttatataaccctttggtgcacacttcctcacttcaaagttcattaagctaaacattaagtacattccaatagcccccaagatatgaaaatgataggagccttttaaaaaatagccaccgcaaacatttgcacactgaaaaacttcacaaagatttttaattgtgataatatggaaatgtttcctatgtattgctcttgtttacttctccttcaccttctcagaacaacttcaaaagcagccatgaagggtggaggggagagggtaccacaaagacttttttttttcttccccgccctagaggcctaagactggggttatactttagaccatttcataaaggtattacaatctataataaaaagcaactggcatgggccaaagctgctgttagtctccttttgcccatctgtctcagttgctattcaaggaagggcatactaaatctaatggttggaaaaaaggagcagaggggccattcaatgccaagcatagacagtttatgtttcactaattacactcaaagaacctgggccttatcagctaaaaagtgatttctctttttcactggtattaacattgttacttattgcttatggtaaatttttttgttttgttttgttgagacgagtctcgagtctcgctctgtcccccaggctgcagtgtactggcacgatctcagctcactgcaagctccgcctcctgggttcacaccattctcctgcctcagcctccagagtagctgggattacaggcacccgccaccatgcctggctaattttttgtatttttagtagagacggggtttcaccatgttagccaggatggtctcgatctcctgaccttgtgatctgcccacctcagcctcccaaagtgctgcgattacaggcgtgaacaatgcccggccagcttatggtaaattttaagacataaaatataaagaagcaatgttagaaaaggatgctgtatctaaagtacttcaataggccctcaaaacacaggatcactgatctaatgcatggccagacatgcaaagtacaaaaagcaaaggcatgggccgcacgaggtgactcacacctgtaatcccagcgctttgggaggccaaggcgggtggattacctgaggtcaggagttggagaccagcctgaccaacatggcgaaaccgtctctactaaaaatacaaaaatgagccagatgtgggggtgggcgcctgtaatcccagctactcaggaggctgaggcaggagaattgtttgactctgggaggcagaggttgcagtgagcagaggttgtgccactgcattccagcctgggcgacagagcgagactctgtctcaaaaaaaaaaaaaaaaaaagtgaaggcatgaacgctgtaaagaagcacagaaatggctgtaactgaatgcttcacaaagtctacgattcaaaaacatacactatcctataacaatcctctatttataatctctgaaagtttaaagaaagaaaacttacttaatgacatcaaagagatgaatttccgatctacagatgcagtaaaactctttataacagagttttcgtcttgtccaagtaagagtgtatatttggttaagatacgtgagttaaacatttgcacgtaagcaaagtaatttccatgctgcaaaaaaaaaaggttattttataaatattcccatttcaaccaagtattttaacatatgttaaaaccagaagttgtcaccccattctacttacatcaatgagtacttaaaaacatcttatgctatcaaatttgtttgttttgagacagggtcttgctctgtggcccaggctgggctaccgtggtgtgatctcagctcattgcaacctccacctcccaggctcaagcaatcctcccacctcggcctcccaaatatctgggaatacaggtgtgtgttaccatgctacactatttttttttttttaatagagatgaggtcaccacacccagccttaaatttaaaaggtcataaaaaagttagaggctgggcttggtggttcacacctgtaataccagcactttgggaggccgcagtcggtggatcacaaggtcaggagttcgagaccagcctgaccaatatggcaaaaccctgtctctactaaaaatacaaaaattagccaggagtagtggtgggcgcctgtagtcccagctacttgggaggctgagacaggagaatcgcttgaacccaggaggcagaggttgcagtgagccgagattgtgccactgtactccaacctgggtgacagagggagaatcgtctcaaaaaaaaaaaaaaaaaaaaaaaaaaaaaaaaaaaaattagagatcttctgagagaataacgaagtcacattttagtttaaaaaataatggttttgcgccaggcgcagtggctcacgcctgtaatcccagcactttgggaggctgaggtgggtggatcacctgaggttgggagttcaagaccagcctgaccaacatggagaaaccccgtctctactaaaaatacaaaattagctgggcgtggtggtgcatgcctgtaatcccagctactcgggaggctgaggcaggagaatcacttgaacccgggaggaggaggctgcggtgggctgagatcgcaccattgctctccaggctgggcaacaagaacgaaactctatctcaaaaaaaaaaaaaaaaaaaaaaaagttttgaaatttcacagctgggcacagtggctcacacctgtaattccaggactttgaaaggccaaggcaggaggatcccttcagcccaaggagttcgagaccagcctgagcaatacagtgagaccctgtctctacaaaaaataaaacataagccaggatggtagtgcatgcctgtagtcccagctacgaggcaactcggcaggctgaagtgggaggactgcttgagccaggaggttgaggctgcagtgaaccatcgtggcaccactgctctcaagcctgggtgacagggcaacaccctgtctctaaataaattttttttttttaaagaaatttcacaaaatgggccaggaattgaagatatcacttactttttcagtaataaaaattaaaacaggatgtctgaatactacgaaaaactttgtccatctacaaaaaaagaaaaaagaaaaattataggatgcaaaaatcaccagctgggagacacatatcaatcaaaatttaatcaaagttttcattaaatattttttagaaccagaaagacatcagagaacacttaattgggcgttttgaaacatataccacaagcaatacgcatttgtcaaatgcagctctggattaaatgcaggttattgaactccccagatgataatgtgaattttaaagttctaagaggggagatgcagtgcttcccaaacttaaattgactcccctacctcattttcttcagagttacttttgggactcgtgttctgaggaaaacattaagatctcaatatagaggaagctgaggcatagagaagttactggctgcacagtttgtggcaaagcagcaactagaactcaaatcctccaaggatttccctcacaacagttgctcacaccttagagggattcatcaggtcagtctaatatataactggttattggccacgttgtaagtaccagtcttcactctgacttttagaaaattagtttctaccaggtggacctggagaaaacaagtaaaatgaacaggaaatgtgatgaaataaagagtatcagaaagatgtggaatcatgaagtgtccttctatcccttgatgagtcatttttccagttttatttcagaatctgggaaagcagaggtcttaatgcatcatgatttcactaacacgatgcacttttagccaggggacaaggatgggagcttggtagtcagggcaatatgagaggaacaaaaagattttggtcttttgggataacacatttcatcctcaaataactaagtatccagttctgtcaagacttcatatgactctatggtttcttcaatcttcatgcccagaggctttttaggatgttgttttagtcagtgttttgtaagtgatttttaattaggttactttcattatgtttataaccaaaatacttttgaacaaggcaaaaaaatgttcagtgcatttttattttgataaatttacttacaagtactggaacttacttaatcacttcttcatcagagataacagtttcaattttctgctgggggtctgcaagcaaggcctctaaaccacgaacagcaccttccttgaagagcaccaagggttctgtcccttgcactgaaagtatcctatatacttctgctgacaactggaagaacataaaaaattttaatttttattctaaaacaatttatacctaatataaggatatttagagaaggcttctttttaagtgactgctttattttcattttgaattaattttgctttataattatgtatggttccaaaatctaacctacaacacaaaacacatttagaagtcttaactttttctcttatcctctctacctagtccctgctttaatctgtaaattcatttttggtttacccgttgtgactactagaggttaggctaaaacctgggtttcttaaaactgggaaagatacagataagccattcatgcagaggtacatgcaattctggtgttagataaaaactaatgccacaattgtaactacagcctgcaattccagaaaaagaagttaacaccgtgtgtgaggaaaacaacaaaaaaacccccactgtttaaaattcaggattgtgttatgaatttcaaggtaaatgaaaagaatggagccagggaacagcacagctagctagctagaagtttcaaggatccaggcaacaactgcattatatctgaattaaccctattgtgagccacttctaaaatgtgccaattatatttagacatttagaactggaaagaactttcaagattaacctagtttaagatcctcattttataagtaagaaaaaatgaacacactctaggtcatcagtagaacatgcacagctagtcatgtttttattttattttttactgtattatgtgccactcttcaaaatgtacaatacatgggccaggcgcagtggctcatgcctgtaatcccagcactttgggaggctgaggtgggtggatcatctgaggtcaggagttcaagaccagcctggccaacatggtgaaaccctgtctctattaaaaatacaaaattagctggacatggtggtgcatgcctgtaatcccagctactcgggaggctgaggcaggagaatcgcttgaacccaggaggcggaggttgcagtgagtcgagatcgagccattccactccagcctgggggacaagagcgaaactccgtctcaaaaaaaaaaaaaaaaaagtacaatacaccaatacacgaaacttgcagggtctattctacctattctaagaaagggcacagaagttcattttgctctcacaaaagacacactccaaacatccaaactcatggaaataagtataaatttctcattcatcaattatataaatcctcatctccttaactcatggagacatgttaccaagatacattgtaagataattagaatgaaaacctgattaggaccttatgcttattttcccagaggtattaaaataaataacacatactttattatgaatgattctaattcaccaataagctaaacaaatatgttggaaaattcaaagacttactgtagctttaaatactttatccaggtttacatcttcattattccatattcttaaaaccttaaatcaaaacatactagttaaaaactatcctattctccatttacatataataaatacaaatagttaataatcaacatttatattgtatatattatacaaaagttttaaaactcaccttattatcgtgtacaacaacatactctccagtttgaaagttgcacacagctggacatgttataatttgaccttgtttcactgaccagctccccaagggtttctgatcagaaacctaatgaaattaagataaatacaatattcaagaagtcaacttcaaacattaaaagcaattaagtttataatcaataaaagaaaccattaaaatgacagcatttaaaaaatttactggccgagggcagtggctcacgcctgtaatcccagcattttgagaggtcaaggtgggcaaatcacgaggtcaggagttcgagaccagcttgaccaacatggtgaaaccctgtctctactaaaaacacaaaaattagccgggcgtggtggcgtgcgcctgtaaccccaattactcaggaggctgaggcagcagaatcgctttaactcgggaggtggaggttgcagtgggccgagatcgtgccactgcgctccacccacctcggcctcccaaacctctggaattacaagcgcacctcaccacgttcggctaatttttgtatttttagcagagacaggatttcaccatgttggccaggctggtctcgaactcctgacctcaagtgatccacccacctgggcctcccgaagttctgggattacaggcgtgaaccaccgcgtccggccaaacctctaaaagggtagttaaaatgaaaatataactaagttcctaaataagtaaataagcaaccctttgttaaaaaaacaatagtacatttaaaaattgattatattatgcctctgcatgggaagttatgcctctgaacagcggcatgggaaattaagtagggacatctgggatcatgtctatccaattccaatctgccattgtattcctatgcaggagctgcaaaactgcaaatctacttgacatcccaagtgaaacccaatagagttagcagagtcaaaacggcacagggagctgttagcaacctgttctcaaaacgtcaaagcagatacctaacttctttaaaacatggaaaactatgttcagcagcccagagaaaagtaactgctttctatgcgaccaccaaaagcaaggttagaaagtgttctctatcaggctttaggctgaaatgggggcagggcttgcagattttcccaggactcaactccaggattcccagcgtgaatcagagatgccaacagacaactcacttggaggcaagattcttagcgagctatcaagaaagtccctcactctctaaaattgtccccgcccctacaaagagaggggtgtgaagtgtagacacggctaaaccactattcccactctgtcagtgtcatcctctcccgcccaaccaatctccgttccatcctcccgcgggcggctaagataataaagaccctaggagggaatcttagcaaggccaattccgcgagttccgaagcaaaagcacaggttttctttcttttccgagtctaacccacgtgcactcagacgctctgcccctgcaagtcggaaatatgcctttacaggaaggcaagcaagccagattccagacctcactcagcgtccccaacaggcccagccggctctctgctaagccttctccacgatctctttctgaagctgtgagaaacttgagctcgagctccgcgctcagaaaggggcgagaaggcagtcggggcgctcccaaacctattgccttcaccttatagaggatgactgtcctgccgctgtctgtcactagaaactggtctgttttgtcgctctgctccacgcctaggagtccttcaggcccggcgctcaggactaccgaagacaacgtgaattcttcctccagcgctgccattttg

SEQ ID NO: 7597 - DNA, 131 bp, Homo sapiens
ttttttttttttgagacggagtttcgctcttgttgcccaggctggagtgcaatggtgtgatcttggctcactgcgacctccacctcccaggttcaagcgatcctcctgcctcagccccctgagtagctggg

SEQ ID NO: 7598 - DNA, 1630 bp, Homo sapiens
ctctatatcatggagctattaggtggcagagtctggattcaaacccagttctaccagagtagaaagtcatgatctttccatgactgctttcattgtttcatctagcatttcttcataagcctaaaattatctattggaaaattagctgattcctacaggctttcatcaaaggcttactttgcaccttttttttttttattattttaactacttaggcccccaatatttttggaattttataatcatgaaagataagctcaggaatttcagatgataaaatagttctaaaatagtttgtattacatgataaatgcaatagaatgctaatccttgttctagaaaatttcaagatgttcacttaaaaaacctttcgagtcatttttaaaattgtagtcctgaccttcagtacgtgttaaacaggttttttcaaaatttaatgaggatgagttttcatatgatagtcattttacttcagagtattacaaaggattcaacaattttagtataaaatagcagaacttgttacatatgtatggtctattactagctcagtctaaattttgcacatctatggagtctaaaattcaattgggattacatccaactttttgtttaagtagcaaagtaaaaaaattaaaatgcctagtcttaaatgaaccatagtttgagactccattctcttctcagccactttctggcttcacaagagcaactgtagcttttggatattaggtgagatttggacatttccataaagcaaagcatgaatagaatgctggctgcctttcacctcatctcatccattaactgtgaaaggtgagagccagccttatttttctaaatatcatgatttcaatatgtagcaaatgatacaactgaaaaataatttttggtatctacattatgcttagagttaacatctaaactaaccaccatttcccactcaaatatttatttaagtccctggaaaactttaatcattattgttgacttgtttttactcattttcagatgtttcttttcatttgttatttactcattagaatattcacttagtgtaaggagagattgctgttcttggagatacgaagacttcaaggagtttacagatttgcttgggaaaattagagtatcataaatgaagcaaaactgctagatgaatgtgctggtttacatatagaatttgtttctttctagaccagtggttctcaaatgtgattcctgaaccactggcattagcacacctgggaactttttaaaaattcaaatttggcctggtgcatgtggctcacacttgtaatcttagcaccttgggaggcctaggagagaggacagcttgagcccaggagttcaagaccagcctggacaacaaagtggaacctcatctctacagaaaataaaaaaaaaaaaattgccatgtgttgtggtgcatgcctgtagtcctagctactcaggaggctgagatgggggaacacttgaatctaggaggttggggcagcagcaagctatatgatctgattgtgccacagcactccagcctatgtgacagagtaagagcctgtctcaaaaaaatatgcaaatttgaggttttatcctagacttactgaatcagagactctgggagtggagc

SEQ ID NO: 7599 - DNA, 221 bp, Homo sapiens
atcacgaggccaggagatcgagatcatcctggctaacacggtgaagccccgtctctactaaaaatacaaaaaattagcctggcgtggtggtgtgtgcctgtagtcccagctactcgggaggctgaggcaggagaatggcttgaaccaaggagacggagcttgcagtgagccgagatcgcgctactgcactccagcctgggcaacagagcgagactccatct

SEQ ID NO: 7600 - DNA, 1801 bp, Homo sapiens
gtttctttggccaagtgggagaagagaactgtgacgaggcattggggaaggccaggggctggcaccccgtcacagctgtgtgcatgggcaacgcatcttaggagagtcaatggagagtgagcatccacagttgactcccttaaaaccagctcaggccacacccaccccaagaagtctctgaggacatcttgagggatgcaggcccaatttaaaactcctgcctacagcaaggtgtctgtcttaatactaacacactgcattctatgggtctggtaaacatctgccatctccaccccatgggagcttcttaagggaaagcattgagcttccttctttcattcactccctcagtcgatcagctggtcagtcggtcagtcaccaataactttgttttttttaacaaatatgcctgagtacccactgtgtactgggcagatacagctgaacaatcctctaggaactcacaggtttataagagaaacaggaaaaagtggaggaagtggaaggaagccaaagcatccatcctttcactttcactgaccactgagtgggtctcgctgggtctcagtgaaaagaaagccgtttctactgctttaaccctttccaatgcatgtcccttcagacagagtaacccctgtgagctggtaatcaaacagaattttattcaagtgaaacaaacaatggagaaatatggagtaccccaaatttcctccctttaatttgcacattttgaagtgccgatattagtaagtagtttatttacatgaacatacaggaaatttaacctttaagagtttgtaaaatacggcttagtttaaatgcatttatttgtctaaaattcctggtagttaattgtacttttttttttggcaagttttcacttgaaatctcaaagtactttaaagtaagatggcattaaaaacagcaacaggaataagccgacgtgtcttaagggctcaccatgtttagacactaagtgccgttaacatgtatcactatttactccttgaactcgtcctatttgttattatatacacaccatatactgtattattattattgtctcagcttcaccgataaggaaccctagcttggtgagttcagaattgctggcaggttagggaggaatggacagtggaacccagccctggctgtgcccagaccccctctcctctgcaatactgtctgcctctgaggcgcatggagtccttctccagctcttcaaagcgttgcaggtccatgttgtcccaacagaatttaaaagtgcaggccagcatcacctgcaaagtcccaggttggaagagaacctcgtctatacttctacgggcagataaggtcagaagtacattttccagtcgccacgtaagctgcagctctctctagataaacccgtgtctggaatagaagaaaatgctccccacgtgctggtcttctctgtgaccttttaattctggggcccggggctcccttgttggtcagctcttccctccacaccatccatgtgctgaggcctcaagccaccactgctccagcctggacctcacccctaaacccagtcttgtgagtgcattttctacactcccactagggtgtttaaaggacttctcaaccttagtgtgtcccatagagggttcctgagcgccccccagagctctgcctctcccagtctttcccaccttagtgaagtcactccagatcacttcctgtcacctggaaaatgtggagggtcctcctggagtcctctgtttctctcgcaactcacactctgcacacaagccatggaatggatcaggatccagcc

SEQ ID NO: 7601 - DNA, 1801 bp, Homo sapiens; identical to SEQ ID NO: 7600

SEQ ID NO: 7602 - DNA, 1517 bp, Homo sapiens
aactttaaagatttaaagatactgaagaggttaaaaaaaaaaaaggccctcactgagcctatgtaaagtgatgaattgctccacaaagtgatgaattgctccgcaagcaacatgcagaaatattgcactttagtgttgtaactcacttacattcctagatgatgttcatgtaataatagttcatacatgttgaatgtcaaacacatgccaaatatctcacttgtattatttgtaacttttttcccacaatattttagggttatatagatggctttgagactcagagaggccaagaaaatattttgtgggtgaataactagtaaattggaaagctggagttcagacttttgtttacatgacttcaaaacccattctcttagtctgtacctcattggctctcagggatctttcttagacacctcattgtctatgctctgtgatagtttgaccagttgtgtttgataaaagagatagagatgtacaaatccaaatctgcaaatccttgaccatgtaccatcattcatgtaggttctattctgattcaggacctgcttggagccttctctccaactcatatggcattctcccatcctgacaatcttccctgagtcttctgcaagttgtagaattgctcctccccctctgctataaggcctgcatataaaattggctgaggaatgtgcttggctcttttcctaaagattataaaatgatcatgaccctgtgaggccttaatgccctacagagagaaggccctaaaaatctaaactcaaggaaaactgtgtttttcatagtccagactcatttgtattaaatagatcacaaccagataatccctgagaaatttattatatcaaagtttctcctttttgagttgatctaaaggctaggaagagccttgcacatacctttgaggatagattatgtgtatgtgtatggctaggaatttacgtgtattaattccttaaccatgtatgactgagctcccatgtgacaccaaactttctttttctgagccatttgttgtgagttctttgtgcttttttaaccttgtctcctatgttttcctacaaaccacgtctccactagccatactgaactcaatatttcttctttacatcattttaggcaagctgtacattactggaaagagatgatgggtaaatatactaggtgaaggcctaacatgtgatttagctggctatgggtttaaaagctcatcagaagtgaggttgctgcacacaaaaaaaggagaagcagcagtgaatattagcaaaatattctctaaaagctcttcttttctaatatgggtcctggggaccctgtccactcaaaggagggtcttcaaatttgggaaatatatgaattttagcagcatcacagattttattttactgttgttttgtttttagtaagtgaaatctgagtccacatgcccgaagaacttatatcatctatgtgaaatcatatcttggagaaaatgaataggattggggacagtggcagcaaatcttttc

SEQ ID NO: 7603 - DNA, 1517 bp, Homo sapiens; identical to SEQ ID NO: 7602

SEQ ID NO: 7604 - DNA, 1811 bp, Homo sapiens
ccttactgatgcattctcgaaaacctgttagggtcctaagcattctccagttagtattgggactttacccctcctgtaaagatgttatgccccaaaaatgaagtggagggccatatcctgagggaggggagggatctccagagttggaagagtgatgcctttttgtccgcacttatatgaatacaagaatgtcatttctgaagctccccgtatcctagcttctggaatagcttttgttaggcctgctagtctgaggagggatcctaaaattccggataagacagtcccccaccctgatggggctttgggcaaaaattatgtctttctaattggtgagcccgggtgcctaaagaaggttaacagagtcctggagtttatactagaaatgattcttacaggagaaactagaaaagcaccagagacagggagtggtttccagaagcgggactagcctcagagaagagaggcaagagaaagtttttctgacaagcattaggacccaggaggcaagggtcaggataggtaggatagatgggcgagtctcgcttgggcaacatgacttcgagagttctgctcatggccacagggtcaaccaacttgttgtcaggaccccggagctgaatggctttcctctctgtcgaccctcggctcagcccggaagtacaggaaaagcggaaagctggttccaggcaaaccaacactcccaactccgaagagtcaggggttgttagagagccctatcccggaaagcctgacacccgtgtctttagtccagcggctgtgctagtcagttttaactggccgctagtcacttttaactggccgacaggtgcctggtatttagccaccgaattctaagggaaaacaggacagaatagcaagtgaaaggggtcagatggtactcactgcttggcaatagcgtcagccccaagtgaggatggggaaggggttttacagtcctctataagcaggaattgtcccagtctgatgtggctgctgcgtagtgcccgctggcctccctcttgatcttcagggggtgtcttctgcccagctctcttcttgcttctgctaacttgctgatgcatgctgctggcgcaactgtccttgcgcatttggactgggcttgaagagggaggaagtattcattcccttaagctttcaggcttgggggagaatctttcacaacccaatgatactcttttaaagttactttaaaatgtgcaataaagttttgttgactgtagtcatgctgttgtgctatcaaatactagatcttatgcattctatttaactatatttttgtatacattaactgtctctcccctcactcccttctcagcctctggtaaccattatctagtctctctctccgtgagttcaattgttttaatttttagcttccacaaataagtgacaacaggcaaagtttgtcattctgtgtacctggcttattttacttaacataatgacctccagttctatccctgttgttgcaaatgatgggatctcattctttttttatggctgaatagtactccattgtgtatatgtaccatgttttctttatccattcatttgttgatggacatttaggttgcttccatatcttggctattgtgaacagtgctgcaggaaacatgagactgcagacctctttggtatactgatttcctttcttttgggtatatactatgagtgggattgctgagtcacgtggtagctctatttttagtttttggggatcctccaaactggtctccatagtgcttgtactaatttacattcccaccaatggtgtatgaggattccct

SEQ ID NO: 7605 - DNA, 372 bp, Homo sapiens
ctctccctacaacttgaaggggacataaccgatagcccaggggtttttgtggttctttggagatttctttgcttatttccttctgggcaggggagattagaggaggcttatcattaataggaagggtagctatagggaggataggatatgggggtaagctgagaggtcctcctatgggatgtaaattgcaaactttgcatagttgtgtattctccttcaatgaaaagaaagcttggacataaggtgtttcactccatttgccttccctcttacagaaaaggtcaagcttcaggatagtattgtaatttatacttccctcaggtggccatttttccccatcagagagagaatatgggggccaggccatagtgc

SEQ ID NO: 7606 - DNA, 813 bp, Homo sapiens
taaccccaagaagaagataagtaattctgtctgaaaactttttggctgctcttaaggtcgagataaacctccgcttatttgagatggctcactgcaatggcctcatgggtgaatgacagtcataggagaagaagagaaagctaagcatgcctcctgcagccaattcacagaggttacacaaagcaagcaggagccagtgtagactctgaggtatcaaagaacatatcaagaaaaatggaggagagtttagtcttcatgcttgggattaggggagaaactagaaaaagtcattctatgggcagcaggcatccttataagacagaaattaaaggcagggtgggagatggggacagtggagcaggaaggaaagcaggaacactgaccaagttcactggaccttacagagttaagtgttaccagttaccatgcacccaggtacattctctcccaccatgcaccacagttagataccaccagcaagcaccagaagccatggccagggcattctctgctaaaacataccattaaccaaaagaagaacacaatgcagctacattcatttcatttgtattctttgttattggtttaattaatagttttgtaaggtgggtaaaaagtaaaaaacacaccaaccttctcgcagctctgagggatgtagggggtttgatgcagaacacaatgaaatgaggaaaggagaaaaacaagggaaacacagagagagtaaaaaggccatatcaaggctttcaactgctacttgaacatctttattcgctctagttcatccttcctatctcagctggaaaagttagcaat

SEQ ID NO: 7607 - DNA, 813 bp, Homo sapiens; identical to SEQ ID NO: 7606

SEQ ID NO: 7608 - DNA, 1393 bp, Homo sapiens
ctgggctcaagcaatccccctgcctcagcctcctgagtagctgggactgtaagtgggcaccactacactcagctaatttttttaaatttatttttcgtagagggtgtcttgctttgttgtccaggcttgtctcaaactcctggcctcaagtgatcttcctgcctcagtgttccaaagtgctgggatttacaggcatgagccactacaccatgccaaagtcacacctcccctgtcccctgggatatggcccaggaaagcctgtcccctctggggcttctaattcttgtctgtgcagaacctagcgtgtgtgcagagggataagaattgaatgaggtgatgtctgtgaagtgcccagcatagtaactagcatacaacagactgttagtagttggtaccttatttgagcgttccagaatcactacattgttccctgccattatttaaaataaaaaattcaccttttaaattgtgggagctctgctttagttacatatgaagctggcttttcagcagttgccattctgtaccgacatttgctttatatatatatattgtttgtttgtttgttttttgagacagagtctctctctgtcgcccaggctggagtgcagtggcgcgatctcagctcactgcaacctccacctccctggttcaagcaattctcttgcctcagcctcccgagtagctgggattacaggtgcgtgccactatgcccagctaatttttgtattttttagtagagatggggttttgccatgttggtcaggctggtcttgaactcctgatctcaggtgatctgccaacctcggcctcctagagccacatttgctttaaagaccccccgctttgcacaactataaatgagtgagtgtcacctctttttggactagtctccccaggaattcccagctgacttttttcatttgttttgttttgtttagttttgaaacagagtctctgttgcccaggctggagtgcagtggtgcgatcataggtcactgcagcctcgacctcctgggcttaagtgatcctcccaccttggcctcccgattagctgggactacaggtgtgtgccaccacacctggcctttttttttttttaagagatgtagggctgggtgcagtggctcactcctgtaatcctagcactttgggaggctgaggcaggcggatcatgaggtcaggagtttgagactagcatggccaatgtggtgaaatcccatctgtactaaaaatttgaaaattaggcacagtggcttacgcttgtaatcccaacactttgggaggcagaggtgggtggatcatgaggtcaggagtgtgagaccagcctgaccaacatggtgaaaccccgtctctactaaaaatacaaaaattagctgggcgtggtggtggg

SEQ ID NO: 7609 - DNA, 1392 bp, Homo sapiens
ctgggctcaagcaatccccctgcctcagcctcctgagtagctgggactgtaagtgggcaccactacactcagctaatttttttaaatttatttttcgtagagggtgtcttgctttgttgtccaggcttgtctcaaactcctggcctcaagtgatcttcctgcctcagtgttccaaagtgctgggatttacaggcatgagccactacaccatgccaaagtcacacctcccctgtcccctgggatatggcccaggaaagcctgtcccctctggggcttctaattcttgtctgtgcagaacctagcgtgtgtgcagagggataagaattgaatgaggtgatgtctgtgaagtgcccagcatagtaactagcatacaacagactgttagtagttggtaccttatttgagcgttccagaatcactacattgttccctgccattatttaaaataaaaaattcaccttttaaattgtgggagctctgctttagttacatatgaagctggcttttcagcagttgccattctgtaccgacatttgctttatatatatatattgtttgtttgtttgttttttgagacagagtctctctctgttgcccaggctggagtgcagtggcgcgatctcagctcactgcaacctccacctccctggttcaagcaattctcttgcctcagcctcccgagtagctgggattacaggtgcgtgccactatgcccagctaatttttgtattttttagtagagatggggttttgccatgttggtcaggctggtcttgaactcctgatctcaggtgatctgccaacctcggcctcctagagccacatttgctttaaagaccccccgctttgcacaactataaatgagtgagtgtcacctctttttggactagtctccccaggaattcccagctgacttttttcatttgttttgttttgtttagttttgaaacagagtctctgttgcccaggctggagtgcagtggtgcgatcataggtcactgcagcctcgacctcctgggcttaagtgatcctcccaccttggcctcccgattagctgggactacaggtgtgtgccaccacacctggcctttttttttttttaagagatgtagggctgggtgcagtggctcactcctgtaatcctagcactttgggaggctgaggcaggcggatcattaggtcaggagtttgagactagcatggccaatgtggtgaaatcccatctgtactaaaaatttgaaaattaggcacagtgcttacgcttgtaatcccaacactttgggaggcagaggtgggtggatcatgaggtcaggagtgtgagaccagcctgaccaacatggtgaaaccccgtctcttctaaaaatacaaaaattagctgggcgtggtggtggg

SEQ ID NO: 7610 - DNA, 124 bp, Homo sapiens
gcggatcatctgaggtcaggagttcaagaccagcctgaccaacatagagaaaccccgtctctactaaaaatacaaaattagccaggcatggtggtgcatgcctgtaatcccagctactcaggag

SEQ ID NO: 7611 - DNA, 448 bp, Homo sapiens
cagcatcctatcttgagtcctccctcatatccatcctctaccttgcgctgctcaccaggaagaccacagcagcctcctcactggccttctctgttccagactcatgctccataccagcaccagtgtgcttatgtgatcacataagtatttatgcgatgagtctttatcgtcgggtaccagcaagagaatgtatgtaagtggataaaaatgtaattcaacatgtgttttatgaattctggaaacctctttttattctcagaacatcaattcaaagtccatctcctgttgaaattcatcagtgggttaaactccgaattgtcttgatgctacaagcactacatcatgtgtgtgtagtttcattctaaagtctggttgcttcacttcttgttattaaatttaacaaacataactctccaacttggcgtttttgcagagtgggatcctttta

SEQ ID NO: 7612 - DNA, 448 bp, Homo sapiens
cagcatcctatcttgagtcctccctcatatcgatcctctaccttgcgctgctcaccaggaagaccacagcagcctcctcactggccttctctgttccagactcatgctccataccagcaccagtgtgcttatgtgatcacgtaagtatttatgcgatgagtctttatcgtcgggtaccagcaagagaatgtatgtaagtggataaaaatgtaattcaacatgtgttttatgaattctggaaacctctttttattctcagaacatcaattcaaagtccatctcctgttgaaattcatcagtgggttaaactccgaattgtcttgatgctacaagcactacatcatgtgtgtgtagtttcattctaaagtctggttgcttcacttcttgttattaaatttaacaaacataactctccaacttggcgtttttgcagagtgggatcctttta

SEQ ID NO: 7613 - DNA, 124 bp, Homo sapiens; identical to SEQ ID NO: 7610

SEQ ID NO: 7614 - DNA, 904 bp, Homo sapiens
tggtgcctcaggaagtctttgtcggcaaatctgagtatgctggaaagataggagcacataagactggttggcttgtatttgggggagaccgattgtgtcagatatgtatgtggaacgtagctgtccttgccgagtctgacctgtatgaaatgcatatccatggctatattattttggatttatggaggaagcagagcatttctgacacttaaggttgtatgcgtgagggagaaggctttcacagcttaacttgtaccagagcagctgcatgggtgctgacagcttaacttgaaatctgtgggaggaaggatcctttttcactcattcaacaaatataaccattcaatgaatggtccatgccttgaggtgaggatcatcaaggtgtctctgtaaatagcctggatgcaatctgaggggagttgttttgacggtggtaggtattaagttgagggaggcagtgtggaattaaaaccagagaactgtttttgggtactggtaattgttaatatatgtgcctgtggatgttggaacttcttggctgggctgaaggaatcctttgaaagactgatttcggcagggcgcggtggctcacacctgtaatcccagcactttgggaggccgaggtgggcggatcacgaggtcaggagatcgaatcacgaggtcaggagatcgagactatcctggctaacaggatgaaaccccgtctctactaaaaatacaaaaaattagccgggcgtggtggcgggcgcctgtagtcccagctactcggggaggctgaggcaggagaatggcgtgaacccgggaggcagagcttgcagtgagctgagattgcgccactgcactccagcctgggccacagaggagactccatctccaaaaaaaaaaaaaaaaaaaaaaaaaagac

SEQ ID NO: 7615 - DNA, 904 bp, Homo sapiens; identical to SEQ ID NO: 7614

SEQ ID NO: 7616 - DNA, 904 bp, Homo sapiens; identical to SEQ ID NO: 7614

SEQ ID NO: 7617 - DNA, 102 bp, Homo sapiens
gccaacttagctgtattcttctggaaaatgggatgtttcttgataggctagattagtggttcttaaaagttttttggggtcacttatccttcagagaatcgg

SEQ ID NO: 7618 - DNA, 718 bp, Homo sapiens
tgatttcatgtagtaaggatcccgtctatgaactctatgaatatgaggtaagaatgcatgaactaagccaacttagctgtattcttctggaaaatgggatgtttcttgataggctagattagtggttcttaaaagttttttggggtcacttatccttcagagaatcggatgaaagacactgggccctcaagttagaagatgagcataagcgcaatcacatgatttatatatatgattttaggaacttaaactgtaatgaaatagagccaatttatatttagatctcatttgaaaacctttcattttcattgttcgggtgtgtggatgttagtatgagtttaaggtgaaggagtctatgttagtatttgaacatgttgacaggatccatatttttaatttattctttttatcgtctgcaaacatttctgcagtattagtaaatgactctgtatttggtaaaaagggaagctaatgtcgcacaagtatctatggctttgttctttgtcagtatctttttgttctcaaactctgagaagcgtctttttttcagttttggattgggcctgaggtgatttgaagctcctgtcttggagtttaacttagttataacaaacactgagttaatcctatgcaggagacacaaagataattaatatatggtctctgtgcttgaagagacgctaattttctgtggttgaagagatgctgtgaattgtgt

SEQ ID NO: 7619 - DNA, 179 bp, Homo sapiens
gccgccattttgggttcgctttgcggaggggagacgatcccagtctcggttgcgggacccgcctcccctcagtttgccccctttagccttccacctttcccttctcctctctcgcatttccgccagtcagcttacccgctggccgcctcctgacaagcgggagggatccgccgtggacc

SEQ ID NO: 7620 - DNA, 177 bp, Homo sapiens
ccgccattttgggttcgctttgcgagggggaaacgatcccagtgtcggttgcgggatccgcctcctctcagtttgcccctttagccctccacctttcccttctcctctctcgcatttccgccagtcggcttacccgctggccgcctcctgacaagcgggagggatccgcggtggacc

SEQ ID NO: 7621 - DNA, 718 bp, Homo sapiens; identical to SEQ ID NO: 7618

SEQ ID NO: 7622 - DNA, 30013 bp, Homo sapiens
gcgcgcggcggcgcagtaaacagtctccttccacaaaaccatggcgtcgctcaaatgtagcaccgtcgtctgcgtgatctgcttggagaagcccaaataccgctgtccagcctgccgcgtgccctagtgagcggggaggtcgcggggtccaggggcgcgggtgtccggccatggcgggagggcgggaggccgggaggccgggcgggagcgggcgggctgctggaggggccggggaccctcggggctgacgcggcctgtggcctctgttgttacagctgctcggtagtctgcttccggaagcacaaaggtgagccccgtccccgccagccctcgtaccactgcgcacggggcagcccccacgtccagcctccgtcttgggggcgtggacccttggcgtgcgcttcctttcccgcctcgggtctccgcgggttctgcaggaaccttgcttcctctgacttggtccctggtgtctctgtgtgtcggacagttccctctgttgtccctgcctgtaatcgctctcagggttttggtcagtagcctttcttctaccccgcttctccttctgcgtgttactcttttttgcttagaaatagtttccgattgcttttcccaccgaggtctaccctagcagtttcttcctcagtattctgatgtagcccctcaccatttggctgaaactgcgctaactttaacagtattttcactcgtgtaaataatgtcttgttagaaacaaagaggtaagtccatgtacaatacaaggagacgtccttgatttgttaagagaaaaaaagaaccaagtaagttctgtgtatgatgtgaacacacttttgtacagttaaaaagaagtgacctggccgggcgcggtggctcacgcctgtggtcccggcactttgagaggccaaggcgggtggatcacctgagcccaggagttcgagaccagcctggccaacatggtgaaactccgtctctactaaaaatacaaaaattaggcgggcgaggtgcgcgcctgtaatcccagctactcaggaggctgaggcaggagaatcgcttgaacccgggaggcggaggttgtagtgagccgaaatcgcaccactgcactccagcctgggctacagagccagactcagtctggaaaaaaaaagaaaaaaaaaagtttgatgtaggtggggcgcggtgggtcacgcctgtaatcccagcactttgggaggccgaggcgggcggatcatttgagctcaggagtttgagaccagcctgggcaacatagcgaaaccccgtctctataaacaaacaaagccaggcgtggtggcctgtgccagtggtcccagctactcaggaggcagaggtgggaagatcgcttgagcctgggaggaggaggttgcagtgagccaggatcgtaccactgcactccagcctgggagacagcaagactgtctcaaaaaaaaaaaaaaaaaagcttgatgtagattctttcagcttatttccactcttgtaccaatatatagaacttttttttttagcttttagaatctcagcaatgagactgtacccaacatcctcatttgagtttatatattgggcactttttaaaacctagtgcatacaggctgggcgcagtggctcatgcctgtaatcccagcactttgggatgccaaggtgggtggatcacctgaggtcaggagttcgagaccagcctggccaacattatgaaaccacatctctactaaaaatacaaaaataagctgggtgtggaggtgcgcgcctgtaatcccagctacttaggaggctgaggcaggataattgcttgaaccatggagacgcaggttgcagtgagccaagactgcaccactgcactccagcctgggcaacagagtgagactccatctaaaaaaaaattaaaaaaattaaaaataaagactagtgcatacaagttctagctcactgacttaaaggactgtatgttatttcattatatagttggtacgaccattatttatataaagcctcctattggttgatttttctttttaatatttgtttttaattgacacataattgcatacaatttgagttacagtgtgatacttcgatacctgtatacaatgtttaaggatcaaattagggtaattagcatattcgccccaaataatcatttcttcatgttgggaacactcgcaatcctctcttgtagctatttgaaagtataaattgctgccaacatggtcacactaaggtactgtgtaacactagaacttattcctcccatctagctgtaattttgtatccattaagcaacttctccctagccccctacactctactcttcctagcctccagttaccactattctgctctctacttctgtgaaatcaacttgcttagcatccacatgttaacaagaacatcttatggtgcctggcttgtttcacttaacattatgttctttgggctcatccatgttcctgcaagtgacaggatttcatggttttttatggctaatatccagtgtatatatgtaccgcatttctttatccatctgttggtggatccttaggttcattccttatcttggctgttgtgactagcagtaaacgcaggagtgcaggtatctcttcggcagactgatttcatttcctttggatatatatacagtagtgggattgctggatcatatggtagttctattcgtagtttttttttaggaacctctatgctgttttccataatgactatactaatttacattcccaataacagtgcagtgtataagagttcccttttctccacatccttgccaacatgtttttttctttttgataatagccattcttactgtggtgagatgatacctcattgtggtcttgacttgcatgtccctaataattagtgatgttgaacattttttcatgtacttgttggccatttatatgtcttcttttgagaagtgtctgtttggctcatttgcccatttttttttttttttctttttgagacagagtcttgctcttgtcgcccgggctggagtacagtggcgcagtctctgcttactgcaacctccgcttccagggttcaggtgattctcctgcctcagcctccaaagtagctgggattacaggtgcctgctggctgatttttgtatttttagtagagacaaggtttcaccatgttggccaggctggtcttgagctcttgacctcaggtgatccacctgcctcggcctcccaaagggctgggattacaggggtgagccaccatgcccggcccatttgtccacttaatttttttttttttttttttttggctgttgagctccttgtgtattctagatattaatcctttgtcaagtgaatattttgcaaatattttctcccatcctgtgggttgtctcttcattctattgtttcctttgttgtacagaagcttttttgtgtaatagaattccatttgcctatttttgcttttcttgcctgtgtttttgagattttattcataaaatctttgcctagaccaatgtcctgaagcatttcccctgtgttttcttgtagtagtttcaggtcttacatttaggtctttaatccattttgatatttatatatggtgacagataaggatctagtttcattcttctgcatatggttattcttacagttatcctatttttccagtaccatttattgaagagtgcttttttccccagtatatgctcttggtgcctttgtgaaaagtcagttggctgtaaatgtgtgaatttatatctgggttctctattctgttccattgatctatgtgtctatttttatgctagtaccatgctgtttagatattatagctttgtagtatatttcgaggccaagtagtggtgatgcctccagctttgttctgtttgctcaggattgctttggctattgggggtcttttgtggttccatattaattttagaatttttttttgacatttctgtgaacaggatcattggtattttgatagggattgcattgactctagattactttgggtagtatggtcattttaatatttatttttcttattggtggatatttacattaattttgcctttgttgctgctataggcagtgttaaagtggtatttaataaataatttttatcagaaatttctaatagccacatctgttgtacacttttcatttgtcttttttatttttttgcaacaaagtcttgctctgtcacccaggctggagtgcagtggtgctcactatagccttgacttcctgggctcaggcagtcctcctacctcagcctcccaagtagttgggactgcaggcgtgtgccaccatgcctggcttatttatttttaattttaatttttgtggagatgaagtctcactgtattgcctgggctggtcttgaattcctgggctcaagtgatccttccaccttggcctcccaaagcgttgggattacagacgtgagctacccatgctcagcctgtcatctttcttgattcccatgaatatctgctgtgtttggctttttctttcttgatattctttggaggctgggaagataccgctctgtggtattctctcctccctttctcccttcgaagtcctaaccaggcctgaccctgttacagcttctgaggtcagatgagatagggtgcattcagggtggcttagctgtagactctcgttttcttttttttccttttttcgagacagggtcttgctcttttgcccaggatggagtgcagtggtgtgatcacagctcattgcacccttggcctcctgggcccaagtgatcctcccaccttagcctcctgagtaacggagacaaactttatctatttttcgtagagacagggtctcactgtattgtctaggctggtcttggactcctgggcttaagcagtcctcctgcctcaacctcccaaattgctgggattacaggcaggagccactgtgcccagcttctccttccttttgctagatctctctcttgaaatgtggtccttgacttttattcctaggtaggtgatctctctttcactttaaacttttttttttcttgctgacatccaactgtttagctccagcctctttttgagcaccttagacacaaatgtattttggggtcaggtacaacccagaaaattcacctctccttcagtccctcctgctgtgttccttacacatatagcatagccgtaaagttagacccggattccaaatctgcctctgctacttactagctgtggaccccaatggacaagtttattacaagaaaatttaatcctttcatctgtaagtggaattaacagtctccatgtcatgggggcttcgtaaaggttcattgagccactatgtatctcactgtgtacctggcacagtgctcggcacttagtcactggcagctgttgtaactgccacctacatgactagaacctttccgtagcatattgtcaaatctacattttaagtctctacaatctggtcctgcctttatgtcctcagaaccctttcctgtgacttcatgctctgttgatactgtcacccaggctggagtgcagtggcacaatcacagctcactgcagccttgacacactgggcttaagggatcctcctgcctcagcctcccaagtagctgagaccacatgtgtgtaccaccatgcctggatgattttttttattttctgtagagacatagtcttgctaggttgcccaggctggtctcaaactcctgggctcaagtgatcctcccaccttggcctccgaatgttaggattacaggcgtgagccagcacagctggccttctgttgactctgtaagttctttggtggttttgcccctagttttatcccatctggtatctggtttacagcagctatttcaaacacctcagttaattgtggtgagaattttgtaagattcggcagggtagggaggatggggacaggttcttggggtgcatgaatgagtcctgctttctcagcctgctggcggttttccttaatctctctcttgctttgatctctcacttcttccacattcctgggcacccacccacatcccttaccccagacacttgcttcctacctagatgctaccttggtagggaggtgcagccttgtcgctgaaatggaggtaatgtgggcctgggatttgtgtctttttcagaacagtgcaaccctgaaactcgtcctgttgagaaaaaaataagatcagctcttcctaccaaaaccgtaaagcctgtggaaaacaaaggtgggttggttgacttcaaacaaatctacaagggacttcacatagaataagtcgaaggaaaaggggagagtggggctggtcagggaatccagaacaatagcttcattgggaaggaacagcttccttagccttgagcatcaggagtggggccatgtcatcatgggtgatattgaggcaacagcctgaaagcagtattcaggagaagaaaaatgggcagaagacagagatgagaaaggccatggctgtggtttgggggtttgcggtgggccctgctggcaggagccttctctagcccatagctgctggtctccctccatgaatctggctgggactgtcagttcacctgaactcagcccaggcaggaggctttctttgtcctagatcatctcgctgctgctgggggttcagagctcacagcagtagtgggctgtcaacccatccgtccagccatctaaacgttctttaatacctcctgggtggcaagcaccatgccaggctctgaaagcagcccctctggtgccaccaaagaggtattgaacattcactccaaaggcatggcccatttttgccctttgagaaatttccaggttgggttcaggcaatgccagcagtttctgcccatgctgaaagcacaggagattctacttggctggtttttacagagcatccagttaattggcccatcacagggttggagccatgttgaggtggggatgggtattaagttattagacaaccggggtctaagcctaaagaccacaggaccacatatacagtaaggctgtgaacactagagtgcatttgttaaaatcaccaattctttcacttagcctccctcttctaaaaaaggagtgttagtatagtcacagactccggagaagaggatttttgtctgtacctgcttgaatacccctatcactatcacatgtgcgtgcacacatttttatcctgttcaagtagtggttaaaatctggtgcccaggcctcctttttagccatgagccattgactgttttgtattccttagatgatgatgactctatagctgattttctcaatagtgatgaggaagaagacagagtttctttgcagaatttaaagaatttaggtaagtctgtgctatgcttgtcaatcgttgagatacatttactgtgttgtaaggattgtgattttttaaaaagtttttaatttcttgaataagtatggcatgtagggctcttactatctagccacataatctgtaaacatacagggtttcacacctcccagcctgcccacaccattccttctgcctggaatcctgctggtcttgtgggttggcaaaattctgctcctccttcaagccttggttcaagttttcttcactcagctaagcttttcttgaccttttgtgtctctttcagaattaggcacttttttggtttcccatagcaacttggacttaatagtaataaatcactgttacatttcatggtaatttgtctctcacataccgatttgtacagcagggacctgtattcccagatccccagtgctcagctcacagtccagcccttaacacaaactggttatcacatgatttgatttagggggaaacaggtgttgccatttttgtagcactgcttattcagtccttacaacattctgttacatgtgcatggggtctgttaatttcattcttcccatttcacagaatcatgttaaaaggttatgttttgcacttagtctcatggtaatgattagttagactgagtttggagatgagctagtaataggtgtgaaaaattttacagactgtgaagtaccatgcaggtattattgttggttccctgctactggtgctgctgcatgccaaatggcatgcttagacatcattcagattatttcgtatagccgtcttcaccactggcaacttttatggctagaaagaaagaaaacatgccagcagcttaatgctactatttgctttgtgattgtgctgataaagcatttttttcttagctgaagtggcacgaagttacaatatttacaaagataccaagaactggtatctgttactgcatttaatgcggaaatagtttgatatgctggtcttacctttcattttatagaggtggggtctcgccatgttgcacaggctggtcttgaactcctgagctcaagcaatctgcccaccttgacctccccagttgctggtattacaggcatgagccaccacaccttgctgatagttttattacacttgaaatagctcttcacttttcagccatctccatgtgtttccacttgaactcagactggctttttttcttgttaatttttaggggaatctgcaacattaagaagcttattgctcaatccacacctcaggcagttgatggtcaacctcgatcagggagaagacaaagcaaagctcatgagagcttacatgcaagagcctttgtttgtggagtttgcagactgctgtttaggaattgtggagccatcccagaatgaggagtcttaagatggattattgtgctgcttgctcaagcgtgtgcttgactcctggaacctgcctgctccctctcccagaccagctagtttggggctggggagctcaggcaaaagaggtttccaggatgcagattaggtcatgcaggcctttaccggcattgatgtggctcatgtttcaggcagacttggggtccttaaggtggcaagtcctttatggagagaaaacttgacattcagatgattgtttttaaatgttttacttttggtacagttgatagacatcataaacgatatcaagcttacacttcatatggagttaaacttggtcagtgttaataaaatcaaaacgtgattctactgtacattgcattattcataatttaattgtttgaaattacattaaataaatcaactaattaaatactaaagttttgttcctttttaaaggaaataaccacaagatttttcccagcccaaattccagcgccaattttaggccaactttggctgttttcttccaaaagtgcttatgtggaattgggatccccagtgtagtgacagacagtcatgactgctgctgagtttgatctgtgaaggtagtgaaatgtggccctgatgtttcttaaccctgatttggtaactaccagccctgacaccatcagtgcttgatgtagcctggaaccccaggcccactgacgcactgggcacggggctctgggtcgaaggctggagccgtcactgttgttcatgtgcatttggagcactgtgggaatagtctggcagctgtgtgctgattaaatgtctttggcaaggcagggggcaggaaaaggccttgtggaaacaaaggcaccaaggatcaccccagcccagtgaaggcagaagaggtcacgtggatcagcctgtgtctttccagcagaatctgattaaagcctgtaatgctgtagggtgaaggttcagggcagatgtcagcataccgcagtggagactttctgcagtgaaactttatcgatccctagaggggagagagagatgcagctttagcactagttcctgggagtgccagggcctaacaaccccacagagcagacgctaaaaatgcaagaaggtatggacaagtactagtattgggggccacagcaggattaaaatagcattacatccactcagtgtgagacagatgaggaaaccctaggaggaggcgctccctaagaggaatgtctgtcacattcctatgactgcttaaagccagaagggcaaaacatttacccttctgtttagcaggcctgtgtgttttcatgggagacttcatccagattaaggcctatagttattcctctgaatggaaatttggtgtttccttctgccttgtcatttcacttactccttgctgtgactccatgcagtaggttgagtattagcccattttatagacaggctccgagaaaatgtgtcttagccaagatcatccagtgaatggggcagaaccaggatccagaccctggggttctacctcccagtgcaacatactttcacctttcctcggccactttaattctatgaggcctggcttactggggtgactcacaaagccctgagtgacaatgacttcctgagtgtgctggctgacttttccctggatgcttatataaaaacagctgggcacggtggctcacacctgtaatcccagcactttgggagggcaaggcaggcagaccacttgaggtcaggagtttgagaccagcctggccaatatggcgaaaccccgtctctattaaaaatacaaaaaaaaaaatatagccaggcatggtggcacatgccctgtagtcccagctattcgggaggctgaggcaggagaatcgcttaaacccactgcattccatcctgggcgacagagtgagactccgtctcaaaaaattaaataacatgaaaaaaaaaaaaaacccacagagaacttggaccactgaccctgcttgtcatttcgtcagccagaaaaggaaaaaaccaagcaatacaatttggggaaaacatggtgccaaatccagtgccatttgaggtaacaaactcctcacaacccaagttgtgatgtgggactaattagattatttgctctcaagtcttgggtagtttcttttttgctatgtctcgtgaatttttcctcttttctgtaattgacctattattaccctaaaccaaacttttttttttttttagatggactctcgtcctgtcacccaggctggagtgcagcggcgcaatctcggctcactgcaacctctccctcccagattcaagcaattctcatgcctcagcctcccgagcagctgggactacaggcgcctgccactacgcccaaccaatttttgtatttttagtagagatggggtttcgccatgttggccaggctggtcttgaactcctgacctcaggtgatacacccgcctcgacttcccaaagtactgggattataggcgtgagccaccgctccaggccctaagctaaactttcatcacctcctgctcctgactcatctaaagccttggttctcacagtgtggttcatggagcatcagaatcagctgggagcttgctagaaacgcagcattgcatttggaaatgggactagaagatttagagatgctgaaataattagaagcagtttttaaaaagataaagggctctggaagattcccagttataacaaaataaataatccaaacctgcagctgatggggacatgcagccctctggtttacccagtagggttagggatggatcttgtcccagcctcagtctcattcccgctgtgaacttgtaggctttgctcctgctgttctcaggaacaaagctgtcatggccatcacacacaacgtacctgaggcagcgctcggatggacgtgacaccagcctggtcttgtgctgtctggacagtgtagctactggggctgcccctggggagctggaggcaagcccagaccactaatttcctctgaaagctgcctacacccatagccgtattggccaggaccagtcccaggggccagaggcggattattgcctccaggagcctggtctgcagcggcgaggtgctcagggaacagggagcttgagagaagtgtttttcttccacaccatccagctctttagcagcaaggcaggccattctgatcttaaaaagcaaatatccctttatagctttagatttatctagccctcttagcagaaaatggaaatcaaaactatctttaacaaatcatcttaacaaggtgaactgaaggcacctggttgcaaacagctggctgccctgaaccaaactggttccatatgccacaagtctatacaccccaggcaactgtgcttaggccttacatatgctacttgaaaacaagataagagtccatcaagatataactgatatgccataaaacccagtcttctaaagtgtacatcccagagtttggtatattcccagagttgcttataccactcttcacctacataaccaccctgcagggtaggtgttactgtgcccactgcatacatgaggaatatgaggctcagagaggctaaacaacctgcccaaggccacctgcattgcagtggcagagccagcattcccactcgggtccatctggtccccaaaattgatccactgcccaccccgacttcttgggtcttacttactctccacttctgccatgcacgcttgatgactgtggcagctgcatgcagcctctggatgtgtttccgagttaaccaggaacgaatggctaagaggtttgcccagaaacaggaaagagataataaaggggccattagagctgtcagtgacctcgctgcagcagcaccacagttgctgtcaaagtttcaaatacgttttttttttttcaataaattgctacaaataaggttctaaaatcaatacataaggcaaaattggcttttaaacattccttacactgcccacacacttgaatacacctacacaacacagtgaaggggcactggggagaaggactggctgagggcccagcaatcacttcccgtctcaggctgggtccaggtcagcacccagggaatgggaggggtctggattgtctgtgcctttaaaaacttttttttttgttttgtttttaatcctcagttgaatttgttcgctttatgcatccctgatctcacatcaccatatacccaaacactgatacaattaatagatggtggtaatttttattcccttctctgcaatttcagcatattctttttctttttgtttttttttttttttttttttttttttttgagacagggtcttgcccaggctggagtgcagtggcacgaacagcttattgtagcctccgtaaggctgtagcttcaatctcccaggctcaagcaatcctcttgcctcagcctctggagtaactgggactacaggcatgtgccaccaggcacggttaattatgttttgttgttttttttttttttgagacagagtcttgctctgtcacccaggctggagtgtaatggtgcaatctcagctcactgcaacctctgcctcctgggttgaggtgattctcctgcctcagcctcctgagtagctaggattataggtgcatactaccacacttggctaatttttgtatttttagtagagaaagggttttgccatgttgcccggctggtatgaaattcctgggctcaagtgatcctcccacctcagcctcccaaaatgctgggattacaggagcgaactactgtgcccagcttccttatacaattttttaatgcctacacacacacaaacacaccttaaaaggagggcatcgcccttaatatgtagtttgacatctaggtatgaatatcattttggaagtggttctccattaaatttataatattcttcaaaaacacttagctgcatcatagggatggtccagtccatcatttggccatgatgtcaccactgttagatatttgggttctttccaacacttttccttttcaaaataagaccactatgaacatgttggttaatacatcttttcatctgatgaactccttttggtttttaccttctccttaaattcattccagccctagagcccagcaggtaatggtttgagttgtcataaagggaaaaaaagttggcctaaacagctgtcagggtctgagaaaggaattaaagacaacgcttagacaacgcttagcctccacttcttacagagcacctttgtttgtggagtgacttggtttccattgaactggagagacgttatgagtgagggggacagggaatttgaatcccagcacaccacagggacatctcttcaggctgggacacagcttcaggagatggggactcgacgagctatgtttcaaaggaaaccaacatcctgtggggtctgtgagcagtgctgacaggtgacctgcccacctacctgcctggatgagcatgacggcccgccactgccgctcctgctctcggtgccggtgtcgcctccagccaccctggatgcagcgggcacactgctccagcacccgggcacgcccacattccagaagctccagctgggagaaaaggcatccattgagggcagcctcttctccccctgccccctcctgctgaggagagcacacagcttgcctctgtaacctcctcatccccaaaccagctcaccatagagtcagtcatgaacaccttggtcctgccacagtgcatgggggctggcatggcctcagccgagtcaccagttatggctgctgcctgagttaggaccggcagagtgtggagaatgtcctggatgagaggttcaagcgtggcttcctcgctgtgtggacaccattctgggggagggagatggccccatcagtgcatggtcatctctacatgcctctgtggcctgaagaaactggctttggcctccctagcactctacaggtctctttcctgctgttcttggctctagccattttctccttgttcttcttttggaggaagccacaaacagcctctctgttgtccctcagggtgctagctgttccgtggagccttggaatacccacttgcgcctgtgtgtcctggggtgtcccacagcctctactgccatgagtccctttgggcaggctggcagagggtgcttgacacctggaagggtgactccttccaagcttggaatcccaggctgctcagccagcatttgtttccaaggcccaaacacacatcctgagggccaaatagggcagctataggccactccctcagccccgacccctcaactccccaccatgtatgggaaaagggagatccaatcccagcccttagtttgggaatcttctactgcaaataaaaagaataaattaaaaaataaatttaaaaaatcccagccctgcaaaggtcccgtgtcccactgcctgccctcccgcagctcgcagagctgactcctggagaggtaggatttacctgagggctctgaccaccttagatgcccagtgcctctctgaagacagaggctgccaaaggagacaccacagatgagaaacagcagcaaaatcaaccaggggccagaagggctatgggcaagagacacggaacaggacagcaaaccatggagagggagaagaaaggagaaagggtgaaaggaaagtgaaaactgcccaggaggggaggaaacaaagcaggattgccccaatggctgtgaggggcccagggtaaggctgggtgggaggggcagaggtgctgggctggggtcctgccgaggcggggccccccggcagcctgtccttggcctgttctccctctgcctgtgtctgggccctgtggctcccacagcctctcttttatctgcatgccgacaacccccatatgagggcctccagatccttcctttgagactaaagcctgcctaagtgccttgcagacttcttcactggacctgcaggacaagtcacccatgcccgggctcttcagcctccctgaacctcttttcctcttgcttttcctcacttcccaggctaagttaatttactcctttcctctccctctacatctagtcaagcccctaccaagactgaccagtttcttccaacaaatatttcccgactgtgcccacaattcttgtttctctctattggggcaactttgcagcctcaatcccacagccctccatggtgcccccagagtggtctccagaaagtgtgaggctgataagagtcatttgctccttcccctgcagtgcctgctcatctgcccagagaataaagtccagattccttgatggagccctacctgccactccagcctcacctgccccagttctctgcctcaatgaaccagcaacacagaactggctggagttcctcatacccacactgctgcctcaagcctctaggcctttgttcagattacatttatcatgtggaccacccatcacctggctaatccaatttattctcagatactacctcttccaggaagccttccccaattcacacctccctagcaccacccacagcatcctgctcatagctctgcttttccactttccatgctatttgtcttttttgaatctgtttcccccactgaaccaaaaccagggctgtgttttattcaccagtaagccccagcccctagccctaagacagggcacagggtagatgctcagtaaactgtggttgcacaaatgactaactcatgggtcccactcaccagggagccctttggcaggatatgggctgtcggggccagaggatgtgcaaggatgaagccttcttagtaacttgtatcgttctacaaagtttcggtgagagaccctggaggccaaagcaggcagaagtagagaattacttcatctgtgagccaggttaacggttcagggctcatcagaagttattctatttaatctgctcaacaacacagcacggtgctgccctccccgagtatccccactgaatgtgaatgtggttttgaagcgatttctaggatcacttagttggaaacccataaagactatttaaaatgggtctgctctccctgctgccttggtctaccaacacaaagcatctcttgtgttagcaggggatttgcgggctgcctccctccaaaggggctgacaggcctctccccaaacaattggaccagtcctatgacgcagacatgcttggccacatctcccctctgacctctctgaccccacagtctcctctgcctcccccagatctccctgctcctcatcaaggcaacacttctcagacagctgctggcacctgatatctgcacttcctcccaattgcttgtcagccctcctgagtctggcttctgtccccaacattgtaccagtgtggcttttgtcacagccatcagctgggtacaaaatagtgcacaataagtgaatggatgaacgaatgggtgctgctccctagttcccagttgacttctacagaccagcctctttctcttcatttccacatctcactctgggttgggcaggctcttgcccaatgagagtcctgagccccactctgtactggccctgcactgtgccgtgatcgagcccactcaccggatggggaagccagcagcactgatatggatggtctccacgaggccacaggcctccagctggctcaggacctgcaagggtggggagacagggcaggcacctgcagcatggggccagcaggccagaaatgccattctctcagcccttcttcttagaccctggccagtgccaagctgcaggctctcccaaggcttggctaatgggggtatctccttggggctgtgagaaatcgagggaccttgaaaacaaatctcccactagaaagggtcctggtggtcccaagtccccctcatccgatgcatggcttctgatacagctgaagcaagtgatgtcctggctccgtctcaccctgccctcagtgtagtctcactaccacacaacccagcccaggcaaatttccagtttggattgttttcactgtctgcaggcattagagggtggttcacagctgagaggcagggaagattatactatgaagattcttctgtgacctgaacccaggtctttaccacagagctgagttgtcctggctacaaaccggaaggccacatctaccaggccacaccttcagcagtgcccagcattcacccctcatccacatccctcagaacctggaatcccaagaaaagggcagctgctggctagagtgcttttgttagattagaaaaaaatgataccggctgagtgcagtggctgctcatgcctgtaatcccagcactttgggaggctgaggtgggcagatcacctgaggtcaggagtttgagaccagcctggctaacatggtgaaactccatctctactaaaaatacaaaaattagccaggtgtggtggtgcatacctgtaattccagctatttgggagactgaggcaggagaatcacttgaactcgggaggcggaagttgcagtgagctgagattgcaccactgcactccagcctgggtgacagagtgaggctcagtctcaaaaaaaaaaaaaaaaagaaaaaaatgatacctccagtgagaaatggctgcactgtgcggggactgtgtggtgatgtagactttcagctaatcacgagacacccattcctctgggcagtttcagtctctcatcagggtacatggctcaaaaaaacaagatgcactggaacttgcctccctggctaggctactatgcacagaccacacaaccatacatgcctgccctgccacagcaagggagatgggtcctctctcatgtcaggcctggccggagagaccacttctgtgcactccatttggaacagatgtcctgcccttcatctctccagggccttggccagatggggtttggtgcgaagcagctttggcccggtgttaattacctcctcttggagaaaggtctgcgcctggccctggctgttgggcttgatgcagcgaatgtagtggggcgtggtgctgtgtaggacctgcagaagctgctccagtgaggcctgcagatgagagaccatggggttaggcagggagaggggctgcccagggccatcaactgggctctggttagtaactacatcaaatgcctccagcgggcccttccatgatcctgagaccaagaatctcctgtgcagggatgactgctgcaggctctcaacgagcaggctcagagcacattcctctcccaacttcccatgctcctcacctctgtcttaagggacccttctaaacctgtgatcctccctgactgttctccctgaatccaatctcctcctctttcccctccccacttctccccagagcaatcttcttagaaaagaacaatctcaaaacttcttgccattcgtccagcaacaactgttatcactcagctcatcctgtgtgttggaggctgtgcacaggctgcctgctgccatgtcagagctcactccaatgggccacacatgttggatgaacaccctcgggggtgtgtttgaggctgggtaggaaggtgctaatcaaacctggttttccaggtgcctcctcgaggtggtggtgataaagctaaagtctgaaggatgagaaggactaaactaggaaaaggggcgtggaggatgggagtgaggtggagctgatggggcagtagtcaagagtatcccaggaaggtggggcggtacatgcaaggactgagaggtggtagaaagcagacgatgtgagagaagtgagtgagggtagggttagaacaggaagctagacagctggagatgagccaggtcaaagaagctcatgtagctgatcctcttcccatgagcaccccagtggcagggggtgagaggctgcatagtgcccccataggcccctagacttcccatcatattatacctgatagcctatttgtctactgtttctgtcttccacactgaagtataaactccaggggactgggaccacatctacttgacttgccactgctccccaacaaacagcaccgatcctggcaggtgctcaataaatatttgtgagaccgtggagtttgaaccaagcacctcccatcagcacatcagacccaccttgaacttggacaccacggtcaacacaggggccctgctctggccagggggttcctcctgggtcttctctttggggttagtaggaaacagccccatgagcagggggtcctgggattgctgcaggagcctggtcagctcaggtgggatagggtcctattgggaaatggcaagagcagcagtgagggcaggtggagcttctgctcagggccatccactgcccacccaagccgcagatgacggggcttccaggtaggacagggcctgagtccaagagaaggtccattggacaaccagagacctggagacccagtctaacatgggttatctccaggcaggtcatgcttgattagtggagacctcagacaggtgggcccaagatggtgattctggattctgggaggaggttcaggagagaaaggactcacgatgggaaactactatgtctgcatagcaaagacccagcatctcgtttctcgcaggccccacaggcatggcccagcccgtaccttgttcttctccaccaggcctgctgtgtggtaccgcacaggccccgcataatgcaccacaatgaagctgggctcccggctgagcttattgtggcccaggcaggggctgcctgccagggcagtctcaatgcgtgtctggagctgggctgcgctgctgggtcgattgaggcggcattcctgtgggatgggaacagggggtcagccaccaacatgagagtgtctcaccacaaccctcactgtccccaccctgtggaccccatgacagcagacatcacacaggcatcatagtgtccccaacagaaaaaatatagcaattagcagatctatttggcagactgggaggagagaggcacagagaggaaacaggataatcatcaaggccccagaaaacccaaaggccaactctggtgctcggctcattagctgacctccccacctcatttatgagggagcagatgctgatggggcttccctcaatgagatccaaacagggctggttgtcctggtagttgatgaatgaccactccaggccctcaactgcgtattcctcctaaagaacaaggtgggatgaggtgggagaaggcagctgtggtctgatgtcctgacgggccatccacggctggcctcggtaccacagcgtattccagaacagcatcaaagaaacaaaagtatatcaaaacattacattgtactccatatgtgcaattattatttgtcaattaaaaataaaataagaaggaacaaaaggcttctaatcagaacctggactggggctggaaggtcaggaagggattgaggatccaaaagaaggacctgcctcctgctcaccccatccctcacctgctgggcccttaggtagtgagccacaaaatgctgctgcagcttctcattggcgtagttgatgcacaactgttccagactgttgtcaggaaatgattcaaatccatacacatccagcaggcctgggaagatggcagagaacccatggggccactgcagggagcagatggggaataggggaccaaggaacccagggtggctgggcccctgccaatgccttatacttggcagcctgggcatcaggctgagtgagcatgacacctgtggtgggcagaacataccttccccaccctccacccaaggtggctcccatctctaccccattcccctgtagagctcagagcaagcaggaaacccaaatgaagtgtgaagacagcccagagcatcaggcccatttttgagtctgaattctctggttctgataggcacctcctatgaggaaaccaggtcccagggaacattttctgtgttaaatctagttcggagggcattagtctcactagccaatttggtgcctagaattccaccattccatgagcaaactgcacttgtacctttaagctttatttcctcctataactgactgtcccacctagttacaaccgtgttgacctccctcagtcatgtcccccaagtctttttttgttctcccccctgagatagggtcttgctctgttgaccaggctggagtgcagtggtgtgatcacagctcacagaagcttcaaactcttgggctaaagtgatcctcccacctcggtctcctgagtagctgggactacaggcatgtagcaccatgcctggctaatttctttgaaatggggtcttgctatattgcccaggctggtctccaactcctggcctccagtgatcctcccactttggcctcccaaaatgttgggattacaggtgtgagccacggtgccagcctccaaagtcccttctaatacagctattttccccaacccccactactctcccacaattagagctgggtctctggggaggtaaagggctctttcagacaaggcactgttgagcctgtctggagagttatggactgctcagatgtgggtgcaggagagcagagatctcaccctatgcagagatctcgctctatgctggcaggcagatgcaagaggagacaaaaaagggaaaggaactgcccagagtcacacagtggacccagggctcctgcctctccatccagggctttattgctctttttctggagtgctcccagcacagtgaggccttgctacctatgaaagtggtccacgagtcggtgtctgcacagatgctgctgttgatcactgataccagccagtcaaacaacctgttgggggaagagagtggactctggtaagagggtctggctgagtcaaaggggtggtaaaattgctccccccatcagggtgctacaccctggggggcccttgtattctgagcctgacaggtcaaagaccaaatcctctcctcttgcttccggcctatcacgtcttgacctactacagatgcaggctatgggcatgcatgttgccaggtacacacaaacctggcatgtccttatgggaagactgagcacaggacaagctcagctcctaggctggggagggaatcagtcgagctcagtcacatggctcgagacccagctagtgtcttgggaaggggcagatgggcctgggtgtggtttgtaaataactgagttcattgaacacccctgcaaaactctaccggtggagcccagagctcaaggccccaccataccccctgatgtagttctgcacaagtgggcccccagtcccgaggtcaacaatggcatcctccactctagaaccggccccagcccagagaagatgagactaccacacaagacgctgacacgtacagcactatacaggggtttcttcctcacattttttcttaaagtaattgctctgcaacttttttcccttcagtaaataaactggctctttttgcaacaggggctgtgcaaatgtcctgtggtcagaagctcactctatctgtgttcatcacactttatctgctcatcttggagtgacttgtaggcaaaggctttaaaagcctttgacctcaaattgtgacctgaaattagcttgaggcagtggtaactagtctcttgctgaaatggatttagtctggcctcagctgccctggaccattttcaactcggacgatctggttcccccagcagagcttctcaggctattggctctttgtggagtttatgaaagcaggggaccctctccccagaaaggtgcccaaggtctcatgtgcacatgcacacacatacactcattctggctcatctcagaggattctgggcccctgaagcccttacaaggcctgctgaagaatctcagaactcaaggtgagagatcatccttaaccacatggccagagggtggaggtacccacgtaatctaccagaaaaggccaggaccccaccttcaccactgtgctacatgctgtgggctgagcctctggctttaccacaatctatcaaactcctaggtgatgtacaaaggcacagggagacagagaggcccattcagccaaggatctgaagcaggaactgcgaaggctctagatcacctttggggcctgccttgccagcagacagctgagcaggttctcttcaccttgctgaggctaaagcagcctcctgaactttaataatgagctgaattctggccaggaatgtagcaactttcccactcagaaagaggccacagacgctgcttggtgaaacctgggagctgtgccctgatgtgtccaggggtttgaggagcagggagaggaaccagtctgtcttatctcccaccctgggcctgtgcctattgcctgatgttgtctggcccaaccccggacaggaagagcacttgtcggggtcctccccaacaaggggccagagtaactgctcaccgcgcatagatcagtttggccaggcagtctctacgggtgtcacactcggctcgggcgcagggcttccggaacacctgctgctgtctgcctgccctgatggttctaatctgcaccatctccagcagcacgtcctctgggagccccagcagcgaggctgccgtcctgacagagtctgggaggggcaaatcctctttaggcaaatcactctccatccagtcctcttcacgaggcactgtgaagtcatcacagcgggaccatgacttgcccaactggacagaagaaacctaagttctgatcagtgaagtgactcacccaaaggactccataaacagcagtcagaactcaaacccagcactttcatgtaccagtccatgctgccatgtatgggacaaatcactttacaaacctctgactcattttctcatctttaagatggggacgatactgtctgcctcaccagacagggtgaggagtaaatgatccagggccaggccctatggtgggtggcataagcaagggcatcagattccaattttcaccatccagccttccacccaaccccagcaatgctggctaccttcctgacagggcctgccccatcctacaccctgaccctcacacttggcatcatccatcggctggcagggctgggcttcatcctcggaggcagcaaactggatattgccaaggtgcagcagtccagctaggacctgggggaaagaaaaggatgggtgggagtaggagagggcgtgacgtgggcctactctgggaagggccgttctgctgagtacaatcacgacagcagaagggcagctcccaatcatggcccaagtgcccatctctgccagacacaattctatacaagttacatgcatcgcctcattgcaacttttcaacaacctgtaaggtatgtgctacgccactgcctatgatagagatgagactgaggacacgtgcttcctgaggggaaaggtgggatgagaacccaggctgacttcagatgtctcctggggcagcctgtgggcctccatgcccacccatcctctacatttctgccccctgctctctaggaatagactggtgactgggggcagggctgcttctgtgtgcctgctggaggcttgtctctgcttccttgagccctttcccactgtcaggcttctgagagcccagcctgctggaggcactgtgaccttggtctgtgtccgatgggtgcccctttgcctttgtactcaatgttccacaccgacaagccccctggggctatagacagaagctcccctcaccccaccaaggcccagcaacttcaaaaccctcagacccagctaggcatggtggcacacgcttgtaattccagcactctgggaggctgaggcaggtggatcacttgaagtcagaagtttaagaccagcctgaccaatatggtgaacctccatctctactaaaaataaacacacacacacacacacacacacacacacacacacacacacacaaaattagctgggtgtggtggcacatgcctgtaatcccagctactcggaggctgaggtaggagaatcacttgaacccgggaagaggaggttgcagtgagctgagattgtgccactgcactctagactgggcaactagagtaaaactccatctcaaaaaaaaaaaaaaaaaagaaaaaaccaccaccctcagacctgacacagggaccccacccaccattcctatatggtcccaggcagggtgcctccatgtgctactggtcttccggccacaacttgctccagaagactgccatgcccaccaggcagaagggctgtggcagagggtcatgcccacccccaaagcactcctgccccgactcccagtgttgtccacttatcctgggcttgtccccaggtactgtccttctgtcaagttcttacctggcagtgtctgagcagcccccatctggaggtgagggtcactttccactgcattgctacctccctgaagtggcctccctttctcgactgccaggccatcctatctatcccctcctgctgctctagagggtgaggaagatgagaggaggtagtcagctctgtcagcaaagacagaagggaggcccccctagtgtgactgagaggagcccagctcacctggggcagtctcatgttccagaggacgacggggcacgggttgggggaagacagagagggtaggaacttggaattactatgtctggtactctgtatcaccacttagtggtatctgaccttgggcacgtcactttacctctctggttttctcaggcataaagggaaataaacacacacagaggactgtttaaaaaactaagtgagcagagaagtgtgaacatgacttgtaagttttaatgtactagacaagcaaggcggtagcactagttctctcttctgatcatgcggtaccttgctctctgcccccatggatcacttactgcattctgtactctagcactgtgtatgcatcactcttccttatgccccgtccaccccaccacctggtctccagactcagcagaacagaggtgactgattccttggaggtagcccagaggggcccaaagtcctagatcctcagggaaagaccaactccaagtccagggaaaagctctatgcaaagggctgcccgtcatctctgccaaacttaagtggcgtggcttttcttctgaccttaaagatgttgttctgggtaggggtgtcaatgcccaaatggagcatggcctctctggtcacctcaaaacaatcctctgaaaaagaatccaagttcggggcagaggtcagcagcagcaagatgcgagggaggcaggctctgtacagagtgggtgggtgatgctgggtcagcgcaaggtgctggatggggctccccttaccttctaagctcctctctgggttgggcagccaggagaaggcagctccctcaggaaggtgccactggagcctctcgtcctcactggctcctttgcaaatctgtggagaagggtaggtgggaggctgggtagggggtctgagaaaagcccaggcctgcataggcaggcatggggttgggataagaggagagttggtagcaacatcacaaggctcagaggtcccttccgagagcccacggcaggtatgggggcaaaagatgccgtaaacatagccctggatgtctccaacctgatgcaaaagaaccttgctctagggaaacctgcagtctggtgaaaaaaggacaactcctgcccagggagtccgtcgtcttgacgtgggaggcatacccatcacctaaggatgctccgattttgagagaaagggagatatcctatccatgccttgggggactcccagtccgatggaaaaggcacaactctagggaagcccttgttctgttagcgacagatgccattctaggagagcccttaaaatgataagagtgacacggcttccaccctagagatacagtcccagcctcaaggaccttctggtctgatggaggaggtaaaacatactcccaggccacaactgtgctgggagccaaggcgcagtgtgaggcagaagtgttgcatgtaaagtctgcaggataaagtggtggctccatcaaaagctaggtgaaggaaccaggtatggagcattctggggagtggggggttgaaaaacacggacccatccctgtctcgcatctggggggctgtggccccatttggcacaaacctgatagaagatgtggaagttcctctcactggaagcctggcaggccactcgagttttctctaggaggtaggtctggactgcggctccagtcatttgctgagccctgggacacacacaggccagagcccgttagttgcccattcattccatagccatgtctggcaatctgggtgtgccagattgcctgctacctggcaactccccgccaagctcttccacttagccaatgggcactgaggggtggggaccactcagaatgtccttgggtgtcctggaatattcccctgcatctagctcaggtgggcagggccaaggcctctgcacatcactttgctctaccccaagacaggagtcgaagtctcagcctcaagctcagggatatggtccaaagaggtggcaatttagcttgaagtccctgaacaagagtaaaagccaggaggaacccaggcctgaataagcgcactgccccagggtctcccaaggggagaggagctatagttctccaggtgcaaagatcaccctcagagctcacacctgaggtaaagggcatgcaccaggaggagcagggtttttgcccataggggtggcccaggccagatactgccccagccactttcaacctccccagtcccatcctcccactagccagggcaacagcagctattacctgttcagctggagctggatgaacttcccaaagcgactgctgttgttattcctcagtgtacacgcattccctacagatcacacctatgtttatttcactcccctgggtttgcagagtcctcataagccaaggtggctgcaggtctctggaggtcatgttcccgtgctcaagtcacctaaaggcccctttgttggttttcatgtcataggggacaggactagaaaatgggccctcatgctttagcaagtgggattcaggggagttagaagaaattcctggcaagaaattggaatgagcaagcctaggcagtcagggacctttctttgaagggaaaggtcaaaaacaatcagctgtcactactgactttagacaggaaggcacatctgggttccagtgccaacacaaacactaatcaccttgtatcccttaacaagtacccttcattgaaccatcaggaaactggatagaaagacagaatttggacgagctaagccaccaggtcttctccagcacgactgttatgtgtgcctaggctggagcgaggaagaggactgaatgacatgacctctgttagaatgatgctaaggagtaccagggagaggttggggatctgaggcagtgaaggatacactcatcctccacccccacccaagagagggtctcaaagcactgtccctctccctggaaggtggaaaatcccagaggaaatgggactgagatactgtgcaaaggagcccaagctcaccaaaagcttccatgacagggttggagttcaggatcctctgttctatcctctctgcaatcttgtggctctcccaagatgcaggtgaggtggccaccacagcatagaacttcattaggcagcgagacgtccatgtctgtggcagaaacagccctgtgggagctgtatctatgctcccgcccacttctgagcctgcctgagagaacagtgcccaccagagctctcttctccaccagtgtgttgctgacaaaatgggtgaaggcagaattcaaccctggcctcaggcaaggcacttcctctacctctgtttgtaaaatgggagtagacatctgtttctctcagctctgtggcagacactgagctatcgaggctttctgtgtatgttttttttgcaaactctgcaaaggtgtgattatacaattgtttataaacaataaaaccaaagcatagaaatttaaaaatttattaaaaatcatgcatctactcaatgacagggctcccatttatacccaagcagtctaactttttttttccgagacggagtctcatcttgcctcccaggctggagtgcaatggcacaatctcaactctctgcaacctctgcctcctgagttcaagcgattctcctgcctcagcctcccaagtagctaggattacaggcgcacgccaccacgcctggctaattttttacatctttagtaaagacggggtttcaccatgttggtgagtctggtcttgagctcctgacctcgtaatctgcccaccttggcctcccaaagtgggattacaggtgtgagccaccgcacctggccccaagcagt

SEQ ID NO: 7623 - DNA, 30013 bp, Homo sapiens; identical to SEQ ID NO: 7622

SEQ ID NO: 7624 - DNA, 6844 bp, Homo sapiens
ggcctcgcatctcccagctaggaagggaggcgggaggccctggacccctccttctcccctggcgttcgatggttgaactgtgggtatgggggtccctgccacaggattctaaatctgaggtttgtgcccccgctcccacccctacagaaagaagactgagaagagcctgacctattacacaaacctgcaggtgaagacaggccagcggaccctcatcaaccccaagccctgtggccagttttgctgctgtgaagtgctgggctgtgagtgggtaagggtcccaccccccggctgggagcagaggcattggcatcggggtgccccagataccagcatggggccacgtcatcccaatgggatgtgtcttgtggcaggaagacgccatctcttactacacacggatgaaggacaggctgctggagaggatcacagaggaagaacgccacgtccaggaccagcccctgggaatggccttcgtcaccttccaggagaagtccatggccacctagtgagtgtaggcacatccagaccccttcttggctgactccctgttcccctccagataactcactgtccctctcgagtggagatggtactgctgacccaccatccctgggatttatctgtggtgtttccttctcctccctcagctacccacactcactttcagccagcccagcccatgtttgtgtaacaggcggtgggggtgtgggcagcagccacggagtgggtgattctggctgaccccctcgagctgatgtggcctggccccactgccgggctcttccctgctgccctggacccatcctgttggcttcatgtgccagccttgccccaggggagatggaggcaccctcctttcagacatctgctctgggccacagatccttctgtctgtggctccccaccttcccacaaatgcaaagctgtggggaagacccctggggcacgctggggcgctcactgcagtggggagcttgaccctggggagtggcttttcacagtggcccttggcatgggactctaggctctcatgcctgtggtctcagtgtcatctcgccttaggagcagcacagggtgggtcgggagaggggtgtggaaaggtgtccagccactgccccaggcattgtgacactaggaatggactcacacaggacttcctgcctccttgcagacactggggcaggaggaaaggggaaggcatctgaggcaggagtagaggggctgctgggctccttacgggaggttaaaggaggaaaagctgtgacctgttgagatggtgagggtcgaggtgggagccctgaggagggaagcttgggaacaggcaatgtgtaacgtggtctattgctacacttgggcctggggaaaaagtgacagaatgaaaagttgagccactggcctggcagtagcactgatcagagctccagcttaacaggcagggtggagggggatggccctatggaagagcagtgtgttgccctcagtttccttatctgtaaaatgggaatcgtactccctttgttgctggtggttgcgaggattaaacaaaattctccacacactgtgctagcgtggcacctcttacatagcgttactcataatacactaatcacaacaaagcaaaggtcctatgccactgcctcccactcctactcagtccccacttgccacatgtgtgctggtaacctgagtagcctgggcctggctgttgctacatttccttgcagcatcctgaaagatttcaatgcctgcaagtgtcagagccttcagtgcaaaggtgagccccagccgtcctcccatagcagggagctctatacctccaagtggacagtcacctttgctgctgaccctgaggacatctgctggtaagctcctagaccaaggagaggtgggagagaggcctgggttcctggtgggagctgcccatcacctggagcacaggtgtgacctggcagtcaatggagatctccacacatctgcaattctgtgggctgtgatgctgtgatgtgctcggtgtggcccaactggggtatctgcccagcccttccctccagtgttcctccctagcattcaagtgctacccagcagaaatataatgccagttctgcatctaattttaaatttcctaatagccatgctaaaaaagtaaaaagaaacagttgaaattaattttaataatgtatctcgcccaatatatccaaactgttatttcaacatgcaatttttgaaaaatgtgagatgttttacattctctttttcacacttagtcttcaatatctggtgtgtattttacacttctagcacctctcaattcacaccagccacatttaaaatgctcagtagccgcatgcagcttgtgcagccttacttaggtccagtgtcagcctggggccgtgctggggagctgagctgtgtccatgggggccctggtgagcctccagtgctgtgctgagggtaagggcacccagcgcaagccccagcgcagctgcctgtccagccctgcctcagctccttgcacagaatgagcttgaagtgctcccctctgctcggttctagttctgcctctgacagttttgctctttggttcacaaggcttcctaaactcaggattgctttgtgggtctgttctttgggatgagaggccagggcaggtgcaagctatgccttcactcctttgtccctgccttcctccttcctgtaccccagctacagccccgttgggaagaatgtgtcgttagtcacaaagcattgcagatgtgtctaagaaatgccacgctggggccgggcgtggtgctcacacctgtaatcccagcacttcgagaggctgaggcaggcggattgcctgagctcaggatttcaagaccaccctgggtaacatggtgaaaccctgtctctactaaaaatacaaaaaaattagctgggtgtggtggtacacgcctatagtcccagctacatgggaggctgagcaggagaattgcttgaacctgggaggcagaggttgcagtgagccgagatcacaccactgcactctagcctgggtgactgagcaagactctgtctccaaaaaaaaaaaaacagaaaaagaaaaaataaatgccatgctggagccttgtttggcctgcttgggtgctcatgccatctctttgggtaggttctggcccccagactttagctggggagccacatctgagagaataattgttccctctgagctcttggggacctaagatttggtctttctgtagttgaaggtcagtgcagagaacttgcccccaggctagtctcttggtctgcctaaatctgaccttctgacccacctaagccacgagcactgggagacaagcctcgagacctgtatcccctctcccgctgcaggaagaacctctctatccagggcctccgctggtggctacagtggctgggcatcaacttcaccctcttcctggggctatttttcctgaccacaccctccatcatcctgtccaccatggacaagtttaatgtcaccaaacccatccatgcgctgaatgtgagtaactgttctgcaaggcccctcccaggatagctggtgagaagagggcttggtgggtggggaaggagtggggacaggagtggggtgtgtgcggggaactaaaccagtgggtcatgttgctcagctcacatccttgcttttaagccctgagcaggcatggccacatttattacaaagtccttatagtaatgccatacacacacacacacacacacacacacacacacacacacacattatatgtatatatacacacacatgcatacatatatattttaatagactatctaaatactgaatggtagggatcatttgagttgaatgtggtatattcaggttggtagactatcaagcatccattcaaaattgtatagattttgtggcacccatgcagggctcctgacagaagcagggatgtaccagtgaggcatgtctatcatggacactacggggaggggccaggaaggaaggaaaaaagcttcgttgattggggtggcaggatcacaaattatttcttttacattttggttgctaatgaccttgttataaaactattttggggccgggcacggtagctcacgcctgtaatcccagcattttgggaggccaaggtgggcggatcacctgaggtcaggagttcgagactagcctggccaacatggcacaaccccatctctactgaaaatacaaaaattagctgggcgtgttggtgggcgcttataatcccagatagtcaggaggctgaggcaggagaatcgcttgaaccgggaggtggaggttgcagtaagccgagattgcaccactgcactccagcctgggcgacaagagcgaaactccatctcaaaaaaaaaaaaaaaaacaaaaaaaaactattctgtataggtaatgaacgattttcaaaaatcttagatgaatcaatgagataacagccaaacactcactcaactggcatctactcaaaaagctattggtttctcatgattagctttgccaaaccatctccctagattatttttctttttaaatttcactttgcatttggttaatcattccctgggaaagcacacggggcaggtgggcctccttgtcttcactttgccattccctatctgatgaattctgaacctcagtttttcatccaagaactggagttaaaacacctgcactattatacagggcgtgaggctgttgtcatgataatcaatgagctgatgtgtggttgaagctcttatctgactccatagatagttttaaactacctaagtataaattcagcagctttgcttaagatttaaagcaggtattataaatatgcattcctttgccaatcttttaatagaaggacaggcctattcttttgaagatggatctgctgatgagagctcccctttgtctactttacatcaaccacacccttatttcattgttttgtgattccagtgttggtttctttaaagtaaaggaagaatttagatatttgccgagccattctgaatatagaaacttcctagatcgcatatcccttgatcttttatcgttaatttactctcatctaattaacagcgttttgtttttttttttagaaattgacttttattaagtctttccaaagtagccaacttagttttcaaagaaaatttctctctatttttatgttcatctaatcagtgacagtaataagtcaatcagctcatgtaatcccagtaacaaacagcaggattgtggacacacacagtggagccctgatatgctgcagctggacagtgggagctgagcaggcagggcacccccccccccgcccgccggccaggactccaggccttcagtgttcagtcttgccatggcatcagtcattggttttgtatagggagcagagaaggttatttaatctggttagtcaggtaagtggagtttactcgtatgtgaaattgctttctttgctgtgctgtgaggagctgtacaaatataaggtgctgttactgattattcagccaacatttatggactaccaactctgtacctggcacagttttggttctggggtcagagatgacaaactcctaccctgggagtccactgagcgaccataccaataggtcatggcctcagagccgcgtggcccacggcccctgtgactctctctgctgtggacctttctcctagaacccgatcatcagccagttcttccccaccctcctgctctggtccttctcggccctgctcccctccattgtctactactctacactgctggagtctcactggaccaagtgagtgcccgggagccccgaggccctgcccctaagaaggatatctctgaccgctcccttgtccacaccctaaccccccagctgctcaggcagtgggcacatggcaggggcctcactgggggcacatagagcatttgggggactgcgagtgctcacctttgacttcctgcaggtcgggggaaaaccagatcatgatgaccaaagtctacatattcttgatcttcatggtgctgatcctgccctccctgggtctcaccaggtatatgccaccaccttctgctctaaattcagaataagagtcacatcaggagagcactgtccccaggagaatgcaaacggtttggcagcagaagcaaacctctaacaatatctaagcctgtcgcaaccactcggcgtgcagtagggctgggtcattgattcttctggcaatatgattgattgttcttctttaaaaaagaaaaaaacaccatattggtcaggctgttcttgagctcctgacctcaggtgatccacccgcctcggcctcccaaagtgctgggattacaggcgtgagactctgtctcaaaaaaaaaaaaaaaaaaaaccagcttgaaaattttgtggccaggcacagtggctcacgcctgtaatcctagcattttgggaggccgaggtgggcagattgcttgagcccaggagttccagcctgggcagtctggcgaaaccccatctctacaaaagagaaaagaaaatgaaacttatcaaggaccttccacttagggaaggcctcatcatggctttatttatctcaaggaaggaagtttctgttaaagcagactgtgacaggtcatgccgtagtaagtggcatcgttgagaacaaaagtcaatctcgagctttggcctgtttttagagcaaaagaaaatgaaagcatgtgtagtgacaatatggaatgctggaaataaactcttagggggttcctttgtttttcagtctagattttttcttccggtggctctttgacaaaacttcctcggaggcctccatcaggttggagtgagtatt

SEQ ID NO: 7625 - DNA, 3530 bp, Homo sapiens
ggcctcgcatctcccagctaggaagggaggcgggaggccctggacccctccttctcccctggcgttcgatggttgaactgtgggtatgggggtccctgccacaggattctaaatctgaggtttgtgcccccgctcccacccctacagaaagaagactgagaagagcctgacctattacacaaacctgcaggtgaagacaggccagcggaccctcatcaaccccaagccctgtggccagttttgctgctgtgaagtgctgggctgtgagtgggtaagggtcccaccccccggctgggagcagaggcattggcatcggggtgccccagataccagcatggggccacgtcatcccaatgggatgtgtcttgtggcaggaagacgccatctcttactacacacggatgaaggacaggctgctggagaggatcacagaggaagaacgccacgtccaggaccagcccctgggaatggccttcgtcaccttccaggagaagtccatggccacctagtgagtgtaggcacatccagaccccttcttggctgactccctgttcccctccagataactcactgtccctctcgagtggagatggtactgctgacccaccatccctgggatttatctgtggtgtttccttctcctccctcagctacccacactcactttcagccagcccagcccatgtttgtgtaacaggcggtgggggtgtgggcagcagccacggagtgggtgattctggctgaccccctcgagctgatgtggcctggccccactgctgggctcttccctgctgccctggacccatcctgttggcttcatgtgccagccttgccccaggggagatggaggcaccctcctttcagacatctgctctgggccacagatccttctgtctgtggctccccaccttcccacaaatgcaaagctgtggggaagacccctggggcacgctggggcgctcactgcagtggggagcttgaccctggggagtggcttttcacagtggcccttggcatgggactctaggctctcatgcctgtggtctcagtgtcatctcgccttaggagcagcacagggtgggtcgggagaggggtgtggaaaggtgtccagccactgccccaggcattgtgacactaggaatggactcacacaggacttcctgcctccttgcagacactggggcaggaggaaaggggaaggcatctgaggcaggagtagaggggctgctgggctccttacgggaggttaaaggaggaaaagctgtgacctgttgagatggtgagggtcgaggtgggagccctgaggagggaagcttgggaacaggcaatgtgtaacgtggtctattgctacacttgggcctggggaaaaagtgacagaatgaaaagttgagccactggcctggcagtagcactgatcagagctccagcttaacaggcagggtggagggggatggccctatggaagagcagtgtgttgccctcagtttccttatctgtaaaatgggaatcgtactccctttgttgctggtggttgcgaggattaaacaaaattctccacacactgtgctagcgtggcacctcttacatagcgttactcataatacactaatcacaacaaagcaaaggtcctatgccactgcctcccactcctactcagtccccacttgccacatgtgtgcttggtaacctgagtagcctgggcctggctgttgctacatttccttgcagcatcctgaaagatttcaatgcctgcaagtgtcagagccttcagtgcaaaggtgagccccagccgtcctcccatagcagggagctctatacctccaagtggacagtcacctttgctgctgaccctgaggacatctgctggtaagctcctagaccaaggagaggtgggagagaggcctgggttcctggtgggagctgcccatcacctggagcacaggtgtgacctggcagtcaatggagatctccacacatctgcaattctgtgggctgtgatgctgtgatgtgctcggtgtggcccaactggggtatctgcccagcccttccctccagtgttcctccctagcattcaagtgctacccagcagaaatataatgccagttctgcatctaattttaaatttcctaatagccatgctaaaaaagtaaaaagaaacagttgaaattaattttaataatgtatctcgcccaatatatccaaactgttatttcaacatgcaatttttgaaaaatgtgagatgttttacattctctttttcacacttagtcttcaatatctggtgtgtattttacacttctagcacctctcaattcacaccagccacatttaaaatgctcagtagccgcatgcagcttgtgcagccttacttaggtccagtgtcagcctggggccgtgctggggagctgagctgtgtccatgggggccctggtgagcctccagtgctgtgctgagggtaagggcacccagcgcaagccccagcgcagctgcctgtccagccctgcctcagctccttgcacagaatgagcttgaagtgctcccctctgctcggttctagttctgcctctgacagttttgctctttggttcacaaggcttcctaaactcaggattgctttgtgggtctgttctttgggatgagaggccagggcaggtgcaagctatgccttcactcctttgtccctgccttcctccttcctgtaccccagctacagccccgttgggaagaatgtgtcgttagtcacaaagcattgcagatgtgtctaagaaatgccacgctggggccgggcgtggtgctcacacctgtaatcccagcacttcgagaggctgaggcaggcggattgcctgagctcaggatttcaagaccaccctgggtaacatggtgaaaccctgtctctactaaaaatacaaaaaaattagctgggtgtggtggtacacgcctatagtcccagctacatgggaggctgagcaggagaattgcttgaacctgggaggcagaggttgcagtgagccgagatcacaccactgcactctagcctgggtgactgagcaagactctgtctccaaaaaaaaaaaaacagaaaaagaaaaaataaatgccatgctggagccttgtttggcctgcttgggtgctcatgccatctctttgggtaggttctggcccccagactttagctggggagccacatctgagagaataattgttccctctgagctcttggggacctaagatttggtctttctgtagttgaaggtcagtgcagagaacttgcccccaggctagtctcttggtctgcctaaatctgaccttctgacccacctaagccacgagcactgggagacaagcctcgagacctgtatcccctctcccgctgcaggaagaacctctctatccagggcctccgctggtggctacagtggctgggcatcaacttcaccctcttcctggggctatttttcctgaccacaccctccatcatcctgtccaccatggacaagtttaatgtcaccaaacccatccatgcgctgaat

SEQ ID NO: 7626 - DNA, 5025 bp, Homo sapiens
gaaagggctcactgtggtagaccagaaccccaggagtcatgccccacttcagatgtaagatggtctcagggtgactctgaacatttctatctgattaaagatctggagcaaacctaggctaaaactggggccccaatatcaatgtctggttctatttaaatagggaaaaaagccccccaagatttacagaatcaggggctatcagagagtcttttatactttcctgccctcacccaaattaggaggtcacaattaatggacccagaagatatccatgatacttaattaaaatcagggtgtggcattatatctaagggcaactgcaagaatccaccttccaaaatgccaccatgaatccacttaggatacccagtggttcccaacgttggttttgtaacaacataggatgtttttagttttctcaaaacaaaatgaattcacattatgcctttacctgcaatggaaggttgagaagttatcagggagcattttggtttcaagcagaggccttgatggtgtagctctggaaagaccagtcagacgttgtcttcctgctggtccagacatgctcctcctccccagagctccacaaaccaaggctgattggttacgccccctcctgcttccccacatgaccctggaactaagtatctgtgcttctctgcagacaaagacccgtatagttttgggaggacaacaatagcaaacctacagactgagtgagtatggagcccgtggggataggtgctgatgggtgagatcaaggagaaggcaggtcaggagcccggggcaggccagaggtactccaaagggggccggctggtatctgaaggccccttgcagctagtgtgttgttgagctgtgggcatgaacatgccacaggcagacactgttttgccagggttttaagaaacacggagggtcctgtggatctggagttcatttgtcaggacagggatggggacccctctgaagtattcactgtgggctgaggggtgctggccacacaacctctgtgggaggcatctcttgcagtgaagctgttggtcctcagttcagtgcccactgagggtaaccaggccccagctctgcacccccagctccctgcctgggatcccagccctgatggcaggtggtttccctctcagcaatgacctcctttggctgcacaccatctttgctgtcatttacctcttcctcactgtgggtttcatgcggcaccacactcagtccattaagtacaaagaggagaacctggtgagtgaggcgggacttagggacatgtgctgggagggactcaggtgggagtcggagtggaagggcctcccaggctctgccacaggccctgactgcaatgagctctgggagggcctcaggagccccgcttgcttattcttgctcacacttggcaccatctttaaaaaaaacagtttcctggtggattgtttcaagatttggacagttactggtgctaagtaaagaaatttgggttgagagcagccctttctctttgccgcccacagcttcacaggggaggggagcttctgtggcttggttccaggcctgggtcctcctctgatctgctgtgtgaccgcatttgagtcacttcccctctttctcagtctcctgccatgcaaagaaggctcatagagttgctttggaagtggattctttgtacagcctggaagaagacgctgtgtaaatgacatgctttgggggctcccccggccacagaaggagaaaactggagccttctgatttcctgttgtttactttccagaggctggagttgggtaggaaacctgagcataccggcacactggcttgtgggtgacttctctccctgctgtatttcccggacaggtgaggcggaccctgttcatcacaggactccccagagatgccaggaaggagactgtggagagccacttccggtaagcaggtggggtgggaggggagctgagccccctccacgtaggaccaacacagccccacccgcagggcgagcaccttaggtgagcgccttctgtctctcgcttgggtatccaggtgagatctgagaaggacctggccctgccacacgtgtatggagtggctcctgtgtgccagccctgctggtgctgtgcagtgaatagcgccctggtggcctatcctcttcaagcagcctgtgcacagtgtccagagcacagaccagggtgtaggtgcgaataaacgtcttgagagcatacgggggaaaaaattgttgaccccggggttcttagcatcacctttgcagaataagagagacgtgagctgagcatttgtatggacccacagggctagggtctcacaggtggaaggacctcggggccatctctgcgtttgttcgtttgtccacccactgagcgggtgtctgttgagtgagcactgtgtctgagtccaggctctccctggtagaacctcctttccagcggctccctttgagtatctgcaccaccaattcctgcagatggaggctggaggaaagtctttcctgtgaggagattacgtgtgcagccagggatgcggggaaaggcccagagcatcaggaaaggtggcggtggggtgcaggggggcagggcaagcagtccgggaaggctcccaggaccccatgctggaggacctgaaggctgggctgaggagctgacattttattctttcttcattcctttttttgtaatcctatttttttagagacagggtcttgctctgttgcccaggctagagttcagtagtgcaataatagcttactgcggcctcaactcctggacttaaggcatcttcctgcctcagcctcccaagtagctgggactgcagacacatggcaccacacccagctaatttttaaattttttatggagatagagtcttgctatgttgcccaggctggtctcgaattgctgggctcaagtgatcctcctgccttgccctcccaaagtgctgggattacaggcgtgagccaccatgcccggcctctcttcattccttatcaatacagcagccactaatttgttgcatggactaggagttggctgcactttaactttgcactatttgtgaagaaagcacttgctaagcaaattgctagacaggatcgtaaactgaatgtttaaaatttgaaaaacttcttcagaaactctaagtattttagaaatatttactaatatgtaaatactcaataccagaatcatttttctgtatttccttgaagcaactcctcaaagttgcctgctaggcaacacctggaaacagtaattccacttaatgtataactttaaagagaaaaaaaaagtctcctcattctcatacaaacattgcatgactcatgctttcccctattttaagaggcctttttagtgaatgctgttgcagtccgtggggattgatgtatgaatttgcctttcaagcagggatgcttaaattgcagttttcttcctcacagctcttattgagaccagaaattgtcctactgtttaatttcatgattgatatacctatgggctgtctctctcactaaaatgtaagcacatccaggccctgttaccagcacctagaacagtgcctggcaggtggtaggtggggatttacatggttctggaatcccctggaattgtatgtataattttgcgtgtatggtgagggggtattgcatggtggccatgagcattgaccttggagccaggttgcctgtattcacctcctggctcagacactcactagctgtgtgatcttgggcacaagccacttacctctgtcggcctcagtttactcatctgtaaaatggggacaaaacctcacaggttatgatgaggattaaataaataaatatatgtaacaatacctggtcaatagtgagtatgtattttgctggtttttttttttttttttttttttttgagacggagtctcactctgttgcccaggctggagtgcagtggggcaatcttgctcactgcaacctctgcctcccaggttcaagtgattctcgtgccccagcctcccaagtagctggattacaggtgtgtgccaccacacctggctaatttttgtatttttagtagagacagcgtttcaccacattggccaggctggtcgcaaactcctgacctcaagtgatccacccggctcagcctcccgaagtgctgggattacaggcatgagccaccgcacctggccttgctggttgttaatatgtgtgtagatattttctggtctgagggtcctttgctttcattagaccctctgaaaggtctgtgaccttaaaaaaggctacctgaataggatttcagtgatggctcaaggtagatactgacctagcacaaacaataaatctgttcctttgggtctttagaggggatagtgatgtgttcatttttccccaggagaagtgccagctgattccaagccaagtgggtataaacttgtcagttccaggcagttagcttcatactactaaaaaaggctagcggggtgcagtgactcacgcctacaatcccagcactttgggagggtgagacaggaggagtgcttgaggccagaagttcgaaatcagcctgggcaacatagcgagaccccgtctctacaaaaaataaaaatcagcctggtggcatgtgcctgtagccccagctactcaggaggctgaggtgggaggattgattgagcccagaaggttgaggctgcagtgagccatgattgcgccactgtacagcagcctgggtgacagagtgagaccctgtctctaaacaaaacaaaacaaaacaaaagccctctttgtattaaatttcaaaatttcccccttttggaggataaaagacaaagagaagagaggtctccgctggcacagaaaccagcagcgagatcactctgccatcctttcccttggatccgtgggcacgtctcctgcttggggtgttttcttttccaacggtgtcttttgcctccttctctccctggccacagggacgcgtatcccacgtgtgaggtggttgatgtgcagctgtgctacaa

SEQ ID NO: 7627 - DNA, 1006 bp, Homo sapiens
gcaggagaatcgcttgaaccgggaggtggaggttgcagtaagccgagattgcaccactgcactccagcctgggcgacaagagcgaaactccatctcaaaaaaaaaaaaaaaaaaaaaaaacaaactattctgtataggtaatgaacgattttcaaaaatcttagatgaatcaatgagataacagccaaacactcactcaactggcatctactcaaaaagctattggtttctcatgattagctttgccaaaccatctccctagattatttttctttttaaatttcactttgcatttggttaatcattccctgggaaagcacacggggcaggtgggcctccttgtcttcactttgccattccctatctgatgaattctgaacctcagtttttcatccaagaactggagttaaaacacctgcactattatacagggcgtgaggctgttgtcatgataatcaatgagctgatgtgtggttgaagctcttatctgactccatagatagttttaaactacctaagtataaattcagcagctttgcttaagatttaaagcaggtattataaatatgcattcctttgccaatcttttaatagaaggacaggcctattcttttgaagatggatctgctgatgagagctcccctttgtctactttacatcaaccacacccttatttcattgttttgtgattccagtgttggtttctttaaagtaaaggaagaatttagatatttgccgagccattctgaatatagaaacttcctagatcgcatatcccttgatcttttatcgttaatttactctcatctaattaacagcgttttgtttttttttttagaaattgacttttattaagtctttccaaagtagccaacttagttttcaaagaaaatttctctctatttttatgttcatctaatcagtgacagtaataagtcaatcagctcatgtaatcccagtaacaaacagcaggattgtggacacacacagtggagccctgatatgc

SEQ ID NO: 7628 - DNA, 5027 bp, Homo sapiens
gaaagggctcactgtggtagaccagaaccccaggagtcatgccccacttcagatgtaagatggtctcagggtgactctgaacatttctatctgattaaagatctggagcaaacctaggctaaaactggggccccaatatcaatgtctggttctatttaaatagggaaaaaagccccccaagatttacagaatcaggggctatcagagagtcttttatactttcctgccctcacccaaattaggaggtcacaattaatggacccagaagatatccatgatacttaattaaaatcagggtgtggcattatatctaagggcaactgcaagaatccaccttccaaaatgccaccatgaatccacttaggatacccagtggttcccaacgttggttttgtaacaacataggatgtttttagttttctcaaaacaaaatgaattcacattatgcctttacctgcaatggaaggttgagaagttatcagggagcattttggtttcaagcagaggccttgatggtgtagctctggaaagaccagtcagacgttgtcttcctgctggtccagacatgctcctcctccccagagctccacaaaccaaggctgattggttacgccccctcctgcttccccacatgaccctggaactaagtatctgtgcttctctgcagacaaagacccgtatagttttgggaggacaacaatagcaaacctacagactgagtgagtatggagcccgtggggataggtgctgatgggtgagatcaaggagaaggcaggtcaggagcccggggcaggccagaggtactccaaagggggccggctggtatctgaaggccccttgcagctagtgagttgttgagctgtgggcatgaacacgccacaggcagacactgttttgccagggttttaagaaacacggagggtcctgtggatctggagttcatttgtcaggacagggatggggacccctctgaagtattcactgtgggctgaggggtgctggccacacaacctctgtgggaggcatctcttgcagtgaagctgttggtcctcagttcagtgcccactgagggtaaccaggccccagctctgcacccccagctccctgcctgggatcccagccctgatggcaggtggtttccctctcagcaatgacctcctttggctgcacaccatctttgctgtcatttacctcttcctcactgtgggtttcatgcggcaccacactcagtccattaagtacaaagaggagaacctggtgagtgaggcgggacttagggacatgtgctgggagggactcaggtgggagtcggagtggaagggcctcccaggctctgccacaggccctgactgcaatgagctctgggagggcctcaggagccccgcttgcttattcttgctcacacttggcaccatctttaaaaaaaacagtttcctggtggattgtttcaagatttggacagttactggtgctaagtaaagaaatttgggttgagagcagccctttctctttgccgcccacagcttcacaggggaggggagcttctgtggcttggttccaggcctgggtcctcctctgatctgctgtgtgaccgcatttgagtcacttcccctctttctcagtctcctgccatgcaaagaaggctcatagagttgctttggaagtggattctttgtacagcctggaagaagacgctgtgtaaatgacatgctttgggggctcccccggccacagaaggagaaaactggagccttctgatttcctgttgtttactttccagaggctggagttgggtaggaaacctgagcataccggcacactggcttgtgggtgacttctctccctgctgtatttcccggacaggtgaggcggaccctgttcatcacaggactccccagagatgccaggaaggagactgtggagagccacttccggtaagcaggtggggtgggaggggagctgagccccctccacgtaggaccaacacagccccacccgcagggcgagcaccttaggtgagcgccttctgtctctcgcttgggtatccaggtgagatctgagaaggacctggccctgccacacgtgtatggagtggctcctgtgtgccagccctgctggtgctgtgcagtgaatagcgccctggtggcctatcctcttcaagcagcctgtgcacagtgtccagagcacagaccagggtgtaggtgcgaataaacgtcttgagagcatacgggggaaaaaattgttgaccccggggttcttagcatcacctttgcagaataagagagacgtgagctgagcatttgtatggacccacagggctagggtctcacaggtggaaggacctcggggccatctctgcgtttgttcgtttgtccacccactgagcgggtgtctgttgagtgagcactgtgtctgagtccaggctctccctggtagaacctcctttccagcggctccctttgagtatctgcaccaccaattcctgcagatggaggctggaggaaagtctttcctgtgaggagattacgtgtgcagccagggatgcggggaaaggcccagagcatcaggaaaggtggcggtggggtgcaggggggcagggcaagcagtccgggaaggctcccaggaccccatgctggaggacctgaaggctgggctgaggagctgacattttattctttcttcattcctttttttgtaatcttatttttttagagacagggtcttgctctgttgcccaggctagagttcagtagtgcaataatagcttactgcggcctcaactcctggacttaaggcatcttcctgcctcagcctcccaagtagctgggactgcagacacatggcaccacacccagctaatttttaaattttttatggagatagagtcttgctatgttgcccaggctggtctcgaattgctgggctcaagtgatcctcctgccttgccctcccaaagtgctgggattacaggcgtgagccaccatgcccggcctctcttcattccttatcaatacagcagccactaatttgttgcatggactaggagttggctgcactttaactttgcactatttgtgaagaaagcacttgctaagcaaattgctagacaggatcgtaaactgaatgtttaaaatttgaaaaacttcttcagaaactctaagtattttagaaatatttactaatatgtaaatactcaataccagaatcatttttctgtatttccttgaagcaactcctcaaagttgcctgctaggcaacacctggaaacagtaattccacttaatgtataactttaaagagaaaaaaaaagtctcctcattctcatacaaacattgcatgactcatgctttcccctattttaagaggcctttttagtgaatgctgttgcagtccgtggggattgatgtatgaatttgcctttcaagcagggatgcttaaattgcagttttcttcctcacagctcttattgagaccagaaattgtcctactgtttaatttcatgattgatatacctatgggctgtctctctcactaaaatgtaagcacatccaggccctgttaccagcacctagaacagtgcctggcaggtggtaggtggggatttacatggttctggaatcccctggaattgtatgtataattttgcgtgtatggtgagggggtattgcatggtggccatgagcattgaccttggagccaggttgcctgtattcacctcctggctcagacactcactagctgtgtgatcttgggcacaagccacttacctctgtcggcctcagtttactcatctgtaaaatggggacaaaacctcacaggttatgatgaggattaaataaataaatatatgtaacaatacctggtcaatagtgagtatgtattttgctgggttttttttttttttttttttttttttgagacggagtctcactctgttgcccaggctggagtgcagtggggcaatcttgctcactgcaacctctgcctcccaggttcaagtgattctcgtgccccagcctcccaagtagctggattacaggtgtgtgccaccacacctggctaatttttgtatttttagtagagacagcgtttcaccacattggccaggctggtcgcaaactcctgacctcaagtgatccacccggctcagcctcccgaagtgctgggattacaggcatgagccaccgcacctggccttgctggttgttaatatgtgtgtagatattttctggtctgagggtcctttgctttcattagaccctctgaaaggtctgtgaccttaaaaaaggctacctgaataggatttcagtgatggctcaaggtagatactgacctagcacaaacaataaatctgttcctttgggtctttagaggggatagtgatgtgttcatttttccccaggagaagtgccagctgattccaagccaagtgggtataaacttgtcagttccaggcagttagcttcatactactaaaaaaggctagcggggtgcagtgactcacgcctacaatcccagcactttgggagggtgagacaggaggagtgcttgaggccagaagttcgaaatcagcctgggcaacatagcgagaccccgtctctacaaaaaataaaaatcagcctggtggcatgtgcctgtagccccagctactcaggaggctgaggtgggaggattgattgagcccagaaggttgaggctacagtgagccatgattgtgccactgtacagcagcctgggtgacagagtgagaccctgtctctaaacaaaacaaaacaaaacaaaagccctctttgtattaaatttcaaaatttcccccttttggaggataaaagacaaagagaagagaggtctccgctggcacagaaaccagcagcgagatcactctgccatcctttcccttggatccgtgggcacgtctcctgcttggggtgttttcttttccaacggtgtcttttgcctccttctctccctggccacagggacgcgtatcccacgtgtgaggtggttgatgtgcagctgtgctacaa

SEQ ID NO: 7629 - DNA, 1910 bp, Homo sapiens
ggggatggggcaaatctgagttttaatgaacactgccattgattctgatcatgctgaagtttagaaaccactggtttgatgcttatttgcactattatactgtggtttacatatgggcttgacaggtccatttactttcatttacttgctatttgagattttgtctggccagacaactgagcctcagataaattattttcttactaaattctggtaaataccaataaaaccttgaatacaaccaacataggacagtcagttctgctataatgatttttaaaatgggaatttgtttcaatgcaattaatatattgggaaacaaatttagcataaggcaaattttgcatttatttgtgcactacttcatctgctagaccaactaggtgaatgtaggaaccatacacagctgagctgagtctcataggaacacataaaacacacacacacctctcaaggacaatcagtggcccagacccatgcacatctactattacaacttcttgtccatttccaccacttcactgttattaatacaagctgcaagtcttccacaaactaacttcaggtggttttcaagataaagtgccatattgcttgcagtatttatgtattttttaatcatttaatgaatgtaaaactatgctaccatttattagctgcttctttttaaaaatgttccactgacaaatgttttgagtattatgccccgaggcctatgatttttattgtgttcttttgcattgcacagagaattttagcaatccctatgttgcactaaagcagaattgagactaatttgagcaaaacttagcaacttataactgttacaatccttatttcagggcaaacttttcattttataatcataattattttgtttcctcttgagtagcacacacacacacacacacaaatctaaggtgttcactatcacagaataatagcctttaaaatgtttaccagttttcatattgatatattttgtttgactctgtcattccgggctttaagtactaaaatatattagtctttttcagaaaacattccaagaaaaaagttgaattcctacctagtttcctctctctttgataacctattgtcatagtaatatacaaatacctgaaaattgcccagattattcttttcttcttggaacacagatttgttgataagtgccaaaggattttttacaaaaacatgagaagtttgacatcacagtaagatttaaaaggaaaggctgtttattgttattatcatcattgctactactatttccgttagtatatatttctttgtcttatttgtccttttccaaaagatttttgttcttatatttttaattagctctttaaagaaatcaagaactgcttgttgattatagacatccttattgtataaagagggagaagttctttggtaattagctgtgtataggttctgttcaaacaattggctcaagtgaggttgtacagaaagaactcttgtattttcttatttttcagtatattctccactccatcacacctctttttccaaagatgcagtgcaaagaaagtataatctctggagtaattaaagctcagtgaggaaatgatatcacctgatggccctatgaagcattcagcaataaaaggtgagttgcccaaaatgcatttaccctgaacaggaatacaatgaaactaccaagttttatctttataatgattcgtggcttattattttgttgtttgtatatgttctgtttcccacatcagtgttgtcttacattattatctgtcttaacttagactctgttttctaaattgctctgtgcaattaaatgctttgtgatcataataaaaagcatcatgataacttttagactagaggtttccatacaaagctgtatcccatggagagcagctactggc

SEQ ID NO: 7630 - DNA, 1910 bp, Homo sapiens; identical to SEQ ID NO: 7629

SEQ ID NO: 7631 - DNA, 1910 bp, Homo sapiens; identical to SEQ ID NO: 7629

SEQ ID NO: 7632 - DNA, 1585 bp, Homo sapiens
aatatatgtgatttctcctttgacctgtaggttatttagaagtgcatttttagaaggatgagattttctaaaaatgttatttgggtgcataattttattctgttgtggtcagacaatagtccctgtgaaatttcagccttttgaaattcattaggaatcattttaaggaccagtatatggtctgaattggtgaaaattccatgagaatttgaaaagaaaaaagtgaaatctgcagtttttgagtataatatctataaatgtcaccaaagtcaagttggctgataatttgttctgggtatttctatccttcttggtttttaaaatcagggttgttctagcaattgctgagagagtactattcaattttctagacatgacagaaattttcaatctctcttatttttgtcagtttttgctttctataattttcaactttaattaggcgcataacgtgtcattgtatctttcagatgggctgacctttttatcgtcatgaattttgaatttttttcctaattagcttcgggatgccagggtatatgatgggtcaagaacatgacgtttcaaatttttcagtaatcataactctaaagtaatgtgtaactctgaaataatttattttatttaatcatcttttatcttattaatcaattgatttgttcccacaattacttacgtgtactttagaccattcctggattgacagtaaaagggagcacatgacaaattcttagttttagagcatgggctgcacaatcctgagcccagcctggtggtgatgaaattaagcccagtactaagagcgtaaatgaagaagaaactcagtagtaagagagtgtggaccaactggtcagatgctctaatcagcaactctcattccactgtcaaaaccttggagattttgtatgttttttaaataggtgaagtgaatcaagtggtgcctaccaaatttattttgtcctctgcatcagtgcgtggcatacaacattaacaatgagaagcaactaactcctataagctattttgggggaatagaggatggtacaaatatcacaactttacagcaaatattacaactccttcaaaacacagtttggcagtttttaaaaaaataaaaataaaagagttgatcaagctgggtacagtggcacacacctgtaatctcagcactttgggagactgaggtgggatgatcacttgagcccaggagtttgagactagagtgagctatgattgcgtcactgcactccagcctgggtgatagagtgagacccagtctctaagaagtaaaaatgaaagaaagaaaaaaagttggacaggcacctgccacatctcatttattccactccaggtatttaaccaaaataaataaaaatgtatgtccatagaaagatttacacatgaatgcccacagcaactttattcatagtactccaaactggtgacaacccaaatttccatcaacagatagataaactaatgatggtatatccatataataaatactgtttaataataataaataatgaactattgatgtatacagcatcttggataaatctcaaaataattatgatgactgaat

SEQ ID NO: 7633 - DNA, 102 bp, Homo sapiens
gcggaggttgcagtgagctgagatcgcgccactgcactccagcctggaccacagagcaagactccgtctcaaaaaaaaaaaaaaaaaaaaagaaagaaattt

SEQ ID NO: 7634 - DNA, 1317 bp, Homo sapiens
gtctcgctctgttgccagcctggagtgcagtgatgcgatctcggcttactgcaacctctgcttcctgggttcaagtgattctcctgtttcagcctcccaagtagctgggattacaggcgcctgccaccatgcccggctaatttttttttttgtatttttagtagagacggggtttcaccatgttggccaggctggtctcaaactcctgaccttgtgatctgtccacctcagcctccgaaagtgctgggattacaggcatgatccaccgtgtccggcctctataccaacaattctatattctactttgtgatactagagctgggactcgctagacttgtggctctcctgggatccctgagctccttgcaggagatttttaaggtcaaaataattttcataacggtattaagatattatttgcttttcttactcttattctcttttgaatgtacagtgaagttttcaagaggctatatgacatatgatccagtaacagaaacatagcaccagatgtaatttacccagctgtcttccatgaagccaggcattaaagagatttgcaattatgcaaaacaatgctacccttcttactattttttgtttgtttttgaaaatagttatttttcataataatgggttattttttgttaacaggtagtggtttgattcttgttatttttggaatgtcccatctttaatatggcaaatatcaatagatatcatccacataaacataagttccttcaggtcttcaatttttaagagttcacagagtcctgtgatcaaagagtgagaaacactgctgaagacatttcttcattgccagtggattcctgttctatccatagagggcgctagagagagacgagaaggcacaggggttggggcggtggggtggggagtcgcgggagaaggggctggacccagcaagagaacctgctgctcctgttgaatctctgcagcgtttcagcccggtggcggtacgatgttgtctctacctgcagactctaaagcagtgtaggctctagtctctagctcatgtccacaccaacaaaagcacaatgagctccctgctaagcaatctgggacaggccacggtgatgcaccctcctcagaggtctgagttcctgggctatagactagtcttgaattccccagttaccagaggcagccaggaagtatcacttccacaaaagtccaagggctaggtttgctaggcaacccctcacctcagaatttcatcctagctccaaggaatcctttcctcagggcttctaggtggtgattactgccatctaagggcagcacatgtttcct

SEQ ID NO: 7635 - DNA, 1237 bp, Homo sapiens
ccacaagtggcccctcctcctcccacatggctcctcgtcctcatcttcttacagtcctcttgctcctcccactgggactgaacccaaaggcatctcttcaatggggtggtccctgcctagggaaagccggtgcctccagccctttagtgccccttctgttatggcgtgtctcctgtgaagtctctgtcatccccaaggtcaagtttgctgggctcaatgattctgtgtgccctgcatcactttgctagcaggacagggattggcctccagtcttcagtccctcatccccaaagcccagaatagaacttcacagatggacctggggcccctcccggagccgggctttctggagtgttctcatttgctaacatctgcctccctcggcaacctttcctctgtaatggaacaggtccagaagagccatgtgggctgacacagtaaggcctccaggcatctgtgccgtgacgtgagcaaagtgtgagctgcatggtgggatatgccatgccttgcctaggggcccgggcactgccatcacagggaggtttggccaccaaccgacatggctgccccaggtgggaagggtcggatggaggaatttgccacccactcttgggaaacacccccaaaatgaacgaaggaatgacctctgtcctgttttagcatcccgggagacacactgtggcctaggatcctgcccggctgcagggctctggatggggcgtgacatcctgcccccgagggtgtggcggggagtcgatgtcacacagctgagccacagggcccagggatgtggtgaaagctttccccaggtcccaagtgcccacagcccctgccccatccaagacccagaaatgcagctcactctagcccttcagtgcgggcccgctctcaagcctgtccgtcacctcccagaactcccacgttcccaaaaccctgtgttcccagtctctttggtctccagaactgtcattaaagaaagaaggggctaggcacagtggctcgtgcctgtcatcccagcactttgggaggccgaggtgggcggatcacctgaggtcagtttgagaccagcctgggcaacatggtgaaaccccatctttactaaaaatacaaaaattagctgggtgtggtggcgggtgcctgtaatcccagctactcaggaggctgaggcaggagaattgcttgaacccgggaggcagaggttgcagtgagccaagatcaagccattgcactctagccc

SEQ ID NO: 7636 - DNA, 4510 bp, Homo sapiens
tttttttttttttttttttttttttttgaaacagagtttcactgttgttgcccaggctggactgcaatggcacaatctctgctcaccgcaacctccgcctcccgggttcaagtgattctcgtgcctcagtctctcaagtagctgagattacaggcatgcaccaccacacccggctaattttgtatttttagtaaagacagggtttctccatgttggtcaggctggtctcaaactcccgacctcaggtgatccgcccgcctcggcctcccaaagggctgggatgacaggcgtgagccaccgcgcccagcccgagacagtgttgattgcttgagtcctagtctcaagcagtcctccccacctccgcctcccaaagcgctgggattataggcaaaagccacttaactcagccctgacgtgttgatagcgacaggaggcagccaaatgcataggcagatagggcgggtccccggtgaaaccacacctccaagccaaaaagcctgaagcctgaaaaacagaactgctggtctgggatgaaactcgagacccagagcgagaacttctgttcctgtttgcctgccctttcctgatgggttctttccgaataatgcttttagtttatattattattattattattattattattattattattattattattattattattttgagagagagagcctcactctgtcacccaggctggagtgcagtagcacgatcctggctgactgcaacctctacctcctggtgcaagcaattctcatgcctcagcctccccagtagctgggattacaggcgaacgtgaatgctaccacacccagctattttttgtattttagtagagataaggtttcaccatgttgcccaggctggtcccaaactcctgatctcagatgatgatctgcctgcctcagcctcccaaagtgttgggattacaggcatgagccacaacacccagcctgaataatgcttttaaccagttgaatgttgccttctctaatactacctatgacctgcccctccccaatactgagcccataaaagccctggactcagccacattgaggggactttcctgcctttaagtagggggaccacccccaaatcgcctctctgttgaaaactgttttatcactcaataaaccccccacctattgtatcactcaataaaatctccaccctcactcttcgattgccagtgtatccccattctttgtgggtgcaggacaagaacttgggaaccagtgcacaagccagactcggcccaggtggggtgagtgggcgagctgtctctgcagcaggtattgtggcccagcgaggcccaggtggggcatcatcggctggaggtccctggcttgcaaagtgactgagaataaaattgttcatcaattttaagtcactaactttgtggtaatttgttctggcagccctaggaaatgaggacagtgtgtcaaaggttcatttaactaattaatttacctgggtgtggtggctcaggcctgtaatgccaacactttgggaggcccaggcaggtcctgaggtcaggaattcaaaaccagcctggccaacatggcgaaaccccgtctctactaaaattacaaaattaactgggcatggtggcgcatgcttgtaattccagctacttgggaagctgaagcaaaagaatcacttgaacccgggaagcagaggttgcaaaaaaccgaaatctcgccactgcactccagcctgggcgacagagcaaaactctatctcaaaaaaaacaaaacaaaacaaaaaaaactgaccacagtggctcatgcctgtaattccagcactttgggaggctgaggcaggcagatcacctgaagttgggagttccagaccagcctaaccaacatggaaaaactctgtttttactaaaaatacaaaattagccaggcgtggtggcccatgcctgtaatcccagctactcgggaggctgaggcaggagaattgcttgagctcaggaggtggaggttgcagtgagccgagattgagccattgcactccagcctgggcaaaaaagtgagaccttgtctcaaaataaaataaaattaaattaaataaaaaataaatcacactgggccataaaatgaagctggtgtcagcaagtgtggtccaattatttacataggtgcagaaacagtgcaaatatcccatataggccaccttacgtttgctttgctggaagttttcataagaaatatcagattggggctgggtgccgtggctcacacctgtaatcccagcactttgggaggctgaggcaggtggatcacttgaggtcgggagttcgcaaccagcctgatcaacatggtgaaactctgtctctactaaaaatacaaaaattgccgggcgtggtggctcacgcctgtaatcccagcactttgggaggctgaggcgggcggatcacgaggtccagagatcgagaccatcttggctaacacggtgaaaccccgtctctactctatatacaaaaaaaaaaaaaaaaaaattaggtgggtatggtagcacgtgcctgtagtcccagctactcatggctgaggcaggagaatcacttgaacccggaaggtggaggttgcagtgagccaagattgcaccactgtgccagcctgagtgacagagtgagactcggtctcgaaaaaacaaaacaaaacaaaaattagctgggggtggtggcagacgcctgtaatttcagctactcgggaggctgaggcagaagaatcgcttgaacccaggaggcggaggttgcagtgatctgagatcacaccattggactccagcctgggtgacaaaagtgaaacagtctcaaagaaaagaaagaaatatcagagtggacctgtattgtttgcttctttgcagaggcaagaaacgcaatacctataatttgggtcaatttctatgttcctgggcctgccaggaaatcaccttcctggtcacctgcaaagcctggggtctgcaccctcaggaagatttgcaggcactccttcataacagcaacccaaggtccgcagcagcggctggtcatccccagtgaaagagcagaactctccatatgacaacctggacaaggccttggtgacctaaccaattcatccaattgtcttctgtaaaaggagaagagtctcttaactgaatctatgtgctgtggtttgaaagtgtcccccagagttcatggattgcaaacctgatccccagtgtggcagtaatggaggtgggacctttttatttttttctgagatggaatctcgctctgtcatcccaggctggagtgcaatggtgcgatcttggcttgtcgcaacctctgcctcccaggttcaaacaattctcccgcctcagcctcccgaatagctgggattacaggcatgtgccaccacgcctggcaaattttgtatatttagagagacggggtttctccatgttggtcaggctggtcttgaactcctgacctagtgatccgcccgcctccacctcccaaagtgctgggattacagtcgtgaaccaccacaccccgccagaggtgggacctttaagaggtgattaggtcttgagggcttcaccctcatgaagggattaatgccattatttcgggaattgattccttataaaaggatgagtttggcccctttccgtccagccacataatgcctgctggcatgttatgtggcagcaggaaggtcctcatgagatgtggcccctccctcttggacctccaaatctccagaaccaataaatcccagtttattatcaattacccagtctgtggcattatagcagcacaaaacgaactaagacactgtagggtccagccctatggggctaagcgggtgttgtccccatgtgcagagacgagagattgtagtaaataaagacacaagacaaagagataaagagaaaacagctgggcccgggggaccactaccatcaagacgcagagactggtagtggccccgaatggctgggcgcgctgatatttattgcatacaagacaagggggggcagggtaaggagggtgaatcttctaagtgattgacaaggtgaagcaagtcacatgatcataggacagggggcccttccttcttaggtagccgaagcagagagagaaggcagcaaacgtcagcgttttcttgtatgcacttacaagaaagatcaaagactttaagactttcactatttcttctactgctatttactacaaacttcaaagaggaactaggagtacaggaggagcatgaaagtggacaaggagcgtgaacattgaagcaccacagggaggggtttaggcctccggatgattgcggccaggcctggataatatccagccttccacaagaagctggtggagcagagtgttccctgactcctccaaggaaaggagactccctttcgcagtctattaagcaacgggtgacttcccagacactggcgttagggcttgaccaaggagccctcaagcagcccttatgcgggcgtgacagagggctca

SEQ ID NO: 7637 - DNA, 1181 bp, Homo sapiens
caggaagtcgattctgagacccgataccctgcgaggggagtgcaggataagcaggagacattaattagcgctgccttaagcagttttaccgacgcaggcgggactgtggtggagcactggagatgctgcgagccctgagctgccttcacagccttgttgggtgtgctgctggatcacactgcatgagaaatggaagcaacctatctgtaaagagcctgcaaacctcaggacgctctggaagccagtggaataattacagtgggatgaggctgcaagtccccttgcttcctgagctgcattcatggctgtgtgaaggggagaaaggaatacatttgaggtcttttcatggaagacacagatattttaatgttgcgataccatccaacagggtgagctgagagaaccaacactaagagtttcacagatagaacaccactattccctgtgtaaaacaggaggtaggcaggcgtaggcctcccctggaaaacaatgttttaagagctcataaatacctagacgtcaaatcatcctcgtttctagtgtttgtatagatatttccaataatatatttagtgggctcacttttttattttgtgcatttatcctggtttattgtttatttttcctgaattattggccaatgaatatttatattagaacagaaaaaaatatattctaaaattaatgtcataaaaataagttacatcagttagatgtcctctgcatgagaaagggataagatggattgctaaatatcccctggggctgagccagcaagactaggactgcacacccctcatcattagcaaggacacaaaatcacggaggagacccagttggccagggcagaccagccaggcagtgctgtgtcgaacgcatgatgaatgtggtggatgcattgagctctcttcccagctgaggagttaaagagaaacatttagtaaaaagggccaggatttagtcacaatgctaccctctcccgatagaataattaagcaatgaacacagctgcacatttctggaatggacactgcgagaaaggtgtagtttttccatgttgtatggcatttgttttcttgcaaacaggcaagcacgggctaggactgtttctacgcctgtctgcactgtgatatgcactgtcttcgctgcagaagagcaccacaatgctgccttcatattcc

SEQ ID NO: 7638 - DNA, 38771 bp, Homo sapiens
  SITE (29356): n equals a,t,g, or c
  SITE (29357): n equals a,t,g, or c
  SITE (29358): n equals a,t,g, or c
  SITE (29359): n equals a,t,g, or c
  SITE (29360): n equals a,t,g, or c
  SITE (29361): n equals a,t,g, or c
  SITE (29362): n equals a,t,g, or c
  SITE (29363): n equals a,t,g, or c
  SITE (29364): n equals a,t,g, or c
  SITE (29365): n equals a,t,g, or c
  SITE (29366): n equals a,t,g, or c
  SITE (29367): n equals a,t,g, or c
  SITE (29368): n equals a,t,g, or c
  SITE (29369): n equals a,t,g, or c
  SITE (29370): n equals a,t,g, or c
  SITE (29371): n equals a,t,g, or c
  SITE (29372): n equals a,t,g, or c
  SITE (29373): n equals a,t,g, or c
  SITE (29374): n equals a,t,g, or c
  SITE (29375): n equals a,t,g, or c
  SITE (29376): n equals a,t,g, or c
  SITE (29377): n equals a,t,g, or c
  SITE (29378): n equals a,t,g, or c
  SITE (29379): n equals a,t,g, or c
  SITE (29380): n equals a,t,g, or c
  SITE (29381): n equals a,t,g, or c
  SITE (29382): n equals a,t,g, or c
  SITE (29383): n equals a,t,g, or c
  SITE (29384): n equals a,t,g, or c
  SITE (29385): n equals a,t,g, or c
  SITE (29386): n equals a,t,g, or c
  SITE (29387): n equals a,t,g, or c
  SITE (29388): n equals a,t,g, or c
  SITE (29389): n equals a,t,g, or c
  SITE (29390): n equals a,t,g, or c
  SITE (29391): n equals a,t,g, or c
  SITE (29392): n equals a,t,g, or c
  SITE (29393): n equals a,t,g, or c
  SITE (29394): n equals a,t,g, or c
  SITE (29395): n equals a,t,g, or c
  SITE (29396): n equals a,t,g, or c
  SITE (29397): n equals a,t,g, or c
  SITE (29398): n equals a,t,g, or c
  SITE (29399): n equals a,t,g, or c
  SITE (29400): n equals a,t,g, or c
  SITE (29401): n equals a,t,g, or c
  SITE (29402): n equals a,t,g, or c
  SITE (29403): n equals a,t,g, or c
  SITE (29404): n equals a,t,g, or c
  SITE (29405): n equals a,t,g, or c
  SITE (29406): n equals a,t,g, or c
  SITE (29407): n equals a,t,g, or c
  SITE (29408): n equals a,t,g, or c
  SITE (29409): n equals a,t,g, or c
  SITE (29410): n equals a,t,g, or c
  SITE (29411): n equals a,t,g, or c
  SITE (29412): n equals a,t,g, or c
  SITE (29413): n equals a,t,g, or c
  SITE (29414): n equals a,t,g, or c
  SITE (29415): n equals a,t,g, or c
  SITE (29416): n equals a,t,g, or c
  SITE (29417): n equals a,t,g, or c
  SITE (29418): n equals a,t,g, or c
  SITE (29419): n equals a,t,g, or c
  SITE (29420): n equals a,t,g, or c
  SITE (29421): n equals a,t,g, or c
  SITE (29422): n equals a,t,g, or c
  SITE (29423): n equals a,t,g, or c
  SITE (29424): n equals a,t,g, or c
  SITE (29425): n equals a,t,g, or c
  SITE (29426): n equals a,t,g, or c
  SITE (29427): n equals a,t,g, or c
  SITE (29428): n equals a,t,g, or c
  SITE (29429): n equals a,t,g, or c
  SITE (29430): n equals a,t,g, or c
  SITE (29431): n equals a,t,g, or c
  SITE (29432): n equals a,t,g, or c
  SITE (29433): n equals a,t,g, or c
  SITE (29434): n equals a,t,g, or c
  SITE (29435): n equals a,t,g, or c
  SITE (29436): n equals a,t,g, or c
  SITE (29437): n equals a,t,g, or c
  SITE (29438): n equals a,t,g, or c
  SITE (29439): n equals a,t,g, or c
  SITE (29440): n equals a,t,g, or c
  SITE (29441): n equals a,t,g, or c
  SITE (29442): n equals a,t,g, or c
  SITE (29443): n equals a,t,g, or c
  SITE (29444): n equals a,t,g, or c
  SITE (29445): n equals a,t,g, or c
  SITE (29446): n equals a,t,g, or c
  SITE (29447): n equals a,t,g, or c
  SITE (29448): n equals a,t,g, or c
  SITE (29449): n equals a,t,g, or c
  SITE (29450): n equals a,t,g, or c
  SITE (29451): n equals a,t,g, or c
  SITE (29452): n equals a,t,g, or c
  SITE (29453): n equals a,t,g, or c
  SITE (29454): n equals a,t,g, or c
  SITE (29455): n equals a,t,g, or c
  SITE (29456): n equals a,t,g, or c
  SITE (29457): n equals a,t,g, or c
  SITE (29458): n equals a,t,g, or c
  SITE (29459): n equals a,t,g, or c
  SITE (29460): n equals a,t,g, or c
  SITE (29461): n equals a,t,g, or c
  SITE (29462): n equals a,t,g, or c
  SITE (29463): n equals a,t,g, or c
  SITE (29464): n equals a,t,g, or c
  SITE (29465): n equals a,t,g, or c
  SITE (29466): n equals a,t,g, or c
  SITE (29467): n equals a,t,g, or c
  SITE (29468): n equals a,t,g, or c
  SITE (29469): n equals a,t,g, or c
  SITE (29470): n equals a,t,g, or c
  SITE (29471): n equals a,t,g, or c
  SITE (29472): n equals a,t,g, or c
  SITE (29473): n equals a,t,g, or c
  SITE (29474): n equals a,t,g, or c
  SITE (29475): n equals a,t,g, or c
  SITE (29476): n equals a,t,g, or c
  SITE (29477): n equals a,t,g, or c
  SITE (29478): n equals a,t,g, or c
  SITE (29479): n equals a,t,g, or c
  SITE (29480): n equals a,t,g, or c
  SITE (29481): n equals a,t,g, or c
  SITE (29482): n equals a,t,g, or c
  SITE (29483): n equals a,t,g, or c
  SITE (29484): n equals a,t,g, or c
  SITE (29485): n equals a,t,g, or c
  SITE (29486): n equals a,t,g, or c
  SITE (29487): n equals a,t,g, or c
  SITE (29488): n equals a,t,g, or c
  SITE (29489): n equals a,t,g, or c
  SITE (29490): n equals a,t,g, or c
  SITE (29491): n equals a,t,g, or c
  SITE (29492): n equals a,t,g, or c
  SITE (29493): n equals a,t,g, or c
  SITE (29494): n equals a,t,g, or c
  SITE (29495): n equals a,t,g, or c
  SITE (29496): n equals a,t,g, or c
  SITE (29497): n equals a,t,g, or c
  SITE (29498): n equals a,t,g, or c
  SITE (29499): n equals a,t,g, or c
  SITE (29500): n equals a,t,g, or c
  SITE (29501): n equals a,t,g, or c
  SITE (29502): n equals a,t,g, or c
  SITE (29503): n equals a,t,g, or c
  SITE (29504): n equals a,t,g, or c
  SITE (29505): n equals a,t,g, or c
  SITE (29506): n equals a,t,g, or c
  SITE (29507): n equals a,t,g, or c
  SITE (29508): n equals a,t,g, or c
  SITE (29509): n equals a,t,g, or c
  SITE (29510): n equals a,t,g, or c
  SITE (29511): n equals a,t,g, or c
  SITE (29512): n equals a,t,g, or c
  SITE (29513): n equals a,t,g, or c
  SITE (29514): n equals a,t,g, or c
  SITE (29515): n equals a,t,g, or c
  SITE (29516): n equals a,t,g, or c
  SITE (29517): n equals a,t,g, or c
  SITE (29518): n equals a,t,g, or c
  SITE (29519): n equals a,t,g, or c
  SITE (29520): n equals a,t,g, or c
  SITE (29521): n equals a,t,g, or c
  SITE (29522): n equals a,t,g, or c
  SITE (29523): n equals a,t,g, or c
  SITE (29524): n equals a,t,g, or c
  SITE (29525): n equals a,t,g, or c
  SITE (29526): n equals a,t,g, or c
  SITE (29527): n equals a,t,g, or c
  SITE (29528): n equals a,t,g, or c
  SITE (29529): n equals a,t,g, or c
  SITE (29530): n equals a,t,g, or c
  SITE (29531): n equals a,t,g, or c
  SITE (29532): n equals a,t,g, or c
  SITE (29533): n equals a,t,g, or c
  SITE (29534): n equals a,t,g, or c
  SITE (29535): n equals a,t,g, or c
  SITE (29536): n equals a,t,g, or c
  SITE (29537): n equals a,t,g, or c
  SITE (29538): n equals a,t,g, or c
  SITE (29539): n equals a,t,g, or c
  SITE (29540): n equals a,t,g, or c
  SITE (29541): n equals a,t,g, or c
  SITE (29542): n equals a,t,g, or c
  SITE (29543): n equals a,t,g, or c
  SITE (29544): n equals a,t,g, or c
  SITE (29545): n equals a,t,g, or c
  SITE (29546): n equals a,t,g, or c
  SITE (29547): n equals a,t,g, or c
  SITE (29548): n equals a,t,g, or c
  SITE (29549): n equals a,t,g, or c
  SITE (29550): n equals a,t,g, or c
  SITE (29551): n equals a,t,g, or c
  SITE (29552): n equals a,t,g, or c
  SITE (29553): n equals a,t,g, or c
  SITE (29554): n equals a,t,g, or c
  SITE (29555): n equals a,t,g, or c
  SITE (29556): n equals a,t,g, or c
  SITE (29557): n equals a,t,g, or c
  SITE (29558): n equals a,t,g, or c
  SITE (29559): n equals a,t,g, or c
  SITE (29560): n equals a,t,g, or c
  SITE (29561): n equals a,t,g, or c
  SITE (29562): n equals a,t,g, or c
  SITE (29563): n equals a,t,g, or c
  SITE (29564): n equals a,t,g, or c
  SITE (29565): n equals a,t,g, or c
  SITE (29566): n equals a,t,g, or c
  SITE (29567): n equals a,t,g, or c
  SITE (29568): n equals a,t,g, or c
  SITE (29569): n equals a,t,g, or c
  SITE (29570): n equals a,t,g, or c
  SITE (29571): n equals a,t,g, or c
  SITE (29572): n equals a,t,g, or c
  SITE (29573): n equals a,t,g, or c
  SITE (29574): n equals a,t,g, or c
  SITE (29575): n equals a,t,g, or c
  SITE (29576): n equals a,t,g, or c
  SITE (29577): n equals a,t,g, or c
  SITE (29578): n equals a,t,g, or c
  SITE (29579): n equals a,t,g, or c
  SITE (29580): n equals a,t,g, or c
  SITE (29581): n equals a,t,g, or c
  SITE (29582): n equals a,t,g, or c
  SITE (29583): n equals a,t,g, or c
  SITE (29584): n equals a,t,g, or c
  SITE (29585): n equals a,t,g, or c
  SITE (29586): n equals a,t,g, or c
  SITE (29587): n equals a,t,g, or c
  SITE (29588): n equals a,t,g, or c
  SITE (29589): n equals a,t,g, or c
  SITE (29590): n equals a,t,g, or c
  SITE (29591): n equals a,t,g, or c
  SITE (29592): n equals a,t,g, or c
  SITE (29593): n equals a,t,g, or c
  SITE (29594): n equals a,t,g, or c
  SITE (29595): n equals a,t,g, or c
  SITE (29596): n equals a,t,g, or c
  SITE (29597): n equals a,t,g, or c
  SITE (29598): n equals a,t,g, or c
  SITE (29599): n equals a,t,g, or c
  SITE (29600): n equals a,t,g, or c
  SITE (29601): n equals a,t,g, or c
  SITE (29602): n equals a,t,g, or c
  SITE (29603): n equals a,t,g, or c
  SITE (29604): n equals a,t,g, or c
  SITE (29605): n equals a,t,g, or c
  SITE (29606): n equals a,t,g, or c
  SITE (29607): n equals a,t,g, or c
  SITE (29608): n equals a,t,g, or c
  SITE (29609): n equals a,t,g, or c
  SITE (29610): n equals a,t,g, or c
  SITE (29611): n equals a,t,g, or c
  SITE (29612): n equals a,t,g, or c
  SITE (29613): n equals a,t,g, or c
  SITE (29614): n equals a,t,g, or c
  SITE (29615): n equals a,t,g, or c
  SITE (29616): n equals a,t,g, or c
  SITE (29617): n equals a,t,g, or c
  SITE (29618): n equals a,t,g, or c
  SITE (29619): n equals a,t,g, or c
  SITE (29620): n equals a,t,g, or c
  SITE (29621): n equals a,t,g, or c
  SITE (29622): n equals a,t,g, or c
  SITE (29623): n equals a,t,g, or c
  SITE (29624): n equals a,t,g, or c
  SITE (29625): n equals a,t,g, or c
  SITE (29626): n equals a,t,g, or c
  SITE (29627): n equals a,t,g, or c
  SITE (29628): n equals a,t,g, or c
  SITE (29629): n equals a,t,g, or c
  SITE (29630): n equals a,t,g, or c
  SITE (29631): n equals a,t,g, or c
  SITE (29632): n equals a,t,g, or c
  SITE (29633): n equals a,t,g, or c
  SITE (29634): n equals a,t,g, or c
  SITE (29635): n equals a,t,g, or c
  SITE (29636): n equals a,t,g, or c
  SITE (29637): n equals a,t,g, or c
  SITE (29638): n equals a,t,g, or c
  SITE (29639): n equals a,t,g, or c
  SITE (29640): n equals a,t,g, or c
  SITE (29641): n equals a,t,g, or c
  SITE (29642): n equals a,t,g, or c
  SITE (29643): n equals a,t,g, or c
  SITE (29644): n equals a,t,g, or c
  SITE (29645): n equals a,t,g, or c
  SITE (29646): n equals a,t,g, or c
  SITE (29647): n equals a,t,g, or c
  SITE (29648): n equals a,t,g, or c
  SITE (29649): n equals a,t,g, or c
  SITE (29650): n equals a,t,g, or c
  SITE (29651): n equals a,t,g, or c
  SITE (29652): n equals a,t,g, or c
  SITE (29653): n equals a,t,g, or c
  SITE (29654): n equals a,t,g, or c
  SITE (29655): n equals a,t,g, or c
  SITE (29656): n equals a,t,g, or c
  SITE (29657): n equals a,t,g, or c
  SITE (29658): n equals a,t,g, or c
  SITE (29659): n equals a,t,g, or c
  SITE (29660): n equals a,t,g, or c
  SITE (29661): n equals a,t,g, or c
  SITE (29662): n equals a,t,g, or c
  SITE (29663): n equals a,t,g, or c
  SITE (29664): n equals a,t,g, or c
  SITE (29665): n equals a,t,g, or c
  SITE (29666): n equals a,t,g, or c
  SITE (29667): n equals a,t,g, or c
  SITE (29668): n equals a,t,g, or c
  SITE (29669): n equals a,t,g, or c
  SITE (29670): n equals a,t,g, or c
  SITE (29671): n equals a,t,g, or c
  SITE (29672): n equals a,t,g, or c
  SITE (29673): n equals a,t,g, or c
  SITE (29674): n equals a,t,g, or c
  SITE (29675): n equals a,t,g, or c
  SITE (29676): n equals a,t,g, or c
  SITE (29677): n equals a,t,g, or c
  SITE (29678): n equals a,t,g, or c
  SITE (29679): n equals a,t,g, or c
  SITE (29680): n equals a,t,g, or c
  SITE (29681): n equals a,t,g, or c
  SITE (29682): n equals a,t,g, or c
  SITE (29683): n equals a,t,g, or c
  SITE (29684): n equals a,t,g, or c
  SITE (29685): n equals a,t,g, or c
  SITE (29686): n equals a,t,g, or c
  SITE (29687): n equals a,t,g, or c
  SITE (29688): n equals a,t,g, or c
  SITE (29689): n equals a,t,g, or c
  SITE (29690): n equals a,t,g, or c
  SITE (29691): n equals a,t,g, or c
  SITE (29692): n equals a,t,g, or c
  SITE (29693): n equals a,t,g, or c
  SITE (29694): n equals a,t,g, or c
  SITE (29695): n equals a,t,g, or c
  SITE (29696): n equals a,t,g, or c
  SITE (29697): n equals a,t,g, or c
  SITE (29698): n equals a,t,g, or c
  SITE (29699): n equals a,t,g, or c
  SITE (29700): n equals a,t,g, or c
  SITE (29701): n equals a,t,g, or c
  SITE (29702): n equals a,t,g, or c
  SITE (29703): n equals a,t,g, or c
  SITE (29704): n equals a,t,g, or c
  SITE (29705): n equals a,t,g, or c
  SITE (29706): n equals a,t,g, or c
  SITE (29707): n equals a,t,g, or c
  SITE (29708): n equals a,t,g, or c
  SITE (29709): n equals a,t,g, or c
  SITE (29710): n equals a,t,g, or c
  SITE (29711): n equals a,t,g, or c
  SITE (29712): n equals a,t,g, or c
  SITE (29713): n equals a,t,g, or c
  SITE (29714): n equals a,t,g, or c
  SITE (29715): n equals a,t,g, or c
  SITE (29716): n equals a,t,g, or c
  SITE (29717): n equals a,t,g, or c
  SITE (29718): n equals a,t,g, or c
  SITE (29719): n equals a,t,g, or c
  SITE (29720): n equals a,t,g, or c
  SITE (29721): n equals a,t,g, or c
  SITE (29722): n equals a,t,g, or c
  SITE (29723): n equals a,t,g, or c
  SITE (29724): n equals a,t,g, or c
  SITE (29725): n equals a,t,g, or c
  SITE (29726): n equals a,t,g, or c
  SITE (29727): n equals a,t,g, or c
  SITE (29728): n equals a,t,g, or c
  SITE (29729): n equals a,t,g, or c
  SITE (29730): n equals a,t,g, or c
  SITE (29731): n equals a,t,g, or c
  SITE (29732): n equals a,t,g, or c
  SITE (29733): n equals a,t,g, or c
  SITE (29734): n equals a,t,g, or c
  SITE (29735): n equals a,t,g, or c
  SITE (29736): n equals a,t,g, or c
  SITE (29737): n equals a,t,g, or c
  SITE (29738): n equals a,t,g, or c
  SITE (29739): n equals a,t,g, or c
  SITE (29740): n equals a,t,g, or c
  SITE (29741): n equals a,t,g, or c
  SITE (29742): n equals a,t,g, or c
  SITE (29743): n equals a,t,g, or c
  SITE (29744): n equals a,t,g, or c
  SITE (29745): n equals a,t,g, or c
  SITE (29746): n equals a,t,g, or c
  SITE (29747): n equals a,t,g, or c
  SITE (29748): n equals a,t,g, or c
  SITE (29749): n equals a,t,g, or c
  SITE (29750): n equals a,t,g, or c
  SITE (29751): n equals a,t,g, or c
  SITE (29752): n equals a,t,g, or c
  SITE (29753): n equals a,t,g, or c
  SITE (29754): n equals a,t,g, or c
  SITE (29755): n equals a,t,g, or c
  SITE (29756): n equals a,t,g, or c
  SITE (29757): n equals a,t,g, or c
  SITE (29758): n equals a,t,g, or c
  SITE (29759): n equals a,t,g, or c
  SITE (29760): n equals a,t,g, or c
  SITE (29761): n equals a,t,g, or c
  SITE (29762): n equals a,t,g, or c
  SITE (29763): n equals a,t,g, or c
  SITE (29764): n equals a,t,g, or c
  SITE (29765): n equals a,t,g, or c
  SITE (29766): n equals a,t,g, or c
  SITE (29767): n equals a,t,g, or c
  SITE (29768): n equals a,t,g, or c
  SITE (29769): n equals a,t,g, or c
  SITE (29770): n equals a,t,g, or c
  SITE (29771): n equals a,t,g, or c
  SITE (29772): n equals a,t,g, or c
  SITE (29773): n equals a,t,g, or c
  SITE (29774): n equals a,t,g, or c
  SITE (29775): n equals a,t,g, or c
  SITE (29776): n equals a,t,g, or c
  SITE (29777): n equals a,t,g, or c
  SITE (29778): n equals a,t,g, or c
  SITE (29779): n equals a,t,g, or c
  SITE (29780): n equals a,t,g, or c
  SITE (29781): n equals a,t,g, or c
  SITE (29782): n equals a,t,g, or c
  SITE (29783): n equals a,t,g, or c
  SITE (29784): n equals a,t,g, or c
  SITE (29785): n equals a,t,g, or c
  SITE (29786): n equals a,t,g, or c
  SITE (29787): n equals a,t,g, or c
  SITE (29788): n equals a,t,g, or c
  SITE (29789): n equals a,t,g, or c
  SITE (29790): n equals a,t,g, or c
  SITE (29791): n equals a,t,g, or c
  SITE (29792): n equals a,t,g, or c
  SITE (29793): n equals a,t,g, or c
  SITE (29794): n equals a,t,g, or c
  SITE (29795): n equals a,t,g, or c
  SITE (29796): n equals a,t,g, or c
  SITE (29797): n equals a,t,g, or c
  SITE (29798): n equals a,t,g, or c
  SITE (29799): n equals a,t,g, or c
  SITE (29800): n equals a,t,g, or c
  SITE (29801): n equals a,t,g, or c
  SITE (29802): n equals a,t,g, or c
  SITE (29803): n equals a,t,g, or c
  SITE (29804): n equals a,t,g, or c
  SITE (29805): n equals a,t,g, or c
  SITE (29806): n equals a,t,g, or c
  SITE (29807): n equals a,t,g, or c
  SITE (29808): n equals a,t,g, or c
  SITE (29809): n equals a,t,g, or c
  SITE (29810): n equals a,t,g, or c
  SITE (29811): n equals a,t,g, or c
  SITE (29812): n equals a,t,g, or c
  SITE (29813): n equals a,t,g, or c
  SITE (29814): n equals a,t,g, or c
  SITE (29815): n equals a,t,g, or c
  SITE (29816): n equals a,t,g, or c
  SITE (29817): n equals a,t,g, or c
  SITE (29818): n equals a,t,g, or c
  SITE (29819): n equals a,t,g, or c
  SITE (29820): n equals a,t,g, or c
  SITE (29821): n equals a,t,g, or c
  SITE (29822): n equals a,t,g, or c
  SITE (29823): n equals a,t,g, or c
  SITE (29824): n equals a,t,g, or c
  SITE (29825): n equals a,t,g, or c
  SITE (29826): n equals a,t,g, or c
  SITE (29827): n equals a,t,g, or c
  SITE (29828): n equals a,t,g, or c
  SITE (29829): n equals a,t,g, or c
  SITE (29830): n equals a,t,g, or c
  SITE (29831): n equals a,t,g, or c
  SITE (29832): n equals a,t,g, or c
  SITE (29833): n equals a,t,g, or c
  SITE (29834): n equals a,t,g, or c
  SITE (29835): n equals a,t,g, or c
  SITE (29836): n equals a,t,g, or c
  SITE (29837): n equals a,t,g, or c
  SITE (29838): n equals a,t,g, or c
  SITE (29839): n equals a,t,g, or c
  SITE (29840): n equals a,t,g, or c
  SITE (29841): n equals a,t,g, or c
  SITE (29842): n equals a,t,g, or c
  SITE (29843): n equals a,t,g, or c
  SITE (29844): n equals a,t,g, or c
  SITE (29845): n equals a,t,g, or c
  SITE (29846): n equals a,t,g, or c
  SITE (29847): n equals a,t,g, or c
  SITE (29848): n equals a,t,g, or c
  SITE (29849): n equals a,t,g, or c
  SITE (29850): n equals a,t,g, or c
  SITE (29851): n equals a,t,g, or c
  SITE (29852): n equals a,t,g, or c
  SITE (29853): n equals a,t,g, or c
  SITE (29854): n equals a,t,g, or c
  SITE (29855): n equals a,t,g, or c
  SITE (29856): n equals a,t,g, or c
  SITE (29857): n equals a,t,g, or c
  SITE (29858): n equals a,t,g, or c
  SITE (29859): n equals a,t,g, or c
  SITE (29860): n equals a,t,g, or c
  SITE (29861): n equals a,t,g, or c
  SITE (29862): n equals a,t,g, or c
  SITE (29863): n equals a,t,g, or c
  SITE (29864): n equals a,t,g, or c
  SITE (29865): n equals a,t,g, or c
  SITE (29866): n equals a,t,g, or c
  SITE (29867): n equals a,t,g, or c
  SITE (29868): n equals a,t,g, or c
  SITE (29869): n equals a,t,g, or c
  SITE (29870): n equals a,t,g, or c
  SITE (29871): n equals a,t,g, or c
  SITE (29872): n equals a,t,g, or c
  SITE (29873): n equals a,t,g, or c
  SITE (29874): n equals a,t,g, or c
  SITE (29875): n equals a,t,g, or c
  SITE (29876): n equals a,t,g, or c
  SITE (29877): n equals a,t,g, or c
  SITE (29878): n equals a,t,g, or c
  SITE (29879): n equals a,t,g, or c
  SITE (29880): n equals a,t,g, or c
  SITE (29881): n equals a,t,g, or c
  SITE (29882): n equals a,t,g, or c
  SITE (29883): n equals a,t,g, or c
  SITE (29884): n equals a,t,g, or c
  SITE (29885): n equals a,t,g, or c
  SITE (29886): n equals a,t,g, or c
  SITE (29887): n equals a,t,g, or c
  SITE (29888): n equals a,t,g, or c
  SITE (29889): n equals a,t,g, or c
  SITE (29890): n equals a,t,g, or c
  SITE (29891): n equals a,t,g, or c
  SITE (29892): n equals a,t,g, or c
  SITE (29893): n equals a,t,g, or c
  SITE (29894): n equals a,t,g, or c
  SITE (29895): n equals a,t,g, or c
  SITE (29896): n equals a,t,g, or c
  SITE (29897): n equals a,t,g, or c
  SITE (29898): n equals a,t,g, or c
  SITE (29899): n equals a,t,g, or c
  SITE (29900): n equals a,t,g, or c
  SITE (29901): n equals a,t,g, or c
  SITE (29902): n equals a,t,g, or c
  SITE (29903): n equals a,t,g, or c
  SITE (29904): n equals a,t,g, or c
  SITE (29905): n equals a,t,g, or c
  SITE (29906): n equals a,t,g, or c
  SITE (29907): n equals a,t,g, or c
  SITE (29908): n equals a,t,g, or c
  SITE (29909): n equals a,t,g, or c
  SITE (29910): n equals a,t,g, or c
  SITE (29911): n equals a,t,g, or c
  SITE (29912): n equals a,t,g, or c
  SITE (29913): n equals a,t,g, or c
  SITE (29914): n equals a,t,g, or c
  SITE (29915): n equals a,t,g, or c
  SITE (29916): n equals a,t,g, or c
  SITE (29917): n equals a,t,g, or c
  SITE (29918): n equals a,t,g, or c
  SITE (29919): n equals a,t,g, or c
  SITE (29920): n equals a,t,g, or c
  SITE (29921): n equals a,t,g, or c
  SITE (29922): n equals a,t,g, or c
  SITE (29923): n equals a,t,g, or c
  SITE (29924): n equals a,t,g, or c
  SITE (29925): n equals a,t,g, or c
  SITE (29926): n equals a,t,g, or c
  SITE (29927): n equals a,t,g, or c
  SITE (29928): n equals a,t,g, or c
  SITE (29929): n equals a,t,g, or c
  SITE (29930): n equals a,t,g, or c
  SITE (29931): n equals a,t,g, or c
  SITE (29932): n equals a,t,g, or c
  SITE (29933): n equals a,t,g, or c
  SITE (29934): n equals a,t,g, or c
  SITE (29935): n equals a,t,g, or c
  SITE (29936): n equals a,t,g, or c
  SITE (29937): n equals a,t,g, or c
  SITE (29938): n equals a,t,g, or c
  SITE (29939): n equals a,t,g, or c
  SITE (29940): n equals a,t,g, or c
  SITE (29941): n equals a,t,g, or c
  SITE (29942): n equals a,t,g, or c
  SITE (29943): n equals a,t,g, or c
  SITE (29944): n equals a,t,g, or c
  SITE (29945): n equals a,t,g, or c
  SITE (29946): n equals a,t,g, or c
  SITE (29947): n equals a,t,g, or c
  SITE (29948): n equals a,t,g, or c
  SITE (29949): n equals a,t,g, or c
  SITE (29950): n equals a,t,g, or c
  SITE (29951): n equals a,t,g, or c
  SITE (29952): n equals a,t,g, or c
  SITE (29953): n equals a,t,g, or c
  SITE (29954): n equals a,t,g, or c
  SITE (29955): n equals a,t,g, or c
  SITE (29956): n equals a,t,g, or c
  SITE (29957): n equals a,t,g, or c
  SITE (29958): n equals a,t,g, or c
  SITE (29959): n equals a,t,g, or c
  SITE (29960): n equals a,t,g, or c
  SITE (29961): n equals a,t,g, or c
  SITE (29962): n equals a,t,g, or c
  SITE (29963): n equals a,t,g, or c
  SITE (29964): n equals a,t,g, or c
  SITE (29965): n equals a,t,g, or c
  SITE (29966): n equals a,t,g, or c
  SITE (29967): n equals a,t,g, or c
  SITE (29968): n equals a,t,g, or c
  SITE (29969): n equals a,t,g, or c
  SITE (29970): n equals a,t,g, or c
  SITE (29971): n equals a,t,g, or c
  SITE (29972): n equals a,t,g, or c
  SITE (29973): n equals a,t,g, or c
  SITE (29974): n equals a,t,g, or c
  SITE (29975): n equals a,t,g, or c
  SITE (29976): n equals a,t,g, or c
  SITE (29977): n equals a,t,g, or c
  SITE (29978): n equals a,t,g, or c
  SITE (29979): n equals a,t,g, or c
  SITE (29980): n equals a,t,g, or c
  SITE (29981): n equals a,t,g, or c
  SITE (29982): n equals a,t,g, or c
  SITE (29983): n equals a,t,g, or c
  SITE (29984): n equals a,t,g, or c
  SITE (29985): n equals a,t,g, or c
  SITE (29986): n equals a,t,g, or c
  SITE (29987): n equals a,t,g, or c
  SITE (29988): n equals a,t,g, or c
  SITE (29989): n equals a,t,g, or c
  SITE (29990): n equals a,t,g, or c
  SITE (29991): n equals a,t,g, or c
  SITE (29992): n equals a,t,g, or c
  SITE (29993): n equals a,t,g, or c
  SITE (29994): n equals a,t,g, or c
  SITE (29995): n equals a,t,g, or c
  SITE (29996): n equals a,t,g, or c
  SITE (29997): n equals a,t,g, or c
  SITE (29998): n equals a,t,g, or c
  SITE (29999): n equals a,t,g, or c
  SITE (30000): n equals a,t,g, or c
  SITE (30001): n equals a,t,g, or c
  SITE (30002): n equals a,t,g, or c
  SITE (30003): n equals a,t,g, or c
  SITE (30004): n equals a,t,g, or c
  SITE (30005): n equals a,t,g, or c
  SITE (30006): n equals a,t,g, or c
  SITE (30007): n equals a,t,g, or c
  SITE (30008): n equals a,t,g, or c
  SITE (30009): n equals a,t,g, or c
  SITE (30010): n equals a,t,g, or c
  SITE (30011): n equals a,t,g, or c
  SITE (30012): n equals a,t,g, or c
  SITE (30013): n equals a,t,g, or c
  SITE (30014): n equals a,t,g, or c
  SITE (30015): n equals a,t,g, or c
  SITE (30016): n equals a,t,g, or c
  SITE (30017): n equals a,t,g, or c
  SITE (30018): n equals a,t,g, or c
  SITE (30019): n equals a,t,g, or c
  SITE (30020): n equals a,t,g, or c
  SITE (30021): n equals a,t,g, or c
  SITE (30022): n equals a,t,g, or c
  SITE (30023): n equals a,t,g, or c
  SITE (30024): n equals a,t,g, or c
  SITE (30025): n equals a,t,g, or c
  SITE (30026): n equals a,t,g, or c
  SITE (30027): n equals a,t,g, or c
  SITE (30028): n equals a,t,g, or c
  SITE (30029): n equals a,t,g, or c
  SITE (30030): n equals a,t,g, or c
  SITE (30031): n equals a,t,g, or c
  SITE (30032): n equals a,t,g, or c
  SITE (30033): n equals a,t,g, or c
  SITE (30034): n equals a,t,g, or c
  SITE (30035): n equals a,t,g, or c
  SITE (30036): n equals a,t,g, or c
  SITE (30037): n equals a,t,g, or c
  SITE (30038): n equals a,t,g, or c
  SITE (30039): n equals a,t,g, or c
  SITE (30040): n equals a,t,g, or c
  SITE (30041): n equals a,t,g, or c
  SITE (30042): n equals a,t,g, or c
  SITE (30043): n equals a,t,g, or c
  SITE (30044): n equals a,t,g, or c
  SITE (30045): n equals a,t,g, or c
  SITE (30046): n equals a,t,g, or c
  SITE (30047): n equals a,t,g, or c
  SITE (30048): n equals a,t,g, or c
  SITE (30049): n equals a,t,g, or c
  SITE (30050): n equals a,t,g, or c
  SITE (30051): n equals a,t,g, or c
  SITE (30052): n equals a,t,g, or c
  SITE (30053): n equals a,t,g, or c
  SITE (30054): n equals a,t,g, or c
  SITE (30055): n equals a,t,g, or c
  SITE (30056): n equals a,t,g, or c
  SITE (30057): n equals a,t,g, or c
  SITE (30058): n equals a,t,g, or c
  SITE (30059): n equals a,t,g, or c
  SITE (30060): n equals a,t,g, or c
  SITE (30061): n equals a,t,g, or c
  SITE (30062): n equals a,t,g, or c
  SITE (30063): n equals a,t,g, or c
  SITE (30064): n equals a,t,g, or c
  SITE (30065): n equals a,t,g, or c
  SITE (30066): n equals a,t,g, or c
  SITE (30067): n equals a,t,g, or c
  SITE (30068): n equals a,t,g, or c
  SITE (30069): n equals a,t,g, or c
  SITE (30070): n equals a,t,g, or c
  SITE (30071): n equals a,t,g, or c
  SITE (30072): n equals a,t,g, or c
  SITE (30073): n equals a,t,g, or c
  SITE (30074): n equals a,t,g, or c
  SITE (30075): n equals a,t,g, or c
  SITE (30076): n equals a,t,g, or c
  SITE (30077): n equals a,t,g, or c
  SITE (30078): n equals a,t,g, or c
  SITE (30079): n equals a,t,g, or c
  SITE (30080): n equals a,t,g, or c
  SITE (30081): n equals a,t,g, or c
  SITE (30082): n equals a,t,g, or c
  SITE (30083): n equals a,t,g, or c
  SITE (30084): n equals a,t,g, or c
  SITE (30085): n equals a,t,g, or c
  SITE (30086): n equals a,t,g, or c
  SITE (30087): n equals a,t,g, or c
  SITE (30088): n equals a,t,g, or c
  SITE (30089): n equals a,t,g, or c
  SITE (30090): n equals a,t,g, or c
  SITE (30091): n equals a,t,g, or c
  SITE (30092): n equals a,t,g, or c
  SITE (30093): n equals a,t,g, or c
  SITE (30094): n equals a,t,g, or c
  SITE (30095): n equals a,t,g, or c
  SITE (30096): n equals a,t,g, or c
  SITE (30097): n equals a,t,g, or c
  SITE (30098): n equals a,t,g, or c
  SITE (30099): n equals a,t,g, or c
  SITE (30100): n equals a,t,g, or c
  SITE (30101): n equals a,t,g, or c
  SITE (30102): n equals a,t,g, or c
  SITE (30103): n equals a,t,g, or c
  SITE (30104): n equals a,t,g, or c
  SITE (30105): n equals a,t,g, or c
  SITE (30106): n equals a,t,g, or c
  SITE (30107): n equals a,t,g, or c
  SITE (30108): n equals a,t,g, or c
  SITE (30109): n equals a,t,g, or c
  SITE (30110): n equals a,t,g, or c
  SITE (30111): n equals a,t,g, or c
  SITE (30112): n equals a,t,g, or c
  SITE (30113): n equals a,t,g, or c
  SITE (30114): n equals a,t,g, or c
  SITE (30115): n equals a,t,g, or c
  SITE (30116): n equals a,t,g, or c
  SITE (30117): n equals a,t,g, or c
  SITE (30118): n equals a,t,g, or c
  SITE (30119): n equals a,t,g, or c
  SITE (30120): n equals a,t,g, or c
  SITE (30121): n equals a,t,g, or c
  SITE (30122): n equals a,t,g, or c
  SITE (30123): n equals a,t,g, or c
  SITE (30124): n equals a,t,g, or c
  SITE (30125): n equals a,t,g, or c
  SITE (30126): n equals a,t,g, or c
  SITE (30127): n equals a,t,g, or c
  SITE (30128): n equals a,t,g, or c
  SITE (30129): n equals a,t,g, or c
  SITE (30130): n equals a,t,g, or c
  SITE (30131): n equals a,t,g, or c
  SITE (30132): n equals a,t,g, or c
  SITE (30133): n equals a,t,g, or c
  SITE (30134): n equals a,t,g, or c
  SITE (30135): n equals a,t,g, or c
  SITE (30136): n equals a,t,g, or c
  SITE (30137): n equals a,t,g, or c
  SITE (30138): n equals a,t,g, or c
  SITE (30139): n equals a,t,g, or c
  SITE (30140): n equals a,t,g, or c
  SITE (30141): n equals a,t,g, or c
  SITE (30142): n equals a,t,g, or c
  SITE (30143): n equals a,t,g, or c
  SITE (30144): n equals a,t,g, or c
  SITE (30145): n equals a,t,g, or c
  SITE (30146): n equals a,t,g, or c
  SITE (30147): n equals a,t,g, or c
  SITE (30148): n equals a,t,g, or c
  SITE (30149): n equals a,t,g, or c
  SITE (30150): n equals a,t,g, or c
  SITE (30151): n equals a,t,g, or c
  SITE (30152): n equals a,t,g, or c
  SITE (30153): n equals a,t,g, or c
  SITE (30154): n equals a,t,g, or c
  SITE (30155): n equals a,t,g, or c
  SITE (30156): n equals a,t,g, or c
  SITE (30157): n equals a,t,g, or c
  SITE (30158): n equals a,t,g, or c
  SITE (30159): n equals a,t,g, or c
  SITE (30160): n equals a,t,g, or c
  SITE (30161): n equals a,t,g, or c
  SITE (30162): n equals a,t,g, or c
  SITE (30163): n equals a,t,g, or c
  SITE (30164): n equals a,t,g, or c
  SITE (30165): n equals a,t,g, or c
  SITE (30166): n equals a,t,g, or c
  SITE (30167): n equals a,t,g, or c
  SITE (30168): n equals a,t,g, or c
  SITE (30169): n equals a,t,g, or c
  SITE (30170): n equals a,t,g, or c
  SITE (30171): n equals a,t,g, or c
  SITE (30172): n equals a,t,g, or c
  SITE (30173): n equals a,t,g, or c
  SITE (30174): n equals a,t,g, or c
  SITE (30175): n equals a,t,g, or c
  SITE (30176): n equals a,t,g, or c
  SITE (30177): n equals a,t,g, or c
  SITE (30178): n equals a,t,g, or c
  SITE (30179): n equals a,t,g, or c
  SITE (30180): n equals a,t,g, or c
  SITE (30181): n equals a,t,g, or c
  SITE (30182): n equals a,t,g, or c
  SITE (30183): n equals a,t,g, or c
  SITE (30184): n equals a,t,g, or c
  SITE (30185): n equals a,t,g, or c
  SITE (30186): n equals a,t,g, or c
  SITE (30187): n equals a,t,g, or c
  SITE (30188): n equals a,t,g, or c
  SITE (30189): n equals a,t,g, or c
  SITE (30190): n equals a,t,g, or c
  SITE (30191): n equals a,t,g, or c
  SITE (30192): n equals a,t,g, or c
  SITE (30193): n equals a,t,g, or c
  SITE (30194): n equals a,t,g, or c
  SITE (30195): n equals a,t,g, or c
  SITE (30196): n equals a,t,g, or c
  SITE (30197): n equals a,t,g, or c
  SITE (30198): n equals a,t,g, or c
  SITE (30199): n equals a,t,g, or c
  SITE (30200): n equals a,t,g, or c
  SITE (30201): n equals a,t,g, or c
  SITE (30202): n equals a,t,g, or c
  SITE (30203): n equals a,t,g, or c
  SITE (30204): n equals a,t,g, or c
  SITE (30205): n equals a,t,g, or c
  SITE (30206): n equals a,t,g, or c
  SITE (30207): n equals a,t,g, or c
  SITE (30208): n equals a,t,g, or c
  SITE (30209): n equals a,t,g, or c
  SITE (30210): n equals a,t,g, or c
  SITE (30211): n equals a,t,g, or c
  SITE (30212): n equals a,t,g, or c
  SITE (30213): n equals a,t,g, or c
  SITE (30214): n equals a,t,g, or c
  SITE (30215): n equals a,t,g, or c
  SITE (30216): n equals a,t,g, or c
  SITE (30217): n equals a,t,g, or c
  SITE (30218): n equals a,t,g, or c
  SITE (30219): n equals a,t,g, or c
  SITE (30220): n equals a,t,g, or c
  SITE (30221): n equals a,t,g, or c
  SITE (30222): n equals a,t,g, or c
  SITE (30223): n equals a,t,g, or c
  SITE (30224): n equals a,t,g, or c
  SITE (30225): n equals a,t,g, or c
  SITE (30226): n equals a,t,g, or c
  SITE (30227): n equals a,t,g, or c
  SITE (30228): n equals a,t,g, or c
  SITE (30229): n equals a,t,g, or c
  SITE (30230): n equals a,t,g, or c
  SITE (30231): n equals a,t,g, or c
  SITE (30232): n equals a,t,g, or c
  SITE (30233): n equals a,t,g, or c
  SITE (30234): n equals a,t,g, or c
  SITE (30235): n equals a,t,g, or c
  SITE (30236): n equals a,t,g, or c
  SITE (30237): n equals a,t,g, or c
  SITE (30238): n equals a,t,g, or c
  SITE (30239): n equals a,t,g, or c
  SITE (30240): n equals a,t,g, or c
  SITE (30241): n equals a,t,g, or c
  SITE (30242): n equals a,t,g, or c
  SITE (30243): n equals a,t,g, or c
  SITE (30244): n equals a,t,g, or c
  SITE (30245): n equals a,t,g, or c
  SITE (30246): n equals a,t,g, or c
  SITE (30247): n equals a,t,g, or c
  SITE (30248): n equals a,t,g, or c
  SITE (30249): n equals a,t,g, or c
  SITE (30250): n equals a,t,g, or c
  SITE (30251): n equals a,t,g, or c
  SITE (30252): n equals a,t,g, or c
  SITE (30253): n equals a,t,g, or c
  SITE (30254): n equals a,t,g, or c
  SITE (30255): n equals a,t,g, or c
  SITE (30256): n equals a,t,g, or c
  SITE (30257): n equals a,t,g, or c
  SITE (30258): n equals a,t,g, or c
  SITE (30259): n equals a,t,g, or c
  SITE (30260): n equals a,t,g, or c
  SITE (30261): n equals a,t,g, or c
  SITE (30262): n equals a,t,g, or c
  SITE (30263): n equals a,t,g, or c
  SITE (30264): n equals a,t,g, or c
  SITE (30265): n equals a,t,g, or c
  SITE (30266): n equals a,t,g, or c
  SITE (30267): n equals a,t,g, or c
  SITE (30268): n equals a,t,g, or c
  SITE (30269): n equals a,t,g, or c
  SITE (30270): n equals a,t,g, or c
  SITE (30271): n equals a,t,g, or c
  SITE (30272): n equals a,t,g, or c
  SITE (30273): n equals a,t,g, or c
  SITE (30274): n equals a,t,g, or c
  SITE (30275): n equals a,t,g, or c
  SITE (30276): n equals a,t,g, or c
  SITE (30277): n equals a,t,g, or c
  SITE (30278): n equals a,t,g, or c
  SITE (30279): n equals a,t,g, or c
  SITE (30280): n equals a,t,g, or c
  SITE (30281): n equals a,t,g, or c
  SITE (30282): n equals a,t,g, or c
  SITE (30283): n equals a,t,g, or c
  SITE (30284): n equals a,t,g, or c
  SITE (30285): n equals a,t,g, or c
  SITE (30286): n equals a,t,g, or c
  SITE (30287): n equals a,t,g, or c
  SITE (30288): n equals a,t,g, or c
  SITE (30289): n equals a,t,g, or c
  SITE (30290): n equals a,t,g, or c
  SITE (30291): n equals a,t,g, or c
  SITE (30292): n equals a,t,g, or c
  SITE (30293): n equals a,t,g, or c
  SITE (30294): n equals a,t,g, or c
  SITE (30295): n equals a,t,g, or c
  SITE (30296): n equals a,t,g, or c
  SITE (30297): n equals a,t,g, or c
  SITE (30298): n equals a,t,g, or c
  SITE (30299): n equals a,t,g, or c
  SITE (30300): n equals a,t,g, or c
  SITE (30301): n equals a,t,g, or c
  SITE (30302): n equals a,t,g, or c
  SITE (30303): n equals a,t,g, or c
  SITE (30304): n equals a,t,g, or c
  SITE (30305): n equals a,t,g, or c
  SITE (30306): n equals a,t,g, or c
  SITE (30307): n equals a,t,g, or c
  SITE (30308): n equals a,t,g, or c
  SITE (30309): n equals a,t,g, or c
  SITE (30310): n equals a,t,g, or c
  SITE (30311): n equals a,t,g, or c
  SITE (30312): n equals a,t,g, or c
  SITE (30313): n equals a,t,g, or c
  SITE (30314): n equals a,t,g, or c
  SITE (30315): n equals a,t,g, or c
  SITE (30316): n equals a,t,g, or c
  SITE (30317): n equals a,t,g, or c
  SITE (30318): n equals a,t,g, or c
  SITE (30319): n equals a,t,g, or c
  SITE (30320): n equals a,t,g, or c
  SITE (30321): n equals a,t,g, or c
  SITE (30322): n equals a,t,g, or c
  SITE (30323): n equals a,t,g, or c
  SITE (30324): n equals a,t,g, or c
  SITE (30325): n equals a,t,g, or c
  SITE (30326): n equals a,t,g, or c
  SITE (30327): n equals a,t,g, or c
  SITE (30328): n equals a,t,g, or c
  SITE (30329): n equals a,t,g, or c
  SITE (30330): n equals a,t,g, or c
  SITE (30331): n equals a,t,g, or c
  SITE (30332): n equals a,t,g, or c
  SITE (30333): n equals a,t,g, or c
  SITE (30334): n equals a,t,g, or c
  SITE (30335): n equals a,t,g, or c
  SITE (30336): n equals a,t,g, or c
  SITE (30337): n equals a,t,g, or c
  SITE (30338): n equals a,t,g, or c
  SITE (30339): n equals a,t,g, or c
  SITE (30340): n equals a,t,g, or c
  SITE (30341): n equals a,t,g, or c
  SITE (30342): n equals a,t,g, or c
  SITE (30343): n equals a,t,g, or c
  SITE (30344): n equals a,t,g, or c
  SITE (30345): n equals a,t,g, or c
  SITE (30346): n equals a,t,g, or c
  SITE (30347): n equals a,t,g, or c
  SITE (30348): n equals a,t,g, or c
  SITE (30349): n equals a,t,g, or c
  SITE (30350): n equals a,t,g, or c
  SITE (30351): n equals a,t,g, or c
  SITE (30352): n equals a,t,g, or c
  SITE (30353): n equals a,t,g, or c
  SITE (30354): n equals a,t,g, or c
  SITE (30355): n equals a,t,g, or c
  SITE (30356): n equals a,t,g, or c
  SITE (30357): n equals a,t,g, or c
  SITE (30358): n equals a,t,g, or c
  SITE (30359): n equals a,t,g, or c
  SITE (30360): n equals a,t,g, or c
  SITE (30361): n equals a,t,g, or c
  SITE (30362): n equals a,t,g, or c
  SITE (30363): n equals a,t,g, or c
  SITE (30364): n equals a,t,g, or c
  SITE (30365): n equals a,t,g, or c
  SITE (30366): n equals a,t,g, or c
  SITE (30367): n equals a,t,g, or c
  SITE (30368): n equals a,t,g, or c
  SITE (30369): n equals a,t,g, or c
  SITE (30370): n equals a,t,g, or c
  SITE (30371): n equals a,t,g, or c
  SITE (30372): n equals a,t,g, or c
  SITE (30373): n equals a,t,g, or c
  SITE (30374): n equals a,t,g, or c
  SITE (30375): n equals a,t,g, or c
  SITE (30376): n equals a,t,g, or c
  SITE (30377): n equals a,t,g, or c
  SITE (30378): n equals a,t,g, or c
  SITE (30379): n equals a,t,g, or c
  SITE (30380): n equals a,t,g, or c
  SITE (30381): n equals a,t,g, or c
  SITE (30382): n equals a,t,g, or c
  SITE (30383): n equals a,t,g, or c
  SITE (30384): n equals a,t,g, or c
  SITE (30385): n equals a,t,g, or c
  SITE (30386): n equals a,t,g, or c
  SITE (30387): n equals a,t,g, or c
  SITE (30388): n equals a,t,g, or c
  SITE (30389): n equals a,t,g, or c
  SITE (30390): n equals a,t,g, or c
  SITE (30391): n equals a,t,g, or c
  SITE (30392): n equals a,t,g, or c
  SITE (30393): n equals a,t,g, or c
  SITE (30394): n equals a,t,g, or c
  SITE (30395): n equals a,t,g, or c
  SITE (30396): n equals a,t,g, or c
  SITE (30397): n equals a,t,g, or c
  SITE (30398): n equals a,t,g, or c
  SITE (30399): n equals a,t,g, or c
  SITE (30400): n equals a,t,g, or c
  SITE (30401): n equals a,t,g, or c
  SITE (30402): n equals a,t,g, or c
  SITE (30403): n equals a,t,g, or c
  SITE (30404): n equals a,t,g, or c
  SITE (30405): n equals a,t,g, or c
  SITE (30406): n equals a,t,g, or c
  SITE (30407): n equals a,t,g, or c
  SITE (30408): n equals a,t,g, or c
  SITE (30409): n equals a,t,g, or c
  SITE (30410): n equals a,t,g, or c
  SITE (30411): n equals a,t,g, or c
  SITE (30412): n equals a,t,g, or c
  SITE (30413): n equals a,t,g, or c
  SITE (30414): n equals a,t,g, or c
  SITE (30415): n equals a,t,g, or c
  SITE (30416): n equals a,t,g, or c
  SITE (30417): n equals a,t,g, or c
  SITE (30418): n equals a,t,g, or c
  SITE (30419): n equals a,t,g, or c
  SITE (30420): n equals a,t,g, or c
  SITE (30421): n equals a,t,g, or c
  SITE (30422): n equals a,t,g, or c
  SITE (30423): n equals a,t,g, or c
  SITE (30424): n equals a,t,g, or c
  SITE (30425): n equals a,t,g, or c
  SITE (30426): n equals a,t,g, or c
  SITE (30427): n equals a,t,g, or c
  SITE (30428): n equals a,t,g, or c
  SITE (30429): n equals a,t,g, or c
  SITE (30430): n equals a,t,g, or c
  SITE (30431): n equals a,t,g, or c
  SITE (30432): n equals a,t,g, or c
  SITE (30433): n equals a,t,g, or c
  SITE (30434): n equals a,t,g, or c
  SITE (30435): n equals a,t,g, or c
  SITE (30436): n equals a,t,g, or c
  SITE (30437): n equals a,t,g, or c
  SITE (30438): n equals a,t,g, or c
  SITE (30439): n equals a,t,g, or c
  SITE (30440): n equals a,t,g, or c
  SITE (30441): n equals a,t,g, or c
  SITE (30442): n equals a,t,g, or c
  SITE (30443): n equals a,t,g, or c
  SITE (30444): n equals a,t,g, or c
  SITE (30445): n equals a,t,g, or c
  SITE (30446): n equals a,t,g, or c
  SITE (30447): n equals a,t,g, or c
  SITE (30448): n equals a,t,g, or c
  SITE (30449): n equals a,t,g, or c
  SITE (30450): n equals a,t,g, or c
  SITE (30451): n equals a,t,g, or c
  SITE (30452): n equals a,t,g, or c
  SITE (30453): n equals a,t,g, or c
  SITE (30454): n equals a,t,g, or c
  SITE (30455): n equals a,t,g, or c
  SITE (30456): n equals a,t,g, or c
  SITE (30457): n equals a,t,g, or c
  SITE (30458): n equals a,t,g, or c
  SITE (30459): n equals a,t,g, or c
  SITE (30460): n equals a,t,g, or c
  SITE (30461): n equals a,t,g, or c
  SITE (30462): n equals a,t,g, or c
  SITE (30463): n equals a,t,g, or c
  SITE (30464): n equals a,t,g, or c
  SITE (30465): n equals a,t,g, or c
  SITE (30466): n equals a,t,g, or c
  SITE (30467): n equals a,t,g, or c
  SITE (30468): n equals a,t,g, or c
  SITE (30469): n equals a,t,g, or c
  SITE (30470): n equals a,t,g, or c
  SITE (30471): n equals a,t,g, or c
  SITE (30472): n equals a,t,g, or c
  SITE (30473): n equals a,t,g, or c
  SITE (30474): n equals a,t,g, or c
  SITE (30475): n equals a,t,g, or c
  SITE (30476): n equals a,t,g, or c
  SITE (30477): n equals a,t,g, or c
  SITE (30478): n equals a,t,g, or c
  SITE (30479): n equals a,t,g, or c
  SITE (30480): n equals a,t,g, or c
  SITE (30481): n equals a,t,g, or c
  SITE (30482): n equals a,t,g, or c
  SITE (30483): n equals a,t,g, or c
  SITE (30484): n equals a,t,g, or c
  SITE (30485): n equals a,t,g, or c
  SITE (30486): n equals a,t,g, or c
  SITE (30487): n equals a,t,g, or c
  SITE (30488): n equals a,t,g, or c
  SITE (30489): n equals a,t,g, or c
  SITE (30490): n equals a,t,g, or c
  SITE (30491): n equals a,t,g, or c
  SITE (30492): n equals a,t,g, or c
  SITE (30493): n equals a,t,g, or c
  SITE (30494): n equals a,t,g, or c
  SITE (30495): n equals a,t,g, or c
  SITE (30496): n equals a,t,g, or c
  SITE (30497): n equals a,t,g, or c
  SITE (30498): n equals a,t,g, or c
  SITE (30499): n equals a,t,g, or c
  SITE (30500): n equals a,t,g, or c
  SITE (30501): n equals a,t,g, or c
  SITE (30502): n equals a,t,g, or c
  SITE (30503): n equals a,t,g, or c
  SITE (30504): n equals a,t,g, or c
  SITE (30505): n equals a,t,g, or c
  SITE (30506): n equals a,t,g, or c
  SITE (30507): n equals a,t,g, or c
  SITE (30508): n equals a,t,g, or c
  SITE (30509): n equals a,t,g, or c
  SITE (30510): n equals a,t,g, or c
  SITE (30511): n equals a,t,g, or c
  SITE (30512): n equals a,t,g, or c
  SITE (30513): n equals a,t,g, or c
  SITE (30514): n equals a,t,g, or c
  SITE (30515): n equals a,t,g, or c
  SITE (30516): n equals a,t,g, or c
  SITE (30517): n equals a,t,g, or c
  SITE (30518): n equals a,t,g, or c
  SITE (30519): n equals a,t,g, or c
  SITE (30520): n equals a,t,g, or c
  SITE (30521): n equals a,t,g, or c
  SITE (30522): n equals a,t,g, or c
  SITE (30523): n equals a,t,g, or c
  SITE (30524): n equals a,t,g, or c
  SITE (30525): n equals a,t,g, or c
  SITE (30526): n equals a,t,g, or c
  SITE (30527): n equals a,t,g, or c
  SITE (30528): n equals a,t,g, or c
  SITE (30529): n equals a,t,g, or c
  SITE (30530): n equals a,t,g, or c
  SITE (30531): n equals a,t,g, or c
  SITE (30532): n equals a,t,g, or c
  SITE (30533): n equals a,t,g, or c
  SITE (30534): n equals a,t,g, or c
  SITE (30535): n equals a,t,g, or c
  SITE (30536): n equals a,t,g, or c
  SITE (30537): n equals a,t,g, or c
  SITE (30538): n equals a,t,g, or c
  SITE (30539): n equals a,t,g, or c
  SITE (30540): n equals a,t,g, or c
  SITE (30541): n equals a,t,g, or c
  SITE (30542): n equals a,t,g, or c
  SITE (30543): n equals a,t,g, or c
  SITE (30544): n equals a,t,g, or c
  SITE (30545): n equals a,t,g, or c
  SITE (30546): n equals a,t,g, or c
  SITE (30547): n equals a,t,g, or c
  SITE (30548): n equals a,t,g, or c
  SITE (30549): n equals a,t,g, or c
  SITE (30550): n equals a,t,g, or c
  SITE (30551): n equals a,t,g, or c
  SITE (30552): n equals a,t,g, or c
  SITE (30553): n equals a,t,g, or c
  SITE (30554): n equals a,t,g, or c
  SITE (30555): n equals a,t,g, or c
  SITE (30556): n equals a,t,g, or c
  SITE (30557): n equals a,t,g, or c
  SITE (30558): n equals a,t,g, or c
  SITE (30559): n equals a,t,g, or c
  SITE (30560): n equals a,t,g, or c
  SITE (30561): n equals a,t,g, or c
  SITE (30562): n equals a,t,g, or c
  SITE (30563): n equals a,t,g, or c
  SITE (30564): n equals a,t,g, or c
  SITE (30565): n equals a,t,g, or c
  SITE (30566): n equals a,t,g, or c
  SITE (30567): n equals a,t,g, or c
  SITE (30568): n equals a,t,g, or c
  SITE (30569): n equals a,t,g, or c
  SITE (30570): n equals a,t,g, or c
  SITE (30571): n equals a,t,g, or c
  SITE (30572): n equals a,t,g, or c
  SITE (30573): n equals a,t,g, or c
  SITE (30574): n equals a,t,g, or c
  SITE (30575): n equals a,t,g, or c
  SITE (30576): n equals a,t,g, or c
  SITE (30577): n equals a,t,g, or c
  SITE (30578): n equals a,t,g, or c
  SITE (30579): n equals a,t,g, or c
  SITE (30580): n equals a,t,g, or c
  SITE (30581): n equals a,t,g, or c
  SITE (30582): n equals a,t,g, or c
  SITE (30583): n equals a,t,g, or c
  SITE (30584): n equals a,t,g, or c
  SITE (30585): n equals a,t,g, or c
  SITE (30586): n equals a,t,g, or c
  SITE (30587): n equals a,t,g, or c
  SITE (30588): n equals a,t,g, or c
  SITE (30589): n equals a,t,g, or c
  SITE (30590): n equals a,t,g, or c
  SITE (30591): n equals a,t,g, or c
  SITE (30592): n equals a,t,g, or c
  SITE (30593): n equals a,t,g, or c
  SITE (30594): n equals a,t,g, or c
  SITE (30595): n equals a,t,g, or c
  SITE (30596): n equals a,t,g, or c
  SITE (30597): n equals a,t,g, or c
  SITE (30598): n equals a,t,g, or c
  SITE (30599): n equals a,t,g, or c
  SITE (30600): n equals a,t,g, or c
  SITE (30601): n equals a,t,g, or c
  SITE (30602): n equals a,t,g, or c
  SITE (30603): n equals a,t,g, or c
  SITE (30604): n equals a,t,g, or c
  SITE (30605): n equals a,t,g, or c
  SITE (30606): n equals a,t,g, or c
  SITE (30607): n equals a,t,g, or c
  SITE (30608): n equals a,t,g, or c
  SITE (30609): n equals a,t,g, or c
  SITE (30610): n equals a,t,g, or c
  SITE (30611): n equals a,t,g, or c
  SITE (30612): n equals a,t,g, or c
  SITE (30613): n equals a,t,g, or c
  SITE (30614): n equals a,t,g, or c
  SITE (30615): n equals a,t,g, or c
  SITE (30616): n equals a,t,g, or c
  SITE (30617): n equals a,t,g, or c
  SITE (30618): n equals a,t,g, or c
  SITE (30619): n equals a,t,g, or c
  SITE (30620): n equals a,t,g, or c
  SITE (30621): n equals a,t,g, or c
  SITE (30622): n equals a,t,g, or c
  SITE (30623): n equals a,t,g, or c
  SITE (30624): n equals a,t,g, or c
  SITE (30625): n equals a,t,g, or c
  SITE (30626): n equals a,t,g, or c
  SITE (30627): n equals a,t,g, or c
  SITE (30628): n equals a,t,g, or c
  SITE (30629): n equals a,t,g, or c
  SITE (30630): n equals a,t,g, or c
  SITE (30631): n equals a,t,g, or c
  SITE (30632): n equals a,t,g, or c
  SITE (30633): n equals a,t,g, or c
  SITE (30634): n equals a,t,g, or c
  SITE (30635): n equals a,t,g, or c
  SITE (30636): n equals a,t,g, or c
  SITE (30637): n equals a,t,g, or c
  SITE (30638): n equals a,t,g, or c
  SITE (30639): n equals a,t,g, or c
  SITE (30640): n equals a,t,g, or c
  SITE (30641): n equals a,t,g, or c
  SITE (30642): n equals a,t,g, or c
  SITE (30643): n equals a,t,g, or c
  SITE (30644): n equals a,t,g, or c
  SITE (30645): n equals a,t,g, or c
  SITE (30646): n equals a,t,g, or c
  SITE (30647): n equals a,t,g, or c
  SITE (30648): n equals a,t,g, or c
  SITE (30649): n equals a,t,g, or c
  SITE (30650): n equals a,t,g, or c
  SITE (30651): n equals a,t,g, or c
  SITE (30652): n equals a,t,g, or c
  SITE (30653): n equals a,t,g, or c
  SITE (30654): n equals a,t,g, or c
  SITE (30655): n equals a,t,g, or c
  SITE (30656): n equals a,t,g, or c
  SITE (30657): n equals a,t,g, or c
  SITE (30658): n equals a,t,g, or c
  SITE (30659): n equals a,t,g, or c
  SITE (30660): n equals a,t,g, or c
  SITE (30661): n equals a,t,g, or c
  SITE (30662): n equals a,t,g, or c
  SITE (30663): n equals a,t,g, or c
  SITE (30664): n equals a,t,g, or c
  SITE (30665): n equals a,t,g, or c
  SITE (30666): n equals a,t,g, or c
  SITE (30667): n equals a,t,g, or c
  SITE (30668): n equals a,t,g, or c
  SITE (30669): n equals a,t,g, or c
  SITE (30670): n equals a,t,g, or c
  SITE (30671): n equals a,t,g, or c
  SITE (30672): n equals a,t,g, or c
  SITE (30673): n equals a,t,g, or c
  SITE (30674): n equals a,t,g, or c
  SITE (30675): n equals a,t,g, or c
  SITE (30676): n equals a,t,g, or c
  SITE (30677): n equals a,t,g, or c
  SITE (30678): n equals a,t,g, or c
  SITE (30679): n equals a,t,g, or c
  SITE (30680): n equals a,t,g, or c
  SITE (30681): n equals a,t,g, or c
  SITE (30682): n equals a,t,g, or c
  SITE (30683): n equals a,t,g, or c
  SITE (30684): n equals a,t,g, or c
  SITE (30685): n equals a,t,g, or c
  SITE (30686): n equals a,t,g, or c
  SITE (30687): n equals a,t,g, or c
  SITE (30688): n equals a,t,g, or c
  SITE (30689): n equals a,t,g, or c
  SITE (30690): n equals a,t,g, or c
  SITE (30691): n equals a,t,g, or c
  SITE (30692): n equals a,t,g, or c
  SITE (30693): n equals a,t,g, or c
  SITE (30694): n equals a,t,g, or c
  SITE (30695): n equals a,t,g, or c
  SITE (30696): n equals a,t,g, or c
  SITE (30697): n equals a,t,g, or c
  SITE (30698): n equals a,t,g, or c
  SITE (30699): n equals a,t,g, or c
  SITE (30700): n equals a,t,g, or c
  SITE (30701): n equals a,t,g, or c
  SITE (30702): n equals a,t,g, or c
  SITE (30703): n equals a,t,g, or c
  SITE (30704): n equals a,t,g, or c
  SITE (30705): n equals a,t,g, or c
  SITE (30706): n equals a,t,g, or c
  SITE (30707): n equals a,t,g, or c
  SITE (30708): n equals a,t,g, or c
  SITE (30709): n equals a,t,g, or c
  SITE (30710): n equals a,t,g, or c
  SITE (30711): n equals a,t,g, or c
  SITE (30712): n equals a,t,g, or c
  SITE (30713): n equals a,t,g, or c
  SITE (30714): n equals a,t,g, or c
  SITE (30715): n equals a,t,g, or c
  SITE (30716): n equals a,t,g, or c
  SITE (30717): n equals a,t,g, or c
  SITE (30718): n equals a,t,g, or c
  SITE (30719): n equals a,t,g, or c
  SITE (30720): n equals a,t,g, or c
  SITE (30721): n equals a,t,g, or c
  SITE (30722): n equals a,t,g, or c
  SITE (30723): n equals a,t,g, or c
  SITE (30724): n equals a,t,g, or c
  SITE (30725): n equals a,t,g, or c
  SITE (30726): n equals a,t,g, or c
  SITE (30727): n equals a,t,g, or c
  SITE (30728): n equals a,t,g, or c
  SITE (30729): n equals a,t,g, or c
  SITE (30730): n equals a,t,g, or c
  SITE (30731): n equals a,t,g, or c
  SITE (30732): n equals a,t,g, or c
  SITE (30733): n equals a,t,g, or c
  SITE (30734): n equals a,t,g, or c
  SITE (30735): n equals a,t,g, or c
  SITE (30736): n equals a,t,g, or c
  SITE (30737): n equals a,t,g, or c
  SITE (30738): n equals a,t,g, or c
  SITE (30739): n equals a,t,g, or c
  SITE (30740): n equals a,t,g, or c
  SITE (30741): n equals a,t,g, or c
  SITE (30742): n equals a,t,g, or c
  SITE (30743): n equals a,t,g, or c
  SITE (30744): n equals a,t,g, or c
  SITE (30745): n equals a,t,g, or c
  SITE (30746): n equals a,t,g, or c
  SITE (30747): n equals a,t,g, or c
  SITE (30748): n equals a,t,g, or c
  SITE (30749): n equals a,t,g, or c
  SITE (30750): n equals a,t,g, or c
  SITE (30751): n equals a,t,g, or c
  SITE (30752): n equals a,t,g, or c
  SITE (30753): n equals a,t,g, or c
  SITE (30754): n equals a,t,g, or c
  SITE (30755): n equals a,t,g, or c
  SITE (30756): n equals a,t,g, or c
  SITE (30757): n equals a,t,g, or c
  SITE (30758): n equals a,t,g, or c
  SITE (30759): n equals a,t,g, or c
  SITE (30760): n equals a,t,g, or c
  SITE (30761): n equals a,t,g, or c
  SITE (30762): n equals a,t,g, or c
  SITE (30763): n equals a,t,g, or c
  SITE (30764): n equals a,t,g, or c
  SITE (30765): n equals a,t,g, or c
  SITE (30766): n equals a,t,g, or c
  SITE (30767): n equals a,t,g, or c
  SITE (30768): n equals a,t,g, or c
  SITE (30769): n equals a,t,g, or c
  SITE (30770): n equals a,t,g, or c
  SITE (30771): n equals a,t,g, or c
  SITE (30772): n equals a,t,g, or c
  SITE (30773): n equals a,t,g, or c
  SITE (30774): n equals a,t,g, or c
  SITE (30775): n equals a,t,g, or c
  SITE (30776): n equals a,t,g, or c
  SITE (30777): n equals a,t,g, or c
  SITE (30778): n equals a,t,g, or c
  SITE (30779): n equals a,t,g, or c
  SITE (30780): n equals a,t,g, or c
  SITE (30781): n equals a,t,g, or c
  SITE (30782): n equals a,t,g, or c
  SITE (30783): n equals a,t,g, or c
  SITE (30784): n equals a,t,g, or c
  SITE (30785): n equals a,t,g, or c
  SITE (30786): n equals a,t,g, or c
  SITE (30787): n equals a,t,g, or c
  SITE (30788): n equals a,t,g, or c
  SITE (30789): n equals a,t,g, or c
  SITE (30790): n equals a,t,g, or c
  SITE (30791): n equals a,t,g, or c
  SITE (30792): n equals a,t,g, or c
  SITE (30793): n equals a,t,g, or c
  SITE (30794): n equals a,t,g, or c
  SITE (30795): n equals a,t,g, or c
  SITE (30796): n equals a,t,g, or c
  SITE (30797): n equals a,t,g, or c
  SITE (30798): n equals a,t,g, or c
  SITE (30799): n equals a,t,g, or c
  SITE (30800): n equals a,t,g, or c
  SITE (30801): n equals a,t,g, or c
  SITE (30802): n equals a,t,g, or c
  SITE (30803): n equals a,t,g, or c
  SITE (30804): n equals a,t,g, or c
  SITE (30805): n equals a,t,g, or c
  SITE (30806): n equals a,t,g, or c
  SITE (30807): n equals a,t,g, or c
  SITE (30808): n equals a,t,g, or c
  SITE (30809): n equals a,t,g, or c
  SITE (30810): n equals a,t,g, or c
  SITE (30811): n equals a,t,g, or c
  SITE (30812): n equals a,t,g, or c
  SITE (30813): n equals a,t,g, or c
  SITE (30814): n equals a,t,g, or c
  SITE (30815): n equals a,t,g, or c
  SITE (30816): n equals a,t,g, or c
  SITE (30817): n equals a,t,g, or c
  SITE (30818): n equals a,t,g, or c
  SITE (30819): n equals a,t,g, or c
  SITE (30820): n equals a,t,g, or c
  SITE (30821): n equals a,t,g, or c
  SITE (30822): n equals a,t,g, or c
  SITE (30823): n equals a,t,g, or c
  SITE (30824): n equals a,t,g, or c
  SITE (30825): n equals a,t,g, or c
  SITE (30826): n equals a,t,g, or c
  SITE (30827): n equals a,t,g, or c
  SITE (30828): n equals a,t,g, or c
  SITE (30829): n equals a,t,g, or c
  SITE (30830): n equals a,t,g, or c
  SITE (30831): n equals a,t,g, or c
  SITE (30832): n equals a,t,g, or c
  SITE (30833): n equals a,t,g, or c
  SITE (30834): n equals a,t,g, or c
  SITE (30835): n equals a,t,g, or c
  SITE (30836): n equals a,t,g, or c
  SITE (30837): n equals a,t,g, or c
  SITE (30838): n equals a,t,g, or c
  SITE (30839): n equals a,t,g, or c
  SITE (30840): n equals a,t,g, or c
  SITE (30841): n equals a,t,g, or c
  SITE (30842): n equals a,t,g, or c
  SITE (30843): n equals a,t,g, or c
  SITE (30844): n equals a,t,g, or c
  SITE (30845): n equals a,t,g, or c
  SITE (30846): n equals a,t,g, or c
  SITE (30847): n equals a,t,g, or c
  SITE (30848): n equals a,t,g, or c
  SITE (30849): n equals a,t,g, or c
  SITE (30850): n equals a,t,g, or c
  SITE (30851): n equals a,t,g, or c
  SITE (30852): n equals a,t,g, or c
  SITE (30853): n equals a,t,g, or c
  SITE (30854): n equals a,t,g, or c
  SITE (30855): n equals a,t,g, or c
  SITE (30856): n equals a,t,g, or c
  SITE (30857): n equals a,t,g, or c
  SITE (30858): n equals a,t,g, or c
  SITE (30859): n equals a,t,g, or c
  SITE (30860): n equals a,t,g, or c
  SITE (30861): n equals a,t,g, or c
  SITE (30862): n equals a,t,g, or c
  SITE (30863): n equals a,t,g, or c
  SITE (30864): n equals a,t,g, or c
  SITE (30865): n equals a,t,g, or c
  SITE (30866): n equals a,t,g, or c
  SITE (30867): n equals a,t,g, or c
  SITE (30868): n equals a,t,g, or c
  SITE (30869): n equals a,t,g, or c
  SITE (30870): n equals a,t,g, or c
  SITE (30871): n equals a,t,g, or c
  SITE (30872): n equals a,t,g, or c
  SITE (30873): n equals a,t,g, or c
  SITE (30874): n equals a,t,g, or c
  SITE (30875): n equals a,t,g, or c
  SITE (30876): n equals a,t,g, or c
  SITE (30877): n equals a,t,g, or c
  SITE (30878): n equals a,t,g, or c
  SITE (30879): n equals a,t,g, or c
  SITE (30880): n equals a,t,g, or c
gaaggaaatttgtgattagaagccgcgctgttcttatttaagagcgttagcgcaacttccggtattgttgcaagatggccgcgcccagtgatggattcaagcctcgtgaacgaagcggtggggagcaggcacaggactgggatgctctgccacccaagcggccccgactaggggcaggaaacaagatcggaggccgtaggcttattgtggtgctggaaggggccagtctggagacagtcaaggtagtttgggacaggaagtggagaagtagtaaatcgataggttgggactccgtggaatgagggtaaggggcccagagtggatgtagaaagcagagaggggtgaaagatgcttttgaaggaaggtggcttggttggctttgcgttgatttgacatcctgggatggtagtactcatttttctttctttttttttttttttttgagacggagtctcgctctgtcgcccaggctggagtgcagttgcgcgacctcggctcactgcaacttctgcctcccgccttcaaacagttctcctgactcagcctctggagtagctgggactacaggcaggtgccaccacgcccggctaatttttttgtatttttagttcagatggggtttcaccatgttggccacgctggtctcgaactcctgacctcaagtgatccgcccgcctcggcctcccaaagtgttgggattagaggcgtgagccactgtgcccggccggtagtactcattttcttttgctctttttgaatgatattctagccctcacctccttgcttccaattggtttaccaggattctgtggtatagtagtctaagcagaggaaagtttcgttccttgcgtcattccacatcccaagacaagttactgggcagatgagaaacgtagttatgtagcctagtctgcccacactttttgtaagggcttcgtgtttcaattcattagtatccatagtcacctctctctaatatccacctatgatacactgtccagacctggttattatttaaaacttttacatctgcatttttatctatcattcatctctttccccacatgtaatagaaccagcagttctctatcttaaagccttgggcagtgttcttcctcctcctttctcttacccgttagaactaattgaataggcccagaagaaatcgcattggtttagaagtcaggccaggattttaatcttcgttctaaatacacttttttttttttttttttttgagatggagtctcagtctctaccaggctggagtgcagtggcacgatcttggctcactgcagcctccgcctcccgggttcaatcgattctcctgcctcagcctccagagtagctgggattacaggcctgcgcctgtaatctattaaaagaatagaaaacatgattatatcctactaatgggttgaaactgtattattcattcaagaaggtttttttcttctataactaagggtgtctcatggacttagttcttggtcatttgttctttgtgctctctgtgacattacttcaactattcaatttcaaaatctacatcccttttttcgcagactttttggagccatatatctcaagaatgttgctagacatatacattccagtgatacataaaaacttaaccttccaaaacttgtatttgtatataacagtttgtttttagactttttactgaccaccctaatgctccttgggactccaaattgcaacttggaattatttcttttagctgctacagatgtagtccacttctttaacatcaaacttctgatgtcttttccagtgtacagagagttgttaggatagtgtctgtcagtcattcccatcctgccctgcttactccagaattatttttggctttgtgcttgatacattaggattctgtggtttacaaagcagcttcatatataatcactgccctttagtgtctcagctcccaattttcctcaaaatttcctttcttcgtttccactttttcttttttgtttcttttttgagatagggtcttgctctgttgcctgggcaacagagtgcagtggtgtgatggttcactgcagcctctacttccctggctcaagcagtcctcccacctcatcctcctgagtaactgggactgccagcaaatggcactgcgcctggctaatttttttttttttttttgtgagacagggtcccaccgtgttgcccaggccggtctcaaattcctgggctcaagtgatccttccacctcggcctcctaaagtgttgggatcacaggcataagccaccacacctggctactttgtcttgattccatctgtacctttgctcatgccagtctttcttttttcttttttttgagacagggtcttgctggagtgcagtggtacagtcttggctcactgcaatctctgtctcctgggctcaagccatcctcccaccttagcctcccaagtagctaggactacaggcatgtgccaccatgcccagctaatttttgtatttttagtagagatggggtttcgccatgttgcccaggctggtcttgaactcctgaccttaagtgatttgcctgccttggcctcccagagtgctgggattacagccgtgagccactgcatctgcccccatgcccgtcttaaaactgggaataacccctcttccttttacttctgagagttttctttgattaaactgcctcctgcatcattagttttcacatttcttttttttgagatggagtctcgctctgttgcccgggctggagtgcagtggcgctgcaagctccgcctcctgggttcatgccattctcctgcctctgcctcccaagtagctgggactacaggcgcctgccaccatgcccggctaattttttatatttttagtagagatggggtttcaccgtgttagccacgatggtctcaatctcctgaccttgtgatctgcccgcctcggcctcccaaagtgctgggattacaggcgtgagccaccacgcccggccttcacatttcttgttcagatttgcagctcttcacttagtgcatgtttggtgtacgcaaactgagggtggtgactcgatattttgcacagtacctacttactgctcctgtaataaacacagcattcagccttgctaactactaactcctgcctagttccaggatgtctcattggccttgcctaacagccacaggttttttaattaaatccagtgtattagtagataatgtgaagtcacaggttgtgcccttcctcctgtttccctctcagaccattcactggggagtgcaaataaggctgcacagtaatcccccgaagggcttgctgggctccacccccagtgttcctggtttagtaggtctagggtgggcctgagaatttgcctaacaagtttccaggtgcagctgctgctggtagtttggggaccacacttgaagaaccacggggctaggtaacagaagcttatgctgttctctcgtcatgttccctgttcttcaggtagggaagacatatgagctactcaactgtgacaagcacaagtctatattgttgaagaatggacgggaccctggggaagcgcggccagatatcacccaccaggtaactccagggacagtgctcacaaccctttgagcctctgtatggaagggttggcagctgagtgctgcctctcttcagccttaaccatgtctcggtttctgctttgctcagagtttgctgatgctgatggatagtcccctgaaccgagctggcttgctacaggtttatatccatacacagaagaatgttctgattgaagtgaatccccagacccgaattcccagaacctttgaccgcttttgtggcctcatgggtaagaagccttagaacaaagttagaatgaacttgtcagtagggaagaagggaggaagaggaaaagggagaactaaatgtggatttttaagcgagaaaatgggagaacaacatgattaataccaggacaaggactgttattatttttctatgtttgtggaaactccactcctgttcttgcagtagcttcctggctgagtgaaagagggagtctgaacccatcactgtacagctagccatatgcttggcaactgtttgttcctaacatttcaggagtccagtctagatataaagcacacagggaactcatcttatccatggggttttccttgttcgatgactggacagaaggactgtggtctccatctagctctgaactcttttttcccccttctagttcaacttttacacaagctcagtgttcgagcagctgatggcccccagaagcttttgaaggtgaggtattgaaacctgttagttgaaggctggttctgggaatgtttctggggctgacttttctctcttttttactttaggtaattaagaatccagtatcagatcactttccagttggatgtatgaaagttggcacttctttttccatcccggttgtcagtgatgtgcgtgagctggtgcccagcagtgatcctattgtttttgtggtaggggcctttgcccatggcaaggtaaggtctgggctcaaccctgaaattcttggtagagctgaacttagtatagaattcccagagcagtaggcattttaacaatgcttacaatgagctagaagacacatgacagttccacaccctgccccagggcacatcctttgagggctgctgccataattggaagtcacagttaggaccttcttcatcctttgtagggatttgatattcaacagcacagctgaaatactagctcagccatagttttcctgccctaaagaagggctgaaacagctactgagtgacagagttggctgacaaaactgttcttttcttaggtcagtgtggagtatacagagaagatggtgtccatcagtaactaccccctttctgctgccctcacctgtgcaaaacttaccacagcctttgaggaagtatggggggtcatttgacagtagtagaacctgttctgaaaccagaaactgttgatgtcacatcctttgaccctggtctgagctgactgctggaagatgatctttctgcactgagactgtggagtttggggaagccaaggctgtacatttgctatttgtttatcctatgaatactgttcttgcaaacctggttgttttggggttcctaaagtatccagtggtgtaaaactgtttgttccccgggacttcagggacagataggaggttacagagtttgcagtttggttccatgctttgaaggcaggctttagctcccagattcccatgtgctaaaggagagaaccctgatgatggagaagaactgtgaaagagagcagtcaggaatgctagtggtgaaaaactgaacaaacagaagtgattttatctaatacagttccaaggtagaaaaagtggagcaggcagggccttgcacccctctccacccccccatggggggggtggtggtagcggcacatacacaatcatagtaaattggcagaagaaaaacacaatagattcctggctagatggggagagataaggcaatgtgcatgggggaatcagaggggagatgtgagcccctctgctcctcccacaagagtttcccctttgggccgggcacggtggctcacgcctgtaatcccagcactttgggaggcggaggcgggtggatcacttgcggtcaggagttcgagaccagcctggccaacgtggtgaaatcccgtttctactgaaaatacaaaaattagctgggcatggtggcgtgcctgtattcccagctacttgggaggctgaggcaggaaaatcacttgaacccaggaggtggaggttgcggtgagctgagatcccgccactgcattccagcgtgggtgacaaagcaagacgccttctccaaaaaaaagtttcccctttggccccaaatgaagacttggctggcagcagaggcacagctggaagcatcgatcttccacctccctggcttttccattctctgctctggggcaaaggagtgctgtgaaaagggagacgagtagtttctgcaccagtcccgcacaggccacctgcaagacaagaggagtttggaaggctggttagttactcctgtaattcctggtctatagcccttccagatgtttcctagcatgcctcaataagtcacagtagtcattgcccatactgtgttccttagtagccaggctaatccttggaattcaccccagatttctaatactattgtttttttccagtctgttgctctattctgtaacctggtggtagttttagtttagctgtattaacttaccagggaaatggattattccatcttctttaacttctctttccttggcaccattgctttgtgaatataaggcaatatgaatagtaggctcaggaagaagatgtggccaaggaaatagatggatttatacacctgtggagagagaggccactaaggtagacaggcctggagtgtcctttgcaacctttgaggttgcagtgagtccctcccagtctcacaagcaggccttcacttgccttaagccatttgtcccacgtgaagaggcagaaggcagtcatggagtaacccatgaagagccagtggatggtctgttgcaccaaatagtagaagggctggaggacagtaatggcggccagcttgctcagggtggggctctcttgaatgagcctggcagcctggggagggaggaggagctcatcagcatcttgtcccttatattccccttcacccccaccctggaggcctacctgtctttccacaataacaatgaggaattccatctggaagcagaccaggtatcctgagtgcaggccgtgccagagggccaggaatagcaacgagagaccctgagagagttctttatttccaaggaacttgagtcgtttgaagatgtagctggagaaaagggtgggtggggcgaccctcaaactgactggtccttgcatcccgccacctgcctctgggtcctcaccctgaggattggattggagtgctggtgggttcccacgtgtagcccccagagggtacaggaggcagtgctgactgattacttttagagatggaaagcagacccaaggcggagctggagaccgtgtgcgcacgagccacttggttcagcagcagtgactgaggctgatgctgagatcagtggtgaaccagacactctactcaagctgcccacactctagtggtggggacaaacaagtaaagctgttgataaacagggcagtggaggacataagtccattggcagagctggagtaacacccaggtcttaacgcacttttatatcttgcctttttttcaaatatgacagtaatggtttttttgggaggggggtataggtgggggtcaaagtcagtgtgagcgacagggggttctgcccagatgggaaagacgcataggggtgacatggtacacccctgccctccaatctgggaagacagtggaaggaaggaaccagggtccaggctccccaccagcagctcaccgggccacccaggcgttggtgttgatgttgaatgaggcaatggtgccagtgaagcgggggtttgtttcaaagagccacaccttcatgttggcacaggcatcccactttgccttgcccttttcttcaaagccattgaagcccaggcccgtcaaaatgcatactccttcctgagagggaatagctcagttagggctcttgccactccccatactggcccccatggcttgtctaaataggaccttgtttcaacttttctacttactgtgaccagccaacaggtgacatatttgtacagcacaaacttgccccagatcagcatgtacatgcagcggaaccagaaggggtggttcttgagggaagaaagcacagtgcattagggatatcacatgactaggcagtttctctcagcactcttccttttcacacttgtggctggctacttcatacctgcctgagtcctgctgccagatgccctcaatagtctggcctgattgccttcacaataggcagagaggaataagcagagggcctggagaatattcattcgcctttcccttggagagcctcaagggcagcactgtatttaacttctctactgtttgccttcgttggcaaagtgtttggaatgagcatttggaatgttaagtacagaggggcccatattggattttaatttaaggagagaaacctgcccagaattactgaactgttttcaagcctttcagctgggcaggagcaaaagccagcacttccccccttcccttggtttctgaattccctagaagtgcccaaatgtatcagtcaagagaagaaaataggatggagaatcagaagctgctgtgctctgaggggtcacgtggatgtgataaggcaagctaggagcggctcctagagaaggcaacgggtgctaaatgtgcacctggcacagccctgtgcccgcgaaggttgttcagtgctggctgatgaacatgtcccagcacggctggcattgacaactcacagatctagagcaaaaccaacatgcacttgtagatgatatttcctacttctctgctatctgtagggatccttgcctgtccattttctagctctggtgcagtcatgctgctgctgctttagtagacactcacgtcatagtcttcagtgaggagatagtcttctgtgatgtgggggctgagcagtgtgtagcccactaggtagaaaaggcccagactcaggcgcttgagagcaggaatgatgctggaaaggaacgagtgaagttcctggtcacagagagcagagactattcccttcaccctctgaccttcagttatggagaggagtgtttaggggtgtggttgtctacctggaatgggatgagaagctctgctgcccaaagtgtttcctgtttcagggaaagatttctatggctggctatgaggaatggggactgcaaacctcttaagagttgtaggaaagtcagggcagcagacagtggaccagtcttgtgtttacccctcagggatgctactgatctcaaggtcttgccaggtctcacaatctccattgggactgaaaacccagtggaggtaagataataaaaataaccactttgaatctgctccttcatttcttggttgaattgatgctgaaacacaggatggacaagttctcagtgaaggaattcttctggcaattaaactttttttttttttttttttttaccattttaatttttattttctagagtcagggccttgctctgccactccggctagagtacagaggcatagtcattgctcgctgtggccttgaactcctgggctcaagcgatccccttgccttggccacctgagtagctgggactataggcatgtaccaccttgcctggataatttttttttgtagagatggggtctcactatgttgcccaggctggtcttgaactcctggcctccagtgatcctcctgccttggcctcccagagcgttggcattacaggcatgagccactgtgccctcctgcatttcctactgataaatatttttgagacaggattttgctatgttgcccagaatggagtgcagtggtgtgatcaaagctcactgcagccttgacccacctcccctggactcaagcaattctcccacttcagcctcctatgtagcttggactacagatgcatgccactatgtctgataatttttgtatttttttgtagagacagagtctctctatgttgccaggctggtctagaactcacgggctcaagtgatcctcccacctcggcctcccaaagtgctgggattatagaggtgaaaccactgtgcccagcctctatctacctacctacctatcaacctgcctacctacctatcaatcataaatatatttcatatatacatgaaaataggctttaaaggcagaaatgtgactggttcaggcaaaatcctgtggcataaatgtggatttttatgtttgtactagtgttagaatggataactggaagaaccctaaactaaaaagggcccactcctggcacagagtgcctgttacaacagtccagggcctgcatgactcaggtctctatgccagggtcatgctggagaatgcagctttcagaagagtcacttcagagtgagtgaaatacctacacaaacatctggaccaagaggggcaattacctgtttggtatctttcctggtatgtcaatcagctctccctgcaccagcttcatgtagtgattcattgagaactggggccctaccaagaaggccccatagaagtaggagaaaccagcaacttccagcagggaaggaacaccacgtatggcatatttctgttgctcagaggacaaggaattctatgccaagaagagaatgcatggttcaggatagccttgaatctccccacaagagccactttgagtgttccccacctgtgtgccccactgactggggttcttcaaatagccttctctttgggggatgacaaatagttgcttcttgtggaaatgcgtatgtgtgtgcatagctggctgttgctgctttagcaaatgccttgctggcattgatctctggactttgtgcaagagctggatcctgggcaaattagatttgttgatccttgctcagtgctatctgaaagggagattgcacaggctggggaatgagggagaggctccgctctggaatttgggttcagtcttttgttaacaacttttttcttccctttcattaagtcttgaacctctctgccgatgaatgggtacttacctgatctttccctccgtcaaagtagtcaacagccaaacctgagcagagagagaacggatgggtagggtggtgggagaggacactgaggatgtggcctgtagactgagtgcagccagaagtgtatggcggggggcggagggggggtgccgaggaagtttttagtgagatgggggagggacctacatgtaaggaaggcaggcagtgaccatcactcaccaatcagcttcaaagtcagaacacaatgtggcattgtccacttgatatcgtagttgccggtggcagtgtaatagtatccagccagaaggtaggcctaggagaggcagaagtatttattctagcatcactactatttcttctccttgctctgaaattcaatgttctctttcctttttcctttctcctcatcccatcattaaaagccttaataaattcctacaaatggaggtgctgaaaacctgtaatgggaagagcgttgctcaaggcttcttggcaaaatgagggctaaactgagatgagaatttagatgctgggaccacaggtgcatgccaccccacccggctaatttttaattttttttgtttcaccatgttgcccaggctggagggctaatttttgtattttttttgtagagatggggtttcaccatgttgcccgggttagtctcaaactcctgggctcaagcaatctgactgccttggcctcccaaggtgctgggattacaggtgtgagccactttgcctggcctaggcttaggttctttaactcattctaagttgcttttctgtcttgccttgaagtgactctgctcctggatagtgggttaaaccaaagagcctaatggcacagtatgcaaagggttagctggtggcccttccttgaggcaggcaaagagttaccattacaatctgtggatggaacacttgggcctgtgataagccacctacctgaagtcatactgctaagtgctgggagaggggttagaaattaggtctgctaatttctataccacagtcccctgcctacccctgtcccctgaaccgctgtcagctgtagcctgagctgctaagggaaagacgtttaccatctggaagcaaaaggtagtgaggacggcagtgatggtgcggcccattagtcgaaggatgaggaactgaagcacaatacacagcagggagtggtagagctggtttcctggatgcaagaagagagaatttagcctggtttttacactcccaccgtcctgagacttccaatcacaacgtaatatataaagaaaaaatgttggcatcaggatcttttttttcagaataacctcatgttttggaggagaggatggaaattatttattaaaataaaaaagattattagggtgttattttatttcttttctttttttgtttgtttttttagagatgcgacttgctctgttgtccagacttgagtgcagtagctcaatcatagctcactgcagccttgaattccgggctaccacacccagcttgttactgtatttttgaatgtctgaagtgaagaatgaatctaagtggggactgcttggctcggtcattcagttacatccacagcacagagaaactgaggattctttgttgatgaggtatggcaagggtaaccaccctcaaaatgtttttatctgacagaagaatgtacataaaagaaaaaaaggaaaagttaagctgtgttcctcttcatacaaccctctttgcaagtgggagcattataacttccctacctattagattctctcaaggaaattttgttcaagtctgttccttccaggttcccactaattgcggtgtcactgctaatttagtttactcaccaaagttaaaataagcaattgagaggcctgtaaaggtatggaagaggtggatgaggtaggtctccttgtagaaaaggtaatgccgataaaacaaagcaaaggggtaacctagatgggggaaaagataagaagagtgttatttgtgcctggtgccatcccagtttggtttggaagtttatctggcatgaaacgcagcccagagggagagagaaaaaaaaaacaacatacattatatggatggcaacagagaaggcaataacggtatccccaagaaccaaaagttttttgtaaatacaaattttgaactaaagatattaatatttgattgaggcaatataaagctgggtcctaagactaggtttcatttatagcttatgaactattgccagacattttctcttacttgaattttaaaaaatgatacaaggaagctaggcatggtggctcccatgtataatcccagcactctgggaggctgaggcaaggggattgcttgagccgaggagttcgacaccagcctgagcaacatagcgaaaccccgtctctattaaaaaacaagatacaaagatttgagcgtacccatctatgctccagaaacactcatttacactttgtgatctatcttgctagcactgtattatcagattatgaggaaaaatataaattaatatcaggctaaatactggaattgctgactgcatatatagcagttacaagttatgtggagatactcctcacagtctgtaatctgggcatcaaccaagttataaaatccatttaagtatactaaaaaaatgtcttctaaagccatgattcagagtatagtccaaaggccatgagtgaaccacagaggatcttctgatgggtcatgaactgattatacatggccaagggttgcttattgaattaaaaacggtcaataaaatttggtattcctaaactaaaattagcacattccatggctttactgcagactcaccttcagtgttctatctagaggtctggcggccatgcctggcaacatccccactgcactagtgcatatgtggaggatggggatctctcaactgctttttggaaagacattctgcctattctttcattgattattctcttgagttggtcatggtttatactttctgcaattcttgcttttatttttatttattttgagacagggtctcttgctctgtcacccaggctggagtgcagtggcacgatcatcgctcactgcagccttgacctcctgggctcaagtgatcctccaacttcagcctcttgagtagctgggaccacaggtgcttgccaccatgcctggctattttgtaatttttgtggacatgagttctcactatgttgcccaggctggccttgacctcctgggctcaaggaatcttcctgccttggcctcccaaagtgttgggattacaggcgtgagtcactgtgcctgatgaattgctgcgattcttgcttttaaattatgtaactgcagtttttatcatgggcaatacagtttactgtgagtttgcttaactctaaaacgcttagaatagtatcatacagaaataaattgctcaattatttgttaaataagtaaatgcacacaatcatgttatatgttggtttctgtccttctagtcatttttcccccatacattaaaaaaaaaaaaaaaaaaaaggctgggcgcggtggctcatgcctgtaatcccagcactatgggaggctgagacgggcggatcatgaggacaggagatcgagactatcctggctaacacggtgaaaccccgtctctactaaaaatacaaaaaaaaaaattagccgggtgtggtggcgggcgcctatagtcccagctactagggaggctgaggcaggagaatggcatgaacacgggaggcggagcttgcagtgagctgagatggcaccactgcactccagcctgggcgacagagcgagattccgtctcaaaaaaccaaaataaaacaaaacaaaaaactgtactggctggtgcagtggctcacgcctgtaaaccaaggcactttgggaggctgaggtgggtggatcacttgagatccggagtttgagaccatactggccaacatggtgaaaccccatctctaccaaaaatataaaaaattagctgggtgtggtggcgggtgcctgtaatcccagctactcgggaggctgaggcaggagaatcacttgaacctgggaggcagagtttgcagtgagctgagatcgtgccattgcactccagcttgggcaacagagcgagactctgtctcaaaacaaacaaacaaacaaatgccatttgatcttcctggtgccaggatcaactggtgtttttttttttttttgagatggagtttagctgtttttacccaggctggagagtgcaatggcacgatcttggcagctcactgcaacctccggcccctaggttcaagcgattctcctgcttcagcctcccaagtagctgggattacaggtgcccgccaccatgcccagtgaatttttgtatttttagtagagacggtatttcaccatgttggccaggctggtctcgaactcctgacctcaggtgatccacctgccttggcctcccaaagtgctaggattacaggcgtgagccaccacgcccggccaactggtgtttttttttttaattgctgttcccataataggctaggctcttaaatttatagcttcatgcaagtatagttgacccttgatcaacacaattttgaacagcaagggtccccttagacttccctctgcctctgccactgctgagatggcaaccctttctctttctcctcctccttgcctgctcaacctgaagatcatgaggaggaagacctttatgctgatccacttccactgaatgaagagtaaacatattttttcttgcttatgattctcttaataacattttcttttctatagtttactttatggtaagaaatacatatataacacaaatgacatacaaaatatatgttaatcaacttgtttatgctattggtaagtcttctattagtagttaagtttttggagagtcaaaagttatatgtggccgggtgtggtggctcatgcctgtaatctcagcactttgggaggctgaagcaggtggatcacgaggtcaggaaatcgagaccatcctggctaacatggtgaaattccgtctctactaaaatacaaaaaattagctgggcatggtggcacacacctgtagtcccagctactcaggaggctgaggcaggggaatcgcttgaacctgggaggcagaggttgcagtgagcagagattgcagtgagcagagagagccactgcactccagcctggtgacagagtgagactctgtctcaaaaaaaaaaaaaaaaaaaaaaaaagttacacctgtcggccgggtgcggcagctcacacctgtaatcccctactttgggaggcttaggcgggtgggtcgcctgagatcaggagtttgagacgagcctggccaacatggtgaaaccccatctctactaaaaatacaaaaattagttaggcgtggtgcaggcacctgtaatcccacctacttgggaagctgaggcaggagaattgcttgaacccaggaggcggaggtggcagtgagctgagatcacgccattgcactccagcttgggcaacgagcaagattctgtctcaaaaaaaaaagaaaaaaaagttttatgaggatttttgactgtacaaggggtgggatcccataggacctgcgctgttcaaggctcaactgtaattaattctacagatatcttatggattactggctcatgtattcattcaccaagtgtttagtaaatgcctgctatatgccaggtattctgtttatgaagcacgtaattgggtaggaggtggcatgtgatggttcgttttctagctggctgagatgatgggatataggatcactagctctagggaggtggagacatctatgaccctttcaggtagatcaatgagcaaggaaataggatcaagtctcatatatttcacatgggcagaaatttggcagagacagaacaccaggttagcagcaaatattgctaagaactagagccaggaactagaaagtatatagactaaatgtcaatgccttcaatcttttgctttatttttacttttgttttagtaacggggtataaataaaaaaatataaaacagtagataattatctagagcactcataaataagttctaggtagctaagtttctctctttaagcatgaaaacccttaaccatttggaatgctcgaaattaaaaaacaccacacatattactctgcctctttaagttgaatctaatttaacattttctaggtgtctggatcgtatctattccagagtaaagtcatgatggctttatgacgttctgaggtatgtgaaattgtctgcctgactctaacaaggcctacactgtcctgagttctgagttcttgtgtccacttcttatagcctgtctgtccctttccttgctactctgggatcaacagtcacctcttgaacttttggggtgcttggcaatagttcctctccctactcctaatttacggcaggccttagaaaccataaccttattttaaaggtgtaaaaaaaaaaagatttaagacaaaagcaaggggcttgggtgctttccttatggacttaggcctggtaacatctgttctggccacttagaggccttgtgtgctatttcttgttttcaggtgcgttttgcaggaggggacgttgttgagttccaaacaggtgaggtattgcacactagcaaacacatgagaagaaggcggaggaattgggagaaaaataaaaagaatgcagcaggccaggttagcaggaacgttaagacggtgacggagaacagcaaagcctggaagcaagccgccgtggagaaggaagaactgtgctgaggtgagttgctgtgacaacccaggctgattttgagtatgtaaacaccaaaccttgttcttggctgccgctcagctcagcgggctttggagcctggctgcccagccaccacttcagggatgtgctgtttttagggagggtgtgaccctacaagatgtttctgagccttaatgcttttttgtgggagccaatgcttaatatggtggctagagttacctgaagaatctataaaaaatgaccgaagccccttctgctcaccctcccactcatcagagttggcttccgtgggtctgagtgggaaggacttccacttttaacagcatgagacacggttctgacagccccactaacatccgaatgcaggccgcagtgctcagtcctgaggataaaattctcagcttggagattggggttgatgccttacctttattagcaccagatgggtttgtaacaacccagaggtttgtaagaacttgttggccgggcgccgtggctcacgcctgtaatcccagcactttgggaggccgaggcaggcggatcacctgaggtcaggagtttgagactagcctcaacatggagaaaccctgtctctactaaaaaaaatacaaaattagctgggcgtggtagtgcatgcctgtaatcccagctactcgggaggctgaggcagaattgcttgaacctgggaggtggaggttgtggtgagccgagatcacgccattgcactccagcctggcaacaagagcgaaactccatctcaaaaaaaaaaaaagaacttgtttggcagcactgtaactgttccttctttttgattgtttgtttaaagcagggacttcagaaatttattagcaggcgaaggatgatgacctttagtacactccaaacctgaggatcttctactagaatgggacctttataatccctaatgctagggacattcaaaatgcgtgttttttttttttttttttgagacagagtctctgtcgcccaggctggagtgcagtggtgcaatctcggctcactgcaagctccgcctcccgggttcacgccattctcctgcctcagcctctccgagtagctgggactacaggcgcccgccatcacgcccagctaattttttgtatttttagtagagacagggtttcaccgtggtctcgatctcctgacctcgtgatccgcccgcctcggcctcccaaagtgctgggattacaagcgtgagtcaccgtgcccggccaatgctgtggtctttcaagcagctgctgggatacatttaatttgtacaagccctcttcaggggttgtagtcaagcacagggagtggatagaactgtattattcagtctctggacttcactcagttccaagtgctgtttgtgtcagggaccagatctatcacaacgtgcattgttagcgggaacgttttcttatttcctgtacaatagttgtgagattacttattaatcctaaagttgtgaggtttcatctgaagaaacagaaatggactgtttccattaagtctggtaaatttggctgggagtggtggctcacacctgtaatcccagtgctttgggaggctgagacgggagaatcactggaacccaggagtttgagaccagcctgggcaacatagcaagactctgtctctacaaaaaataaaaaaaatagttgggtggggtgggtggtgcgtgcctgtagtcccagctacttgagaggctgaggcaggaggatcacctgagtctggggagacagaagctacaatgagctacgatgatgccactgcactccagcctgggcaacaaagttgttttttttgagaccctgtctcaaaaataaataaataaataaataaaaataaaaaaaatataagcggggcacggtggctcatgcctgtaatcccagcacttcgggaggctgaggcgggcggatcacgaggtcaggagatcgagaccatcctggttaacatggtgaaaccctgtctctactaaaaatacaaaaaattagccgggtgtggtggcgggcacctgtagccccagctactcgggaggctgaggcaggagaatggtgtgaacctgggaggcagagcttgcagtgagccgagattgtgccactgcactccagcctgggcgacacagtgagactccgcctcaaaaagaaaattaaaataaaataaataaataaataaataaataaataaataaataaattgagcaccccaaacaacttttgttaatgtgggaactatatatcaatgtctactgtgttagaaaataagactaaaaactgggtgtggtggctcactcctgtaatcccaatgctttgggaggccgaggtgggtggatcacttgaggtcaggagtttgagaccatcctggccaacatggtgaaaccctactaaaaatacaaaaaccagccagacatggtggcaggcgcctgtgatcccagctacttgggaggctgaggcaggagaatcgcttgaacccaggaggtgggggttgtagtgagctgagatcacgccactgtgctccagactaggcaacagagcgagactccaaatcaaaaaaaaaaaaaaaaggaagaaaataaaactaaaaaaaaagtaaaagatatgattaattcagtaaaaatattaacagtaaaactactacacattatattaatataaataacatactttaaatgtaaaccactatatttcccaaaacaatcaaagaaataaagccatctaatgagaagaatgccactgttttacattttcataaatttatggcctctgtctgacttaatagaagatgactggattctcaaatctgcttctgcatttaatctgttgtaatatgttagtttggttaaaatatacaaagaaaatctggctttacacagacagagaaagtatctgcattttcagataattttggatattctttagcgctacatcaaaacttgacaagtagtagtttcttaacagttaggaacttttgttataataaaacccattggcttctcttgcactttgaatggatattttaccatgcatgactttgtaacatcacacatagatcactgcaaaatactggttccctgttgttaggcagatcttctaaatactgacatatttcattagaatacatatcaaaaaatcatattccttaaatttcaccattgatttcagcagaaaagtctgtatatattgaaaagtggtcaagctcatgggagtggatacaagttttccaaaattctaatttttacttgaaagtgtaaattttatcactggctacaaatattgtcatttgtttaccttgaagtgacaggctcacttcatacagtttcaagagactgtctgccagatgcctaagtctaaaaccatagtttgtctatcattctttcaagtaaaaatggtggtcggtgaaaaaagaagctgctaaatcaatatgcaacttgaataatcgcccaaatgcttttccttgtgacaaccaccgtactctaccagtgtgcagcagaggcggtttatgcatatttcccatttcttcaaacaagtttaaaaagatgtactcaggatcaggcatggtggcccacacctcccagcactctgggaggccaagacgggtagatcactttaggtcaggagttccagaccagcctggccaacatggcgaaaccccgtctctactaaaaatacaaaaattagctgggtgtggtggtgcataccagttaaaaaaaaaagatttattcaaggactgacatttgatacaattaacaatatttagcctgggcgacagagtgaaaccccatctctaaaaacaaaacaaaacaaaacaaaaacaaaaattagccaggtgtggtggtgcacacctgtagcctcagctactcaggaggctgaggtagcatcacctgagcccaggaagttgaggcggcagtgagctgtgatgcccccaccgcactctagcctgggtaagaccctgcctcaaaaaaaaaaaacaaaaaaaatttaccacttcatcaacgattcttaagtgaaactggctctgttttgattgtgagtgcatggcagtaaagaatgcagtgaccactggtacagtttggtgtcaccgtcctgatttgtgctaaggcgccagcagttttaccaccattttgcaacatcagtgcaagtgtcaacatagggaaaagacaaatacatcttagtagtatcatgaaaataatttttaccccaaagagattccttaaagaagtctcaggaacttttaggagtagtctatggactgcatgctgatatggaatgatttgttttaatctttcatcttctaatacccaaatccactagtctttcctttctccctggtttccttgactgccctgctgtgttttcaatctttttgaaacttctctttcactggtttcattggttttgaatacagttatctcttggtgtccatgaaggattggttctagtactcgcagcagacaccacagatgctcaagtcccttatataatatggtgtagtattgcatgtaacctatgcacatcttcacatacactttaaatcatctctggattactcataatacctaatataatgtaaatgcaatgcaaatagctgctatatagcatattgttttttatttatatttttattattgtattattatttagcttagaatccatgaatgtggaacccacaaatatggagggctgactatacacagtttcctggatttttttctactgagatataatttaccataaaattcacccttcaaagtgtaaaatgtaatgttttttagtatattcaaaaggttgtcgccgggcatggtggcttatgcctgtaatcccagcactttgggagccggaggagggcagatcacgaggtcaggagatcaagaccatcctggccaacatggtgaaaccctgtctctactaacaaaaaattagctgggcgtggtggtgcctgcctgtagtcccagctactcaggaggctgagggaggagaattgcttgaacccaggaggcagagattgcagtgagctgagattgcgccactgcactccagcctggcaacagagcgagactccatctcaaaaagaaaaaaaaaaaaggttgtgcagccatccccactatctatctaatttcagaatatcttcatcacctcaagtagaaaccccatacatgttggcagtcatttcccattctctcttaactcccagagcctggcaaccattcatctactttatgtctctatagattggcctattctaggtgtttcatataaatggcgtcaggcaatgtgtagacctttgtgtctggcttatttcacttagcatgttttcaaggttcatccatgttgtagcatgtatcagtacttcattcctgtttatggctgaataatatcccgttgtatggatactctgcattcttttttttaacatttaaaaattttttatagacaaggtctcactatgttgctcaggctggtcttgaattcctgagctcaaatgatctgtccacctcagcttcccaaagtgctaggattgcaggcatgagccactacgcccagcctggatactctgcatataatctacccattcatcagctgacaaacaactgggttgtttccactttaggaacattatgaagaatgctgctacaaacattcatgcattttgtagagacagggtctcactatgttgcctaggccggtcttgaactcctggcctcaaatgatcctcctgctttggcctcccagagtgctgcaattacaggtatgagcccatgtacaagtttttgtgtgaacatatgtttttatgttttcaattctcttgggtatatacctaggaatggatctcctggatctttttcttttttttccctttgggacagagtctctctgtgttgtccaggctgaagtgcagtggcatgatcttggctcacggcaacctccgcttcccaggttcaagtgattctcctgtctcagcctcccgagtagctgggattacaggtgtgcaccaccatgcccagctaatttttgtattttcagtagagatggggtttctccatgttggccaggctagtctcgaactcctgacctcaagtgatcgacctgccttggcgtcccaaagtgctgggattacaggcgtgagccaccgggctgttgcccacgctggagtgcagtggcatgctcacagctcactgcagcctcaactttctaggttcaagtgatcctcccacctgagcctccctagcagctgggactacaggtgtgcacaggaccggctaatttcttgtagagttggagtttcaccatgttgctcaggctggtctcgaactcctgagctcaagcaatctgcccgccttggcctcccaaagtgttgggattacaggcatcagccactgtgcttggccaatgttcactcttactttctgtgcttacttctggcatgggttggctgactacaatttgaatagacccatctttccgtttctttcaccgaaggcattttttctggctcctagatgttgctgacccccaggatccagtcttggccctccactattcttgctacactgcttctttggaaactcatctactctcaagtaacttaatataatctttatgccaaagacagatccacatctttagttctaacttctttttcagttccacatttcctacttccttgctggacagttttaatttgatatttcattaccatctcaaactctgtataactaaggcataaatttctccctaaatcagccttctctgggctttttttttttttttaaattaacagtgttaccattctccaggtcacacaacattcaaaagtgtgttttcctgccagggcatggtggctccacgtctgtaatcccagcactttgggaggccaaggcaggcggatcaccaggtcaagagttcaagaccagcctgaccaacatggtgaaaccccatctctactaaaaatacaaaaattagccgggcgtggtggtgcatgcctgtaatcccagctactcaggaggctgaggcaggagaatcgcttgaacccaggaggcggaggttgcagtgagctgagatcgtctcactgtactccagcctgggcaacagagccagactccgtctcaaaaaaaaaaaaaaagtgttttccttcttcatattggttctctgttatctagtcatgaaatcctgttgattcctcctttccagtctctctcaccatcactgtcaccatgaccatcaccactccctttttcctctgctgatttgcagttaaaacccttatggatctcacccttaaatccttgcaatggcctcctacctgatctctgcctgcaccacgtcttcccagcagtcctataccggggtaatcttccttcagctcctgctcagaaaccatcaatagctcccagctgactactcaacagagtcagcaatcctgtctgttctaccttcaaaataaatccaaaatctgaccacttctctccgcctctactgcttcccctggtctgagttgccactatctctggattattattattaatatatcattattatattcaatgtattatcattatatacttgcctcctgactgatctcaccctgcctttgcctcccttcagtctagccttaatgaagcatctagagggttctattcaacttaagtcagcaggtcactcctctgctcaaagccctctcaaggcctctattctcactcagatcaaaaggctgattgccagcacccgcaggttctgtccctctgcccgggccccactgtcctctgactcatctctcaatctggcctctacccttctgctccagccccaaagctttcccttcctggaatgttaagcaggtccagccttggtgccttcacatggtaagttccttgcctggaaggctctttgcacagataagctcaaatccttcctacacctcaggtcctttgtaaaatgtcaccataagtatcagtgaggacttccctatcttatctagaagtgtatacaacactacccctccccaccctgtaaccctcccccatcacacacttcttgttcttctttcctgctttttctatttttcttctcagtacttattaccttttgacataccatatatcttacttttcagtctttcaaagcagggattatcatctactttagtccctaccgtaccccagtgcatagtacagttcctggtacacaaaatttctcaaaaagtattagctgaatggccgaacaatgagtgaacaagtgctctgtactctaggcagtcaatacaatatttattaagcactcactatgtggttagcattgcattaggcattgggggaatatggtagaattttaagaggtgctttctattcttaaggagcaaaatcaaacaatgatgttctatgctaagggctaactgtatggaatagccaatgttgtagaggttaaagagaaatcaatctcgaccacagtggtcgggagaagtagttcttgaacagagaagagatgacggcattccaagggaggataatgtagtaaagacacagcggtaggaaggagcatggggcattcactccaagagactgggctaatttcaagggaggaaaaatattgtaacaaaatggatgggaaagtgaaaaaccaggcagagtctgaaattgataaatgggaaaaaaaaaatcaattgactaggtgtaggagaaggaaaaggacaaattaaagatgtttatgccactgatataatggtcttcaggtcttcaaacctttttgctggcatagctcctagaagaattttgaaaaactgtatatcctcctttcacattttaaagttgccatctaaaccttatgtttttatttctttatttttttattttcttgagacagtacttcactctgttgcccaggctggagtgcagcggcacaatcacagctcactgcagtttcaacttcctgggttcaagtgatcctcctgcctgagcctcccaagtagctaggactataggtatgtgccgccatgcccccaaaacaacagcaaattatgtgtgtgtgtgtgtgtgtgtgtgtgtgtgtgtgtgtgtgtgtgtgtgtttcaagacacagtctcactctgttgcccaggctggagtgcagtggtgcaatcttggcttactgcaacctctgcctcccaggttcaagcgattctcctgcctcagcctcccaggtagatgggattacaactgtgtgtcaccatgcatggctgattttcttttctttttttttttttgagatggagtttcgctcttgttgcccaggctggagtgcaatggcgtgatctcggctcaccgtaacctctgcctcctgggttcaagtgattctcctgcctcagcctcccaagtagctgggattacaggcaggcgccaccacacggggctaattttgtatttttagtagagacaggatttcaccatgttggtcaggctggtctcgaactcctgacctcaggtgatcctcctgccttagcttcccaaagtgctgggattacaggcgagagccactgcacctggccgcatggctgatttttgtatttttagtagagtagggtttcaccatgttggccaggctggtcttaaactcctgacctcaagtgatctgcctgcctcagcctcctaaagtgctgggcataagccaccatccctagtcagtgtgtgtgttttgaggcagggtcttgctctgtcgcaaaggctggagtgcaatggcacagtcatggctcactgcagccttgatctcctgggctcaagtgatcttccgacctcagacccctgagtagctgagaccacaggaatgtactaccacattcagataattttaaaattttttgtagagatggcatcttgctatattgcccaggctggtcttgaactgctgggctcaagcaatcctcctgcctcagcctcacaaagtattggcattacaggtgtgagctactatgtttggccgtgtgtgtgctttctaatgcctattgaaggtgtgttttaagtgcttatggcagatgtctgccatgcaatctaaatggcaaaccaatcagctggatcagtcttacttacaacacacctggcctgtccctcaacttttctattctttcaccaaaatggaagttccttatgttagagaacttacagagaaaaggaagacaaaggaaaataggaaggagagttaagctctgcctgacactgtctacttaagtgatgggtaactgattaggttcagtgcttagaacttcatataatgagatacaaaatctcattactgacccactctgccagctagaagagcacttgtagatcatggacatttaggtggggatatagccacctttgatcctttctgttcactagattaagccttgttgctagtacaggcaggagccaacataccttccacactccagcaatcctgtacaccttgggctgagtcatatgctgaacagttattcatgaatacagattcttacttagaactgaagaattacctgctccaaacccttcattaggtagataagagactaaggtccaaaggggataactggcatgcccaaggttaacagagcagagctcaaattagaatccacatcacctgatttccattctactattcttgccacatgccttggcacttggcagtgacctgggagtgaatcactaataaccagctgtgtgctcttttaaagctacagctctattattctttgatgtccagataacaatctatgctccagcacctgtttatagacataagcacacccatttttatgtttgcttatcctcctattgaaaaatattttaaaagttcattttaatgctaaatttaggtgtactttctttgttaatctaattcttgagcactctgcacccttcagcagttcatttctgaaagttacctccacctaaatagctcaagcattgtgacagctgtgatacaggactcatggaaactgggacaagtgatcaaaaatgtctgagggaggaacaatagaggggacattttaaaggtaagctattggatagttgttacctgtgagaaagaaagaaaaagggttaggttaagaaatgttagttttttactctctcaacccagccaaacaacctaaacttgaactgtcccaaaggcctaccaaaattctttaatttcttcacttaagctgagtgctcttaataagcaagacttctgaggtgtagtgctagtgattaatgttatacacacccgttggctgactggtgaaacctgctgcaataactaaaaattattctataaaaatgtatagacagagagaatgttaaagctaaaagaggccgttgactcatttctttgttttagtagaacaggtgcaacagattgaggcactttaagacatctaaatggctttactagcaaagataaaaatcacacttgcctgtactcagggaattttatcacattctaattctttgtaaatcagtgaatcccctggtgcaacttctagccagattatctgggctttggaatcagaattatctagtttaaaatttagctctgcagcttgggcaaattacttacattctttttttttttttttttttttgagacagagtctcgctctgttcctcaggctggagtgcagtagtgcagtcttggctcactgaaacctctgcctctcaggttcaagcaattctcctgcctcagcctcccaagtagctgggactacaggcgtgtgccaccatgcctggctaatttttgtatttttagtagagatggggtttcaccatgttggtcaggctggtcttgaactcctgacctctggtgatccgcccgcctcagactcccaaagtgctgggattataggcgtgannnnnnnnnnnnnnnnnnnnnnnnnnnnnnnnnnnnnnnnnnnnnnnnnnnnnnnnnnnnnnnnnnnnnnnnnnnnnnnnnnnnnnnnnnnnnnnnnnnnnnnnnnnnnnnnnnnnnnnnnnnnnnnnnnnnnnnnnnnnnnnnnnnnnnnnnnnnnnnnnnnnnnnnnnnnnnnnnnnnnnnnnnnnnnnnnnnnnnnnnnnnnnnnnnnnnnnnnnnnnnnnnnnnnnnnnnnnnnnnnnnnnnnnnnnnnnnnnnnnnnnnnnnnnnnnnnnnnnnnnnnnnnnnnnnnnnnnnnnnnnnnnnnnnnnnnnnnnnnnnnnnnnnnnnnnnnnnnnnnnnnnnnnnnnnnnnnnnnnnnnnnnnnnnnnnnnnnnnnnnnnnnnnnnnnnnnnnnnnnnnnnnnnnnnnnnnnnnnnnnnnnnnnnnnnnnnnnnnnnnnnnnnnnnnnnnnnnnnnnnnnnnnnnnnnnnnnnnnnnnnnnnnnnnnnnnnnnnnnnnnnnnnnnnnnnnnnnnnnnnnnnnnnnnnnnnnnnnnnnnnnnnnnnnnnnnnnnnnnnnnnnnnnnnnnnnnnnnnnnnnnnnnnnnnnnnnnnnnnnnnnnnnnnnnnnnnnnnnnnnnnnnnnnnnnnnnnnnnnnnnnnnnnnnnnnnnnnnnnnnnnnnnnnnnnnnnnnnnnnnnnnnnnnnnnnnnnnnnnnnnnnnnnnnnnnnnnnnnnnnnnnnnnnnnnnnnnnnnnnnnnnnnnnnnnnnnnnnnnnnnnnnnnnnnnnnnnnnnnnnnnnnnnnnnnnnnnnnnnnnnnnnnnnnnnnnnnnnnnnnnnnnnnnnnnnnnnnnnnnnnnnnnnnnnnnnnnnnnnnnnnnnnnnnnnnnnnnnnnnnnnnnnnnnnnnnnnnnnnnnnnnnnnnnnnnnnnnnnnnnnnnnnnnnnnnnnnnnnnnnnnnnnnnnnnnnnnnnnnnnnnnnnnnnnnnnnnnnnnnnnnnnnnnnnnnnnnnnnnnnnnnnnnnnnnnnnnnnnnnnnnnnnnnnnnnnnnnnnnnnnnnnnnnnnnnnnnnnnnnnnnnnnnnnnnnnnnnnnnnnnnnnnnnnnnnnnnnnnnnnnnnnnnnnnnnnnnnnnnnnnnnnnnnnnnnnnnnnnnnnnnnnnnnnnnnnnnnnnnnnnnnnnnnnnnnnnnnnnnnnnnnnnnnnnnnnnnnnnnnnnnnnnnnnnnnnnnnnnnnnnnnnnnnnnnnnnnnnnnnnnnnnnnnnnnnnnnnnnnnnnnnnnnnnnnnnnnnnnnnnnnnnnnnnnnnnnnnnnnnnnnnnnnnnnnnnnnnnnnnnnnnnnnnnnnnnnnnnnnnnnnnnnnnnnnnnnnnnnnnnnnnnnnnnnnnnnnnnnnnnnnnnnnnnnnnnnnnnnnnnnnnnnnnnnnnnnnnnnnnnnnnnnnnnnnnnnnnnnnnnnnnnnnnnnnnnnnnnnnnnnnnnnnnnnnnnnnnnnnnnnnnnnnnnnnnnnnnnnnnnnnnnnnnnnnnnnnnnnnnnnnnncaaaaaaaaaaaaaaaaaaagcgaaaatatttgcaaaagtagcatacatgtacttccttcaggccacttaaaatacttatgcatgtctaaatattttatataagcatacctacacctaacttcttaaaaattgagtattctttttttgagacggctgtcgcccaggctagagtgcagtggcgcgatctcggctcactgcaagctccgcctcccgggttcacgccattctcctgcctcagcctcctgggtagctgggactacaggtgcccgccaccacgcctggctaattttttgtatttttagtggagacggggtttcaccgtgttagccaggatagtctcgatctcctgacctcgtgatctgcccgcctcagcctcccaaagtgctgggattataggtgtgagccactgcgcccggccgaaaattgagtattcttttaatggattttaagatataaaatctcaggctcagaaatttgagccacctaggggtgagaaattttggcctttgcccgcttcgaactgacttaactaaattaaatctatagaaagtaaaaaataaaggtctgtgaatgtacccagtactctcaggaagaagcatatttgccatgaagctaaaaaagcttcagtttcactccccttccaaggctctggggggtggggtgggggcgggagctagcaacgtgctcacatggtcatatatttttgtaaaacttatagaagatatttttgtattctttttcttaaagaagatatccaagattgtataagcttcagatcccagaaatcctagatttaaaaaaaataatcaaccaccaccccaacaaaattaggcacatgcctgaaaattctgctgctactgccagaattctgcgggtaggggcttcatccaaggtgttcctaataataggcagagtccccagattagttccggtgaggcttttgggaggggttatttggcgcggtgttggtgttggtaggatcctggctgtgaggctgaggcaggcctgaggagggctggggctgacaggtaggcagagttggctgggatgtgaggtgcaaggggtggtacttcggaaacaaactttgaagaggagaaggggcagcaagactgtgagtctggactttgtgatacactgtcacccctagtttagtgtgcctggttagggagaatcaagcagcatggaacccctcttcctttttcactaacatttttctgtatagtggttgaaacccagtgttaagagactgcatgacattggaaaagaaggggaggagaaaaagagtccatatgaggcaagaacagaacgcagccagaattagggcaggcagggaaaggaagggagtgagatgtgggagtcgggggggagttgaggtaacctgcattttatatgctagagctacgtattttagatgcaggggcaactgtttcggtccaggagtggaaaggactgtagaagcaatctagcacagctgtttctcacttgggaaaactgaagccctcagaggcagagggaggaatggggagcggccaggccaggacaggactcagcccccagttcctcttctcaggcgtccgattccttctgatctttctctcctgccctctctgttactgcttcctcctgttcttacccttatatacacttgaagttttatccccattttttatgcttatgggattgtacactttctggttctctctcaagtccaaccagtatgtggtaacctgtctcttcccacttcatttgtggcactggtttgcagtggacaaaaggtccgtgctcctcttctaacctaatctggactgggttgcccaaaggttgccctgccacactgccaagtgcctaattagctgttttctctccaacccctccaaacacttatcatgagtaatttctcttgtctttagagttgccaaatctaatctctgtaaatacaaatgtggtgagacttcttctcaggagtttcagcaaatgaaacaataaactcttttttaccctgctaagattctaaagataaccatgagaatactcctaattatccttataaatttgaataagtgtggttgttgggttctctcaccctttttatatcccttcaaaagaaaatacaagtttgaattctataaaatatttttctggccgggcgcagtggctaacgcctgtaatcccagcactttgggaggctgaggtgggtggatcacaaggtcaggagttcaagaccagcctggccaacatggtgaaaccccatctctactaaaaatacaaaagttagctgggcgtggtggcgggcgcctgtaatcccagctgctcaggaggctgaggcaggagaatcacttgaaactggaaggcagaggttgcagtgagctgagatggcaccactgcactccagcctgggcgaaagagtgaaactccatctcaaaaaaagaaaaaaaaaatttctaatatttatggaatgcactctcttatataccaacatacatttgtagcattttttttccttcagagtatgaagaaatcagtaaaaatgggcaaagcacaaatgacaactaatggattttgttaagtcctatgtgtcactttaagaacttgaaactggctcaaataaaaaccattttatttggttattaaaatgagacttaaaaacttaaaacaagattttaagtgatcttaaaatgtcttatcctacagaagattttagaggcaatgtagtacaaaaagctcttccttttctctgaagaatttattgagtgctttgggagtagggtgagttttttttttttttttaacatatgtttgattcaattaagcaaaaatattgtttcatgtctcactgaactgaatacattctactatccattggttttcaatgttcacttatttattttattttagtagagactgggtctcactgtgttgtccaggttgggttttcaaattttatgtctaacacagtgtgctaaatacaactgagtttcataagccatttttcccacttctgtacatggcactggtctcaacctgtatcatgcataagaattacctaggatgcggccgggcgcggtggctcacgcctgtaatcccagcactttgggaggccgaggcgggtggatcatgaggtcaggagatcgagaccatcctggctaacaaggtgaaaccccgtctctattaaaaatacaaaaaattagccgggcgcggtggcgggcgcctgtagtcccagctacttgggaggctgaggcaggagaatggcgtgaacccgggaagcggagcttgcagtgagccgagattgcaccactgcagtccgcagtccggcctgggcgacagagcgagactccgtctcaaaaaaaaaaaaaaaaaaaaaagaattacctaggatgcttattaaaaatgcagattcccaattcctgaagggaggtcatgccttggcatcttacttagcgaatcagtgctatacagaaagtatgagagactggttcatatcaaagaatattgtgaaactctacactatatttgtgaagatatagaaaacccgttttatggctaaaaatcatcattttactactactaagcttcattattagtagatggagtttttttaaagggtcatttttcacaaagaaaaatttgttttgtcttttaacactttaggactgttacttcatagtttatccggggcagagaacaacagcgggttactctcaaacctgctctggagtttcagactagcagctgacatttttggggacctttctttaagcttgacattgtaaacactttgtatgtattaacccacttaatcctcaaaacaaccttgatgagtaggtatccttatcttacggaagaggaagctgaagcacagacagggttagtgacttacctaaggtcacagtgctggaaggtagcccagctggaatttgaacccagacagcatgtgggttcagagtgttttcatttttaactactctgctatattaccctctctagttttcagtattcatattagcacctcagccttccccagatgactacaaatcccatacatatgtgtatacacacatacccagggtcattcatgaaatctgaaacttcgggtgttcaatttgactttatagaaccttctacctctcctggctgatagtatctctttctcatttcacaaattaaacttcctataacactaccttaaacatgccacccctgctcaaaatactctggtggcttcctacgatctataagatgaaagctaacttccttagcttgccattcaaggcccttcacagtctttccagtcttactgtttattctatccctacttgagcacaaagcatttttttctttgatcatgcatagtccttctttcttcatttttttaagtgtacaattcagtggattttagtatattcagtgttatgcaaccatctccactatctaatgccagaacattttcatctctgctatctaatgccagaacattagaaaccctgtaccgcatagtggccattcccaattcacccttcctcttatcccctagcaaccaccaatctattttctgtctttacgaattagcttattctgggtatttcatataaatggaatcatacaatatgtggccatttgtgtctggcttgtttcatgtcacaatttttcaaggttcatctgtgtcgcagcatgtgatcaggatttcattgttttcttatggctgaataacattccattgtgtggatataacattttgtgtattcattcaatttgtcccaattggtggacaactgggttgtttccacttttggctattataataaagctatgaacatttgtgtacaagtttttgtgtgaatctatgctttcagttcccttgggtgtaaccctaggaatggaattgctgggtcatatggtaactgtgaactttttgaggaactgacaaactattttccacaagtggctgcaccattttacattcccaccagcaatgcttgagggttccaatttctccgtatcttcaccaacatctgtttgtgtgtttttgattattgccatcctagtaggtgtgaaatgatatatcattgtggttttgatttgcatttccctaatgactaaagatattaaacagcttttcacgagcttattggccatgtatatgtctcttttagagaactgtctattcatatccattttgtaaactgggttatctttttattgttgaattctaagagttctttagacatctgaatactagacttatgatttacaaatattttctcctattctgtgggatagctttttactttcttgatagtatcctttggtgcacaaaagcttttaattttgatgaagtccaatttatcactgatcataccagctggaaatctacttttttctatgtcagcatctcaatattacttgatgatctggggagaatttttgaaaatataaaaataatatacataaaattttgatataaaacaagagggccaagacttgaagaaatctggagcttctgttgagacgatgacctggggtcccaatgattactgttaggatcttaatgtacttagtggaaaggttgagaggcgctggcctacggcaggcactcctacagtaagactgaacctaaactgacattggtcagtttacttgggaagttgaccatatgttttttgtttgttttctcccaggctatagtacagtggcgtgatcttggctccctgcaacctctgtcttccaggttcaagcagttctactgcctcagcctcctgagtagctgggattacaggtgtgtgctaccacacccagttagtttttgtatttttagtagagatggggtttcaccatgttgcccagggtggtctccaactcctgacctcaaatgatccgcccaccttggcctcccaaagtgctgggattacaggcgtgagccatggtgcctggccgatggtatacattttaaaaataaatgtatgctatctaggagttcccatgttttgctattatttcctattctttcagagcaccaatagtcaatgaagaattaaaagtgaagtcagattatcctttagctaaagaatggggatttctagtagtacggttcaatatttttggtcagggccccatatgtttatactccaactttaatcaatcttttccacttctgactgagggatatgctgtaggaactttatgtgtactatttcagttggcctctgctggcttataaacagtagttgatatttagggacagtaatccagagtagtgtccaagtccatctgagtttagaattgctaccacagcagaaattggaaacctcgagagttataagccatttaccacatctacatggatgccacttctccttaaagcatatacaaatatatagagatcggaactttaaccttctgggatctaatatcttcctaagatttgcatacagaatgtacacatggatcttctattatagcaaattcttttttttttgagacggagtttttgctcttgttgcccaggtggagtgcaatggcgcgatctcggctcactgcaacctctgcctcccgggttcaagtgattctcctgcctcagcctcccaagttgctgggattacaagcgcctgccaccatgcccggctaattttttggatttttttttttagtagagacagggtttcgccatgttggccaggctggtctcaaactcctgacctcaggtgatccacccaccttggctttccaaagtgctgggattacaggtgtaagccaccgcgcctggccagcaaattcttaattgcctgtaaaattactatctcactatgtattattttcggaagcagatatgaccgtgtacagttttcttataaaagtgccatagcaacatgaatactcagtactgacaagcatctttaattgacaaaagctttttttttttttttttttgagacggagtctcactctgtcccccaggctggagtgcaatggtacgatctcggctcactgcaacctccccctcccaggttcaagcgattctcctgcctcagcctcccgagtagctgggattacaggcgtgcaccaccgtgcccggctaatttttgtatttttagtagagacagggtttcaccatgttggtcagaccagtctcaaattcctgacctcaggtgatccacccacctcagcctcccaaagtgctgggattacaggcatgagccactgtgcccggccatgacaaaagctttttatttttaatttaatcttagcctatggttaaagtgaagcatttaaatagcctacttgatgacttcatgtgagccaagaacaaaacctgggtctgataatcttctacctactctctgacaaactgtccctacaattataatgcaatgacatttctatgagcagcctctattactaacagttattatacacttggttcttatacagaatacttcattcaagatgtccagagcttcatctagctcactatcttcaaagcttctgcttgcaaagggaggaacttacaccatcagtccattttaagccaaaaggaaattcttacccagaaattaattacttatcctttttttagtgtgttactctccacacccccttcctgttttgaaagcagggagaaataatgatgtatacagtatcttctgaactatacaaattacagataagctttaaaggtctctaggaagctactactgtttcaccataagaactccaagtgggccctaaatctcctggtccttgacttcagccactgctaggaaaatgtcaatacacacacactcctatcttaaaaactctgtgcttgagaagaaggatggtttgctttgatattagactagctttccctggcagctgcaactagggaacctaatttttgttaaagctacaagtcac

SEQ ID NO: 7639 - DNA, 143 bp, Homo sapiens
gggactacaggtgcccgccaccatgcccagctaatttttttgtatttttagtagagacagggtttcaccgtgttagccaggatggtctcgatctcctgacctcgtgatccacctgtcttggcctcccaaagtactgggattac

SEQ ID NO: 7640 - DNA, 303 bp, Homo sapiens
cttttttttttttttttttgagacggagtcttgctctgtcatccaggctggagtgccgtggtgcgatctcggctcactgcaagctccacctccctggttcacgccattctcctgcctcaacctcctgagtagctgggactacaggtgcctgccaccacgccctgctaattttttgtatttttagtagagacagggtttcaccgtgttagccaggatggtctcaatctcctgacctcatgatccgcctgcctcggcctcccaaagtgctgggattacaggcgtgagccacggcgcccggccaga

SEQ ID NO: 7641 - DNA, 319 bp, Homo sapiens; identical to SEQ ID NO: 5636

SEQ ID NO: 7642 - DNA, 157 bp, Homo sapiens
gggacgacaggcacctgccaccatgcccggctaatttttttgtatttttagtagagacggggtttcaccgtgttagccaggatggtctcgatctcctgacctcgtgatccacctgtctcggcctcccaaagtgctgtgattacagcggagtcaccac

SEQ ID NO: 7643 - DNA, 263 bp, Homo sapiens
tttttttttttgagaccgtgtctcgctctgtcacccaggctggggtgcagtggcgccatctcggctcactgcaagctccgcctcccaggttcacgccattctcctgcctcagcctcccaagtagctgggaccacaggtgcccgccaccacgcctggataattttttgtatttttagtagagatggggtttcactgtgttagccaggatggtctcgatctcctcacctcgtgatccgcctgcctcagcctcccaaagtgctggg

SEQ ID NO: 7644 - DNA, 182 bp, Homo sapiens
cccgagtagctgggactacaggcgcccgccaccacgcccggctaattttgtttttgtatttttagtagagacagggtttcactgtgttagccaggatggtctcgatctcctgatctcgtgatccgcccgcctcggcctcccaaagtgctgggattacaggcgtgagccaccgcgcccggtct

SEQ ID NO: 7645 - DNA, 294 bp, Homo sapiens; identical to SEQ ID NO: 5640

SEQ ID NO: 7646 - DNA, 130 bp, Homo sapiens
caccacgcccggctaacttttttttgtatttttagtagagatggggtttcaccatgttaaccaggatggtctcgatctcctgacctcgtgatctgcccgcctcggcctcccaaagtgctgggattacagg

SEQ ID NO: 7647 - DNA, 252 bp, Homo sapiens
ttttttttttgagatggagtctcgctctgtcgcccaggctggagtgcagtggcgcgatctcggctcattgcaagctctgcctcccgggttcacacgccattctcctgcctcagcctcctgagtagtctgccaccatgcccggctaatttttttgaatttttagtagagatggggtttcactgtgttagccaggatggtctcgatctcctgacctcgtgatccgcccgcctcggcctcccgaagtgcttggat

SEQ ID NO: 7648 - DNA, 155 bp, Homo sapiens
tgccgccacacccggctaatttttttgtatttttagtagagacagggtttcactgtgttagccaggatggtctcgatctcctgaccttgtgatccgcctgcctcggcctcccaaagtgctgggatgacaggcgtgagccactgcgcccggcctca

SEQ ID NO: 7649 - DNA, 306 bp, Homo sapiens
ttcttttttttttttttttgagacggagtcttgctctctcgcccaggctggagtgcagtggcacgatctcagctcacggcaagctctgcctcccggattcatgccattctcctgcctcagcctcctgagtagctgggactacaggcgcctgccaccacgcccagctaattttttgtatttttagtagagacggggtttcaccgtgttagccaggatggtctcgatctcctgacctcgtgatccgcctgcctcggcctcccaaagtgctgggattacaggcgtaagccactgtgcccagccggaagg

SEQ ID NO: 7650 - DNA, 1575 bp, Homo sapiens
ggagtcttgctctgtcgcccaggctggagtgcagtgatgtgatctcggttcactgcaacttccacctcccggtttcaagccattctcctgcctcagccacctgagtagctgggattataggcgtgtgccaccacatccagctaatttttgtatttttagtagagacggggtttcagcatcttggccaggctggtcttgaactcctgacctcgtgatccacccaccttggcctcccaaagtgctgggattacaggcatgaatcaccatgcccggacttttttttttttcttttttgagatggagtctcactgtgtcacccaggctggagtgcagtggtgcgatctcggcttactgcaacttccacctcccaggttcaagaaattctcgtgtctcagcttcccacataactgggattacaggcacaagccaccatgcccgactaatttttttttttttttgtatttttagtagagacggggtttcactatgttggccaggctagtcttgaactactgacctcagaagatccacccaccttggcctcccaaagtgctgggattacaggcgtgagccaccgtgcctggacttcttgttgttttttgtttttttgttttgttttgttttttgagacaaggtctcactctgtcactcaggctgaagtgcagtggcgtggtcacggctcaatgcagccttgacctcctgggctcaagcagtcctcccacatcagcctcctgagtagctgggactacaggcactggccaacacatctggctaacttttgtattttctgtagagatggggtttcaccatgttgcccaaggttgtctcaaatcactgggctcaagtagtgctctcacctcggcttcctaaagtgttggttttacaggtgtgagcccctgcctcttttttttaaattgaaactttctgttgaactcacacatttgggttctttaaatgtgtgtttttatgagtaaatttaatgggaatgaaagcataattgatcttttttttttttttgtatttgaggaatgctttatttccaggcaataaaatgctatttctcatctctgtctctcttagattacagcaagatggaaataccaaatccccctacctccaaatgtatcacttactggaaaagaaaagtgaaatctgaatacatgcgacttcgacaacttaaacggcttcaggcaaatatgggtgcaaaggtaaaaaataattcccaagtgaaagtttatatatttcaatatactgacccagtgtaaaggggttggaatttttttttttttttgagacagagtctcactctgtcacccaggttggagtgcagtggcgtaatctcagcttactgcaagctccacctcgcaggttcacgccattctcctgcctcagcctcccgattagctgggactacaggcgcctgccaccacgcccggctaattttcttgtatttttagtagagatggggtttcaccatgttagccaggatggtctcgatctcctgacctcgtgatccgcccgcctcagcctccctaagtgctgggattacaggcgtgagccaccgcgcctggccca

SEQ ID NO: 7651 - DNA, 279 bp, Homo sapiens
ttttttttttgagacggaatcttgctctgtttgttgcccaggctggagtgcagtggcgccatctcggctcactgcaagtccgcctcccgggttcacgccattctctcgcctcagcctcctgagtagctgggactacaggcgcccgccaccacgcccggctgattttttgtatttttagtagagaaggggtttcaccgtgttagccaggatggtctcgatctcctgacctcgtgatccgcccgccttggcctcccaaagtgctgggattacaggcggggg

SEQ ID NO: 7652 - DNA, 287 bp, Homo sapiens
ttttttcttttttttttttttttgagatggagtcttgctctgtcgcccaggctggagtgcagtggcgcgatctcggctcactgcaggctcagcctcccagattcacgccattctcctgcctcagcctcccgagtagctgggactacaggtgcccgccaccacgcccggcaaattttttttgtatttttagtagagacagggtttcaccgtgttaccaggatggtctcgatctcctgacctcgtgatccgcctgcctcggcctcccaaagtgctaggattacaggcgt

SEQ ID NO: 7653 - DNA, 296 bp, Homo sapiens
tttccttccttttttttttttttttttttttttgagacagagtcttgctctttcgcccaggctgggctgcagtggcgctgtcttggctcactgcaagctgcgcctcccgggttcacgccattctcctgcctcagcctcccgagtagctgggactacaggcgcccgctaccacgcccggctaattttttttgtatttttagtagagacggggtttcaccatgttagccagaatgatctcgatctcctgacctcgtgatccgcccgcctcagcctcccaaagtgctgggattacaggc

SEQ ID NO: 7654 - DNA, 281 bp, Homo sapiens
tttatttatttatttttgagatggagtcttgctctgtcgcccaggctggagtgcagtggcgcaatctcaactcactgcaagctccacctcccgggttcacgccattctcctgcctcagcctcctgagtagctgggactacaggcgcccccccccacaccctgctaattttttgtatttttagtagatacggggtttcactgtgttagccaggatggtctcgatctcctgacctcgtgatccacccgcctcggcctcccaaagtgctgggattacaggcgtg

SEQ ID NO: 7655 - DNA, 296 bp, Homo sapiens
cctttttttttttttttttgagatggagtctcgctctgttgcccaggctggagtgcagtggcgcaatctaggctcactgtaagctctgcctcccgggttcatgccattctcctgcctcagcctcccgagtagctgggactacaggcacccaccaccacacccagctaattttttgtatttttagtagagacggggtttcaccgtgttagccaggatggtcttgatctcctgacctcgtgatccgcctgccttggcctcccaaagtgctgggattacaggcatgagccaccgcaccc

SEQ ID NO: 7656 - DNA, 134 bp, Homo sapiens
cccgccaccacacccggctaattttttgtatttttagtagagatgggatttcaccgtgttagccaggatggtctcgatctcctgacctcgtgatccgcctgccttggcctcccaaagtgctgggattacaggcg

SEQ ID NO: 7657 - DNA, 254 bp, Homo sapiens
tttttttttttttgagacggagtctcgctctgtcgcccaggctggagtgcagtggcgcgatctgcaacctccgcctcccgggttcatgccattctcctgcctcagcctcccgagtagctgggactacgggcgcccgccaccacgcccggctaattttttgtatttttagcagagacggggtttcactgtgttagccaggatggtctcgacctcctgacctcgtgatctgcccgcctcggcctcccaaagtgctg

SEQ ID NO: 7658 - DNA, 240 bp, Homo sapiens
ttttttttttttttttgagatggagtctcgctctgtcacccgggctggagtgcagtgacacaatctcggctcactgcaagctccgcctcccaggttcacgccattctcctgcctcagcctcccaagtagctgggactacaggcgcccgccaccacgcctggctaatttttttgtatttttagtagagacggggtttcactgtgttagccaggctggtctcgatctccggacctcgtgatc

SEQ ID NO: 7659 - DNA, 236 bp, Homo sapiens
gtctcgctctgttgcccaggctggagtgcagtggtgcaatctcagctcactgcaagctccgcctcctgggttcatgccattcttctgcctcagcctcccgagtagctgggactacaggtgcccgccaccacacacggctaattttttgtatttttagtagagatggggtttcactgtgttagccaggatggtctcaatctcctgacctcgtgatctgcccgccttggcctcccaaa

SEQ ID NO: 7660 - DNA, 3905 bp, Homo sapiens
ggagacttgctctgtcgcccaggctggagtgcaatggtacaatctcggctcaccacaacctccgcctcctgggttctagcaattctcctgcctcagcctcccgagtagctgtgactacaggtgtgggccaccacgcccagctaattttttgtatttttagtagagatgaggtctcatcatgttggccaggctggtctcctgaccttgtaatccgcctgcctcagcctcccaaagtgttggaattacaggtgtgagccaccgcacccacctgataacttttcttgaaagccattccatcgtgttattactaaaagctgaaaccttagatagaatactttacattttctttttctcttcctactttgtcttctttagagaggaagccagtttagcagcaaaagcagtcacgttagaatcagaagacctgagctggagtttagctctgtcactcataagcgatgtggtctcagggggccctgcagccactctgagttttgcctctcacacgaggagggtgccgccttcatgatgttgtgtggagatgaaatgaaatgacatagatgaaagggcttagcacatagtgggggctttccataaatgccagcttcactgccactcaacgactccacgctgtcacacgtcacctctacactgcagctgctcccatctcttctctttggctccgccctctccctgagctctggtaccctgtctcccactgtcaactggacatctcccgccggcatctctaattagacacatgcaaactggacttaccatctcacccaaaaaccagtgtctgctctcaagtttcccaacttcatccttaacgtaaaatcactggcaatcccgtgcccccgtatttcttccccctttctgcccctacaacccatccaggccctcctcaagccaagagccttgcagatgcctacacgtcttaaacactccccaatccaccctgcttgcagtttgcaaattcatctttttccaaccagacttgtcacatcaaaccctgaacaaagatcttcaaacccttttttgccctgaagcctggtacataggatcgaagaagagcaaactccaccgggtgtggggatgacaggaggcccacacagcctcagtgtacaaagtgctgagcaatttcatatcactgccacatagaagaaaagctcttgggatgaatggatcataaaacacagtattgttaaaagcagctactgagaactggaaaatttttcaccaaatttctttgcatagtatttaacaactatcatctaaatctgccacaacccccactccaatgcgttaaactgtaacaatcattgacattaaaccactttacatgttgtataatcttaaactcattcaacaaatgctcaagcctttagtatttatgtcaacggcaaatctggtcaatcccagacttattcttaccattttgttcatccaattcattcccaatttcctgccccatttgtttttggcgacttatgatagaggaaagggcatcaaggcctgcgtcctgttctgaaagaaaaaagaaaaataattaactagaaactagaagaaaacaacttaaagtccataagtatacccaggcatataacacaagttgacatataaatcagtcaggaaaaaaaagagaaaagagttaacattattggaacaaaatttaaaaactaaacacctacctgacaccttaaactaaaacgatttccaaaagaattaagattttaaatatgaaaaacaaagtaagatttggaaacatgaacatttaaactttctgatacttaatatataaagagcatgtacaaatcaataagaaaaagactgaatatcccaattttttaaatcagcagaggatacaggcaagaacttcacaataaaaaagaaaataaagttttaacatcgctactaatttttttaaaaatacaaataaaaaactactttttttggcttatcagatgtataaggattaaaaagaatgacaatacctaaggttaattaaattgtgacgatctagaagctcccaagtactatgtaataggtgaataagttttactgacggccgtatttctcaagtgtagactgtgcccacctttttacctgccaattctaagtctaggaatgtatgtaagaaaatattcagatagcatgtaatgatggatatacaaggatattccctgaaacatttgtttcttgtgccagatatcaacttagtgcctctcagcaacaaattccctctttttggctgctctatgaagatgaaccagctgggcacagtggctcatgcctgttatcccagccactttgggaagccaaggcaggaggttcacttgaagccaggagttcaaaaccatcctgcatcaaaaagtaagatctcacctctagaaaattttctttaaaaaattagccaggcagccagtcgcggtggctcacgcctgtaatcccagcactttgagaggccaaggcgggtggatcacgaggtcaggagatcgagaccatcctggctaacaaagtgaaaccccgtctctactaaaaatacaaaaaaaaattagctgggcctggtggcagacacctgtaggcccagctactggggaggctgaggcaggagaatggtgtgaacccaggaagcggagattgcagtgagctgagattgcgccaatgcactccagcctgggtgacagagtgagactccgtctcaaaaaaaaaaaaaaaattagctaggcacgatggcatgtacctgtagtgtcagctacttgggaggctgaggtgagaggattggttgatcatccaggagttcgaggctgcagtgagccatgatcacgccactgcaccccagcctgggtgatagagagaggctctgtctctaaataaaaaataatttgaaaattttttaaaaaagaaaatgaaccaaggctgcttgaatactttttcctttgtcagagtttttgcttcctggctccagcctgcaatcttggcaggctccttcagcaactgcaactccttcagtgcctggccccttcagtgcacagtggccagcaatacccagaaccagcaacttctcccagcacaccccctcctcgggcaggtttataacaagagcgcctccagggaggttcttccccatgaagagtttcccccagcatcccagagggcagatctccaggaggttctgacagcagggcaccacgggggcttctgtgaaattcagggaccctcagctgagccttctcttagccctaggggcgtgggctcctccctggacattctgtctcagcctgagacttggtgattgcaccttatccctgctagttctgttttgagagttcttttgacctcttgttagctaatccctcgttactctaatccctgttaaaattaataatttacattcaactttccctgtcaaatttctctctcctgatcagacccatagtgatatacttataatagtgaaaaattagaaagtacctaaatgcccaaacacagagatgtttataaatttatagtatatccacatagtaaaacactgtatagccactgaaaatcatattgtttatctatattttgatgttgaaagaagttcatatgttttgtttttttttgttttgtttttttgttgttgttgttgtttttgagatggagtctcactctgtcgcccaggctggagtgcagtggcgcgatctcggctcactgcaagctccacctcccgggttcacgccattctcctgcctcagcctcccgagtagctgggactacaggcgcccgccaccacgcccggctaattttttgtgtttttaatagagacggggtttcaccgtgttagccaggatggtctcgagctcctgacctcgtgatccgcccgcctcggcctcccaaagtgctgggattacaggcgtgag

SEQ ID NO: 7661 - DNA, 275 bp, Homo sapiens
ttttttttttttttgagtcagagtcttgctctgtcacccaggctggagtgcagtggcacaatctgggctcactgcaagctccgcctcccagcttcacaccattctcctgcctcagcctcccgagtagctgggactacaggtgcccgccaccatgcccagctaattttttgtatttttagtagagacggggtttcaccatgttagccaggatgatctcgatctcctgacctcgtgatccacccgcctcagcctcccaaagtgctgggattacaggc

SEQ ID NO: 7662 - DNA, 264 bp, Homo sapiens
tatttttttgagacagagtctctctgtgtctcccaggctggagtgcggtggcgccatctcggctcactgcaagctctggctcccaggttcacgccattctcctgcctcagcctcctgagcagctgggactacaggtgcccaccaccacgcctggctagtttttttgtatttttagtagagacggggtttcactgtgttagccaggatggtctcgatctcctgacctcgtgatccgcccacctcggcctcccaaagtgctgggat

SEQ ID NO: 7663 - DNA, 163 bp, Homo sapiens
gggattactggcacatgccaccacgtccagctaatttttgtatttttagtagagacggggtttcaccgtgttagccaggatggtctcgatctcctgacctcgtgatccacccgcctcggcctcccaaagtgctgggattacaggcatgaaccaccatgcccgg

SEQ ID NO: 7664 - DNA, 261 bp, Homo sapiens
tctcgctctgtcgcccaggctggattgcattaacgcaatctcggctcactgcaagctccgcctcccaggttcacgccattctcccgcctcagcctccctagtagctgggaatacaggcgcccgccaccatgcccggctaattttttgtatttttagtagagacggggtttcactgtgttagccaggatggtctagatctcctgacctcatgatccgcccgcctcggcctcccaaagtgctgggattacaggcgtgaggcac

SEQ ID NO: 7665 - DNA, 282 bp, Homo sapiens
ttctttctttttttgagacggagtctcactctgtcacccaagctggagtgcagtggcacaatctcggctcactgcaagctccgcctcctgggttcacgccattctcctgcctcagcctcccgagtagctgggactacaggcacccaccaccacaccctgctaatttttttttgtatttttagtagagatggggtttcaccgtgttagccaggatggtctcgatctcctgacctcatgatccgcctgccttggcctcccaaagtgctgggattacaggtttaa

SEQ ID NO: 7666 - DNA, 297 bp, Homo sapiens
tttccatttcttttttttttttgagacagagtcttgctctgtcgcccaggctggagtgcagtggcccgatctcggctcactgcaagctccacctcccgggttcacaccattctcctgcctcggcctcccgagtagctgggactacaggcacccgccaccacgcccggctaattttttgtatttttagtagagacagggtttcaccgtgttagccaggatggtctcgatctcctgacctcatgatccgcccggcttggcctcccaaagtgctgggattacaggcgtgagccaccgcac

SEQ ID NO: 7667 - DNA, 277 bp, Homo sapiens
ttattctttttttttttttttttgagacaagtctcgctccatcacccaggctggagtgcagtggcgccatctcggctcactgcaagctccgcctcccaggttcacgccattctccttgcctcagcctccggagtagctgggactacaggtgcccgccactacgcccggctaatttttttgtatttttagtagagacggggtttcaccgtgttagccaggatggtctccatctcctgacctcgtgatccgcccgtctcggcctcccaaagtgacttat

SEQ ID NO: 7668 - DNA, 273 bp, Homo sapiens
  SITE (256): n equals a,t,g, or c
ctgccactttttttttttttttttgagacaagagtcttgctctgtcgcccaggctgaagtgcggtggcgcgatctccgctcactgcaagctccgcctcccgggctcacgccattctcctgcctcagcctcccgagtagctgggactacaggcgcccgccaccacgcccggctaatttttttgtatttttagtagagacggggtttcaccgtgtttgccaggatggtctcgatctcctgacctcgtgatccgcccgnctcggcctcccaaaaga

SEQ ID NO: 7669 - DNA, 279 bp, Homo sapiens
tcttttttttttttttttttttttttttttttgagacggagtctcgctctgtcgcccaggctggagtgcagtggcgcgatctcggctcactgcaagctccgcctcccgggttcacgccattctcctgcctcagcctcccgagtagctgggactacaggcgcccgctaccacgcccggctaattttttgtatttttagtagagacggggtttcaccgtgttagccagaatggtctcgatctcctgacctcgtgatccgcccgcctcggcctcccaaagtg

SEQ ID NO: 7670 - DNA, 292 bp, Homo sapiens
tttattttttgagatggagtctcactctgtcgcccaggttggagtgcagtggcgcaatctcggctcactgcaagttccgcctcttgggttcacaccattctcctgcctcagcctcccgagtagctgagactagaggcgcctgccaccacgcctggctaattttttgtatttttagtagagatggggtttcactgtgttagccaagatggtcttgatctcctgacctcgtgatccgcccgcctcggcctcccaaagtgctgggattacaggcgtgagccaccgtgcccggcct

SEQ ID NO: 7671 - DNA, 320 bp, Homo sapiens
gacttcgttttcttttcttttcttttcttttttcttttttttttttgagacggagtcttgctctgttgcccaggctggagtgcagtggtgcaatctcggctcactgcaagctctgcctcccgggttcacgccattctcctgtctcagcctcctgagtagctgggactacaggtgcccgccaccacgcccggctaatttttttgtatttttagtagagacggggtttcaccgtgttagccaggatggtctcaatctcctgacctcgtgatccgcccgcctcggcctcccaaagtgctgggattacaggcgtgagccaccat

SEQ ID NO: 7672 - DNA, 274 bp, Homo sapiens
ttttttttgtttgagacggagtctcgctctgtcacccaggctggaatgcagtggaccgatctcggctcactgcaagctctgcctcccaggttcacgccattcttctgcctcagcctcccgagtagctgggactacgggcgaccgccaccacgcccggctaattttttgtatttttagtagagaaagggtttcaccgtgttagccaggatggtctcgatctcctgacctcgtgatccgcctgcctcggcctcccaaagtgtgggattacaggcat

SEQ ID NO: 7673 - DNA, 300 bp, Homo sapiens
ttaatttttttttttttttttttttttttttttgagacggagtctcgctctgtcgcccaggctggagtgcagtggcgcgatctcggctcactgcaagctccgcctcccgggttcacgccattctcctgcctcagcctcccgagtagctgggactacaggcgcccgctaccacgcccggctaattttttgtatttttagtagagatggggtttcaccgtgttagccaggatggtctcgatctcctgacctcgtgatccgcccgcctcggcctcccaaagtgctgggattacaggcgtgagc

SEQ ID NO: 7674 - DNA, 287 bp, Homo sapiens
ttttttttttttttttttttttttgagatgaagtctcgctctgtcgcccaggctggagtgcagtggcgcaatctcggctcactgcaagctccgcctcccgggttcacgccattctcctgcctcagcctccggagtacccccgattacaggcgcccgctaccacgcccggctaattttttgtatttttagtagagacggggtttcaccgtgttagccaggatggtcttgatctcctgacctcgtgatccgcccacctcggcctcccaaagtgctgggattacaggcgt

SEQ ID NO: 7675 - DNA, 322 bp, Homo sapiens; identical to SEQ ID NO: 5644

SEQ ID NO: 7676 - DNA, 140 bp, Homo sapiens
ccgccacaacgcccagctaattttttgtatttttagtagagatggggtttcaccgtgttagccaggatagtctcaatctcctgaccttgtgatccgcctgcctcagcctcccaaagtgctgggattacaggcgtgagcca

SEQ ID NO: 7677 - DNA, 4727 bp, Homo sapiens
tggagtcttgctctgtcgcccaggctggagtgcagtggcatgatctcgactcaccgcaacctccacctcccgggttcaagcaattctcctgcctcagactcctgagtagctgggattacaggggcgtgccaccatgcctggctaatttttgtatttttagtagagaccgagtttcaccgtgttggccgggttggtctcaaattcctgactttgtgatccacccgcctcggcctcccaaagttctgggattgcgggtgtgaaccaccacgcccagcctcattttcccttctgatggtcaggccttctgttagttgccactccctgaagtgtgctttttaaagggattcctccatgattcctgacaatactggcaacaagatgcttttacaatgtaactttctggtgtgcctccccatgggtggcccagtgcaggccggtgctcatggtggatggtgcttgctctccaggaacatgctggattatgctaataaactactcctttcttgacaaagaacatgtatttcttcctcatttccatcttcctctttctactctctattcagactaccaggtgaacctgtttggaaaatggtatatttcagtcaagtttgttgaaaatagtctcaagattttcagctttccatttgccatcatcatgatacttaacctgttatttatttatttacttatttatttatttttttgagccagagtctctctctgtcgcctaggctggagtgcagtggcacgatcttggctcattgcaacctccacctcctgggtttaagcgattctcctgcctcagcctcccaagtagctgggattaaaggcgctccccaccacgcctggctaatttttgtattttaatagagatggagtttcaccaccttggcaaggctgttcttgaactcctgacctcaagtgatccacctgcctcagcctcccaaagtgctgggattacaggcatgagccactgcgcccagccttaacttgttttagataaattattggtttcatttttcaaacagaaaatgaaacttcaacaagctaaagaatagtgcatgacttgtaccattgacagtggttccatggctgcctccaacaacctcccaggccccttcctgagccatcacaggcatctgaaggcaccgtctttaccccttggtcgcaagagcaaaatagagtggatgcagcctctgtattcatgtggctgaataggaaagtgaaaacaaattccagggactgaaatggaattgcttgtaggaacaatttgatcaatttattttagcgtagtgattctcacctatgacctatcatccaaatgggtatcctgtgacttcctttgttgttgaataatggttttgagggttccgtttcaattggcaacatagcagttccagaatgtttgcaatcaaaatggccaatttccattcaaatgtcaattactatgggtgaggaaatcagcattacatcacagatgtgtgagcacctacacaaagcctgcaaatgctggacagggaacctcgtgcaaataatatggcagtattggcaggaatgatggaggaatccctttaaaatgtacacttcaggcagcagcagctaacagaaggcctgaccatcagaagggaaaatgcacatgcagatgaatgtgtggcagcactgggatcctccagatatccagttgattatgagaactatgactatctgcatagtcagagtcattctttggaatcagacagatgtgtatgggctggagtatgtacatattagggccataacaatgtaagtgcccgtcgagttcttgactgctgcctagatagagctgatttattgagatacagaaattgcagtagagaaagaatttaatgcacacagagcctgctagacaggagacaggagttttattatttcctcaaatcagcctccccccacaattaaaaaattagaaggctggggttttttttagagatagtttggtgggcaaggggctggggaatgctgactagtcaagtcggggatgaaatcatagggaccaaaactgtcttcttgtttttcattcctgagtgggatcacataaatagttaaaccagtttactggtctgggtggcaccagctggtccatcacaatgcacagtctgaaaaataccacaaacatcagttttaggtgttacagtggtactagttatccgtaggagcaattggccaagtttggaaccttgtggcctctggctgcatgactccctagccataaattctaatcttgtggctactttgttagtttaacgaaggcagtctggtctccaagtaagaacggggtttgttttggggaggggctgttatcttcttcgttttaaagttgaactataagctgaattcctcccaaagttagttaggctgggcccaagaatgaaccaagggcaacttagagcttagaaacaaaatggagtcagttaggtcagatttctttcactgtcataattttcctaggtcagacttttctgtcataatttttgcaaaagtggtttcattaagtgaataaaaccctttgaaattcagttacctatgaactggagatgatacttctgcttctcatgtttgctgtgagaattcaacaaggccacatatataaagcacctaacacagggtctgagacataccatgcattcccttttctggtcttcagctcactgtgtttagaaaataaatacagttttacctacacttgagcatattgggtggctaacttgtcacctaacatccatccgtagatttagaccgtacaggtctctgttactaaactagggcaagtgagtattcatgtgttaatgtttcattgtcggaataactttggattgcatttggcaattaggattcaagtcagagaattatcaaccattgatcaccagttttctctgaaatagtctgaaaactggtgacgagaagccactcaccatttgctactaacagctcaaaggtgaagaatattccattaaataaagcactaaagaagataagcctctcctcaggcgacaaagggccaaccccaaatgaagtccatgctgcgggtcttaaggtcatctgctcataagaaactggtcacttctggtgtgagttaagatgaatggagagagaattggttcccagagaccacagtgaaaaaggttaagaacataataaagaccgtaagttccccaaatagtgaattgtgtttctcttcttcctaaatacagaaaggaagggtgctacttttcactctgagacagatggagctactaggtaaagcatcattattgctgtttcagtctctatttgaaacatcatttcctgggacttagatcaacaaggatctcaaaactcagacaagaattttttattttaatcctgtgttttaggacagggtccccaacctttttggcaccaggcatctgtttcgtggaagacacttttttccacagatgggcgattgggggaggggtatggtttggggatgaaactattccacctcagatcatcaggcattcgactctcataaggagtgtgcaacctagatccctcacatgtgcagttcacaataggatttgtgctcctatgagaatctaatgctgccactgatctaacagggggccaagctcaggcagtcaggttcactcacctgcagctctcctgctgctgtgtggcccagttcctaacaggccacggactggtcccagaccacagcccagggattgaagactcctgttctaggataggcaaagtaaaatgaacaaatgttagccatgtgtaaggtacttaaggaaaaatcgtaagtttgcagcaaacaaatcatgcccctcaggttgtctgagagactctgattttatgtgtcacctaatccttattggcaacatttgctatttatgaagtttaggaaggatgaactgagtttgccttgcactgagtcactagacagtttatctttccggagctggagggaaatgagagacgacaactggctcccttttttacaagtgtggaggctgaagcccaggcaggtgagttctgctgagagtgacaaagctcagctcgggactgtcacctgtaccacgcggcctgacagaggaggcaagctctatctgaccactgtgaaaatatgcatctgtatctgacggctgttaaaacgtgcacatcccaaagtaacgaagagatgagaggcaaataacagaaaggaaaactaacttgccaaaatacgttagtcagaggtttaataaccataatataaaaagaatgctatgataagaataaatccaaccctcaaaaaaacaatgatgcagattacttgtgcttggaaataaaaaatgtaaatgaaaacaataatgagctttctctttggtctgtctaatgagctgattagcaggtgcctgagttgtgaggccattcaggtatacaggcaccaacaggtacaagtacacaggtatgcagaaaccgagggttttttttttttttttgagacagagtctcgctgtgtcacccaggctggagtgcagtggcacgatcttggctgactgcaaactccacctcctggattcaggccattctcctgcctcagcctcccgagtagcctggactacaggcgcccgccaccacgcctggctaattttttgtatttttagtagagacagggtttcaccgtgttagccaggatggtctcgatctcctgacctcgtgatccgcctgccttggcctcccaa

SEQ ID NO: 7678 - DNA, 270 bp, Homo sapiens
gactttgtgtttttgtttttgttttttcgaggcggagtctcgctctgtcgcccaggctggagtgcaggggcgcgatctcggctcactgcaagctccgcctcccgggttcacgccattctcctgcctcagtctcccgagtagctgggactacaggcgcccgccaccacgcccggctaattttttgtatttttagtagagacggggtttcaccgtgttagccaggatggtctcgatctcctgacctcgtgatccacctgcctcggcctccca

SEQ ID NO: 7679 - DNA, 301 bp, Homo sapiens
tcttttttttttttttttgagacagagtcttgctctgttgcccaggctggagtgcagtggcacaatctcggctcactgcaagctccgcctcctgggttcatgccattctcctgcctcagcctcccgagtagctgggactacaggcacccgccaacacgcccggctaattttttttgtatttttagtagagacggggtttcaccgtgttagccaggatggtctcgatctcctgacctcgtgatccgcctgcctcggcctcccaaactgctgggattacaggcgtaagccaccgtgcctggcc

SEQ ID NO: 7680 - DNA, 301 bp, Homo sapiens
gatttttttttttttttttttttttttgagacagagtctcgctctgttgcccaggctggagtggagtggtgcgatctcagctcgctgcaagctccgcctcctgggttcacgccattctcgtgcctcagcctccagagtaactgggaccacaggcgcccgccacgacgcccagctaattttttgtatttttagtagagacggggtttcaccgtgttagccaggatggtctcgatctcctgaccttgtgatccgcccgcctcggcctcccaaagtgctgggattacaggcgtgagccaccggg

SEQ ID NO: 7681 - DNA, 307 bp, Homo sapiens; identical to SEQ ID NO: 5645

SEQ ID NO: 7682 - DNA, 263 bp, Homo sapiens
tttgttttttgagacagagtctcactctatcgcccaggctggagtgcagtggcgcggtctcagctcactgcaagctctacctcccgggttcacgccattctcctgcctcagcctcccgagtagctgggactacaggcgcccaccaccacgcccagctgatttttttgtatttttagtagaagtggggtttcaccatgttagccaggatggtctcgatctcctgacctcgtgatccgcctgccttggcctcccaaagtgctggg

SEQ ID NO: 7683 - DNA, 5775 bp, Homo sapiens
gccacgcgatccactgggcttctgggcacagaagtgcctcaacaggcacaggcaggctccccacagccacaaggaaccctgctgccaaggaagcagctcctgttggggtcatcagatttttaatctggctcagcaaagccatggctgtccagccttaaaaaaatgggtgatgtgggagaaatggagggtgtgtgaagagcacagctgggcctcgagaactcagggccagccttcccagcttgggtcctgtttcggagcccaggccttgcttccccttagccgccccagccagattcttttgcgccccctgctggcacacacaaagacagacccaggagcgcacatgtgaacgtgcgcatgcttgctgccagttacccagttcatgaacacgtgaagccttgacttcaggttaagtaataaaaatttattgagaattcctgggttggtgtttatctcctcccagccttgagggagggaacaacactgtaggaaatcactgagaaatcacgcactgtccccaacagccccagttaacacagggaggaggaaagtaattccccagaaaaggggctagtcttcagtcttccttaatccaagaggggttcagggaaccggtgtgggggaccatcgcatgatactggggcggggtagggctgtgctggacccctggctggctcctcaaaaactggagaagcagatccacttcctctgggggtggagttcttggtgactaggctcatttcttacccttgatgaggctgtcactgtaggaaaaaaaagatagataatgacattattaggggacataaatgtgagaggcaggacactctaggccattccctctacgaccctcctaccctgattgagggtttgtcttcggggaggtgggaaagggggtagggtaggaggcgggtactggagaaggtggcctgcaggaccccacagaagcaacaacagcttaccttcccctgtggtgccagatcgccagatgaacaagaaacagagaagagaaatgcacatgttaattgacagcttcaggccccactcagctttgaaccctcctttgctcccaagagaaaagataaacagggttgacagccaggaatctcaggctcatgaaaggaggaggcatgttctcatggccactgctatttctcatctcctttcctaacatccctccattcaccagaggagtttgagggctcttgagtaagaaaactgagtatcatctttcatcactttttggttagatgaaaactttataattaaagtgctttttatgtgaataatcctatttgatctcataaaatcaatcctatgagatgcaagatagaaactgtcaaccacccccttttctaattttggttcaatgtctctgagccatatgaatagctgtagcaggctccagagcccaaacaaccagactcaggtcccacgttcttggtgataccccacagtgtggccacatctctcacctggtgaaactttcatcctgtaggttcagcacaaggttgtcagctgtgagatagatacgattctgtgatgtggcgatctacagggcaggaaataagacagatgcttgcattaagcaaagacctcaattccgacccctgcaattcagcagctacttaacatggaacacatgcagattagggcaggggtgcagcaatgagtaacacatggtttctgctcgcacttagggatccagagcgctgagcagcagctatgattagaacaaaaggtcagggaacccagaggaatcattcttgacaggaggagtatcggagaagccaattttttatttatttatttttgagacggagtcttgctctgttgctcaggctggagtgcagtggcatgatctcagctcactgcaacttccgcctcctgggttcaagtgattctcctgcctcagcctcctgcgtagctgggaatatagctaaacgccaccacagcgggctcattatcttttgtatttttagtagagatggggtttcaccatgttggccaggctggtctcgaactcctgacctcaggtgatccacccaccttggcctcccaaagtgcggggattacatgcgtgagccaccgcgccggccagagaagccaatctgagtagaaaccggaacaagcaaggttcgaattccctcacctcaatgtgccttaactgaaagcactttctcaaggcagccccatcagagacgctgggctgacacactcaccgtcttggagatattctgggctgctcgaatcttgcgaagtttgatgtagccagggttcttgctcagtgcttctccaaggtgaggagggttaaggtacacgcaagggcaggtctcaatccctggccctgtccttaccacactcccttgctccagtcctcctctgggctgtcagatccaaggttgcgctcaggtggcttgtgcccagccctaccgtggaccccacctgtgggcctccctgcaggctgctgccaggaactaggggcagcaccagaaatgaaggcaaggccaccaatgctattgatctggccttacagtggggagtcatggctcaggtactaccactaagatttcagatctcatctgtagtccccacccccaacaaggagccaagggccagagagcacggagtcgcattcgccttagtctcatcagcctgcccatgaaggagaatggggaactcaggtgccctaggggctgggctgagatctctccagcagaaggatatcatcttggcagcctcggcctcaccctcggcctgcacaattttctgccgctgttcctgctttgctttttctaccaagaattgggcccgctgggcctcctgctgggctgtggtgggagagagtcagggagaccctgtcctgggtcaggagccccacccatggagtctttcctcctcctgcatctcagaagccctcaccccacggctcttgcgactcacccacttgtttggcttctacagcagctgtgtactctcggctaaagctcagctctgtgatggccacatcatccaggatgaggctgaagtccttggccctctctgtcagctcccggcggatcaacagggatacctgagggcaggggtgaagaggggaagggaggggtggtttgaggggactggggagctgaaaggaaggttgcgacccctaacccttcactctcaatacaacatgcactgccttagcttcctgtcaggcaaacctgtaacataagcctctctgctcgaagaggtgcaggaaaagccaagacttggccattttcctctgtgcttcctaacaccgagtgctatcgagttctaatgctggctctccttatttcacagtggcaattagcacagcttttaggtggaaatggcactagggtgacaatgcttttctaataagctgcctttcctaattcccaatactctgggcctaggaaggaaaggctgacaccacgcagatggtggtgggagtcagacctgggcccgctgggtgatcagctgtgaggcattgaacttggccaccacactcttgagcacctcgttgacaatggacggcaacactcgttcctcgtagtccagccctaggcgctggtacatgctaggaagctcctgagcattgggtcgagacaacactcgcagggagatattcaccatctgtaggtctgagattgaggtcagcagtggctggtcaaggccaaacaccctttcccaagcattttctccttcatgttcctccctgtatgccctgtgcaatggtgtacagcctggcactaccctggggggaggagagttaatcaggctgacaaggaagacaagacgcagcacagctgaaatgcaccctcacccactgtgaagccttgaactgcaaaccccgtcaccagcagagctgactactctttccccctctgtactctgtgcaacctctaacgtgggcgctttcgtgctgtaccgtaatcatgtctcctgtaaggacttgggggacaagaattgtgtttaatgaatcttttattcccagggcccagtctagtaaatgaataagcgacctgcactaggtatagcacaaagaagtacattacaggttacaggtgagctacctgacccagggtgtatatgtgtgcgtgggtggggaggaggaagaggtctggggaactcaaaggcacggcttttatgtatggtctagaaggagagaacaggtgaactagtcaagcttagggacaaacttctccagaacagagtgtactagtggatgtaactgtagatatagtaagtcaagcagttagaaaaaaaaggctttaaaacaaagctttgatctaggcagtgaacaagacgagggacaaacaatactcttattgaatacacgtcagggaggagacagtaaaaagcacgcaaacacagtgtgttcagaatttgctgctttgaccccaggaggcaggtatttttgttacagctcttgcagatgtggaaagaggcctaaaggcctgacactaccatattcccctggggtttcttgccagctaccttgatcatcccacctgccatgtgattaccaagtgctcagacctacctttggagcctgtaggggaggagatttttcgaggtctggcccgaatgtcatagataatggggtactggaaccaagggatcctggagaggacagggataggtattaagaggccacagtttcggccgggcgcggtggctcacgcctgtaatcccagcactttgggaggccgaggcgggcggatcatttgaggtcaggagttcgagaccagcttgatctacatagtgaaaccccgtctctactaaaatacaaaaattagccgggcgtggtggcgggcgcctgtaatcccagctactcgtgaggctgaggcaggagaatcgcttgaaatcaggaggcggaggttgcagtgagccgagatcgcgccactgcactccagcctgggcgacagagcaagactccctctccaaaaaaaaaaaaagaaaaggccgcagtttcactagccttgcccggtttcccctcaccacgcgttttttggcctgctcctctccacgaccacagacaaggagagattctcttgtccctctggaaaacaacagtttgtatgctgctggaggttctcgcagcacccactatcctaggggcagggatgaggagggtgggaaaagagcagcgttgaatcctgttgcacgtccgactatagccactgctgggtcggcgtcaagggtgaaaggtcagggtcagcaggctctgcccgccattacctgaagtgaaggccctcggccaggatagtgtcctgctgcactccaccgatccgattgaagaagatggctctgtgcccgccttccactgtggggagatgggtggtgatcaggccaggccgctgctcagaggaaatgctaggcccgtggaggggcgcggggacagggcaaggggtttgggggagggactggaagcgtccggcgagcaggcggaggttgctcaccggtgaacacagattcgcgcacaccgtaggccacggcgccggcccccagcaacagcttcagggccgtgcccatgccccggggcccggcgggcagccgtcccgccaagtccttcaagttctgggccatgtctgatcttgaggccggcggcactggaggtcagaagggggtgccggcccgcctctaccccgctccggcttaggtactgcacccttcacacgagggttcgggcccgtaaggctggcgaaagaaagggcagcggaagtgcgctccctttgaaaccctcccccttagcccactacggacccg

SEQ ID NO: 7684 - DNA, 738 bp, Homo sapiens
ccaaataccattattgattgattgattgactgactgagacaaggcctcactcctgttgcccaggctggtgcagtgatgtgatcatggctcactgcagccttgacttctggggctctggtgcatcctctcacttcagtcccctgagtagctgggactacagacacatgctaccatgcccagctaatgcaaatatcatttttaaaaggcgactgaactggacgcctcatatgagctcccatggctgcccagacatgctttcatgtcagtgattatataattttttttgtaaattagcttatgcaaataatcttgtggaccctaacttatacatgcttctgcaaagaaacatgtttaacgataaagttatactggaattcaaaacatgatgttttatggaatgtaagacattggggtatagataaaaagtggttggaaaaaatatatatatttatttttagagatgaggtctccttctgtcatctaggttggaatgcagtggcatcatcatagttcactgcagtctcaaattcctgggctcaaatgatcctcccaccttggtctcctgaatagctgggactacaggtgcatgccatcatgcctggctaattaaaaacaaaatttatttatttatttttgagacagaatcttgctcttttgcccatgctggagtgtagaggtatgatcttggctcaatgcagcctcaacgtcctgagttgagcggaggaccccgggctccag

SEQ ID NO: 7685 - DNA, 663 bp, Homo sapiens
tttttaattatactttaagttctagggtacatgtgcacaacgtgcaggtttgttacatatgtatacatgtgccatgttggtgtgcttcacccattaactcgtcatttagcattaggtatatctcctaatgctatccctccccactacccccaccccacgacaggccccggtgtgtgatgttccccttcctgtgtccatgtgttctcattgttcaattctcacctatgagtgagaacatgcggtgtttggttttctgaccttgtgatagtttgctcagaatgatggtttccagcttcatccatgtacctacaaaggacatgaactcatccttttttatggctgcatagtattccatgttgtatatgtgccacattttcttaatccagtctgtcactgatggacatttgggttggttccaagtctttgctattgtgaagagtggcacaatgaacatacgtgtgcatatgtctttatagcagcatgatttatattcctttgggtatatatccagtaatgggatggctgggtcaaatggtatttctagttctagatccttgaggaatcaccacactgtcttccacaatggttgaactagtttacagtcccaccaacagtgtaaaagtgttcctatttctccacatcctctccagcacctgttgtttc

SEQ ID NO: 7686 - DNA, 219 bp, Homo sapiens
ttttttttttgagacggagtctcgctctgtcgcccaggctggagtgcagtggcgcgatctcggctcactgcaagctccgcctcccgggttcacgccattctcctgcctcagcctcccgagtagctgggactacaggcgcccgccactacgcccggctaatttttgtatttttagtagagacggggtttcaccgtgttagccgggatggtctcgatctcc

SEQ ID NO: 7687 - DNA, 1641 bp, Homo sapiens
tttcctgtaaatattgcatagactttagtccagattttagtacgttatcttgtgtaataaatttctaccttttataaattaacttttggtatttagaaatatatattttggcgtgaagtctattctatgatatttcctagcttactatcttcctcatggagaaatagaaaacacaaataatccttagttgaaatataaacattttagttttagtgaagtgtaccattaccaacttgtaatggtgttacaagtcatcattctgtatacactagcgtgacccaaaatgctccacagtctaggtaaactacaggaagtaagcttaaggttatttaacttccaaaccccagatctctgctctgatggtcacttgaaattctacaatttcaaacacctctgaagacattcagttaaggcctctggcctctagatggccctctatcttttgggaatgccttaaagtccatttcatgagggaaagttgaagccagtgatctttctgggatagcacaagttaccctgtatctttgctcaaggaattctttctgtaggcttcctagaggataccagaattaaatttttctcccctttgaagagtctctccaaagcaaggagtaatacctgtattacttttgcccacccatgaagggcacttgattttatttcaagccctggcttttagacgtaccttagcattttgtgagttgtaattaaaatcccaacctcttcctaggaatacaaccataatctcctaaactctgtcctcacctccaacacagtccttttggctttcaagaactatccacaatcaggctcagatgtgcttttcctttgttatgtaatcagatgaatctgaaagtggaaagttacatgtattaaagtgaggagatgggtagaggaaggtggaaatgaagaaaaagaacaaatctgaaaggaatcagagaaactgtattctgatactattgtttagatttctaaaggaaatggaaagatgtttggcaatgagagaagtcagttatgatttttagaagatggttgttttcttcagcatttaaaactgtttttgctttgatataattttgaagacgattataaagcttgggaccttcgtaaaagtgaactttataagccagaacgaacttaccacccccctactgtgaaatttggaaattcaactacattccaggatgactttgttcctcaggagataaagcctaggcaaagctttaaacccttctctgtggtcaaacgttctacagccccttttaatggtattacaagtaatcgccttgattatatacctcatcagcttgaactcaagtttgaaaggccaaaagaagtttacaaaccaactgaccaacgctttgaggatttcacaactcaccggtatgacttttggggtcttatttggtgaaactgcaaaactctgcagacctgtacacaccagagtgacccagaatgctcggtttgaaggaagcactgaattccgtgaaagttttcaaccatgggaaatcccacgaccggaggtcaagaaagtaccagagtatgtgcctcctacaggtagcatgctgttaaacagcacaagccatcttgactatgttccgtatcaggccaaccgtgttgttcccatcaggccagtttctc

SEQ ID NO: 7688 - DNA, 1600 bp, Homo sapiens
tgttctatgagcctcttgtctgcctcatttttaaagtgtctttatcataaatcgttatttttaacaaatatgtttctgaatcgattgaaactattatatgggttttggcttataattattaatacggtgaattatacaaggcaaccaactaggagttaggatctgcttcacagctgtttacccaggtaaattatctcagggccaagcatagtttggaatcactaggcttaactctccaggtttcccttgtctcccaaagatttctcagcctgcggcaagttttttgatacatctatgatttttaaaaatattgtatcttctttattctcagcagcagggtaggtaggagttacctagtccattgttatcaaatggaactgataacagttccattgataacacaaggcccacaaatcaaaagatataaagagttatatagtgagaagctctttataccttttgatttgtgggccttgtgaatgcctcacttatataaaaataaagataatgtgaaaccatttgaaaactggaatgaaatgaatatattcctagaacaatataaatgataaggattgagtcataaagcaaattaaaaaaaaaaaaaaaatgagactgaaagaaggtgaattggtaaccaaaagccttctcccaaaagacaccaggcacagatggttttacacaaaagcttcatttcagagaatagaaaaatatacaaattatttcggagaatataaaaagaaaaaaaatccaatttattttacaaaatgtattagttaggttttgcttcactcatgtcatgtaacaaataatgccaaatctcagtaacttacaacacttctcactccattgtctgtggatctctgtaaccatgtagttatatcaatcaatatagaaaatgtacttaataaaattgaacactcactcatgttaaacaaaacagacctcatatccaactggtactagaaggtaacatgaaaagagacatctttctaaaacctatagcaatcattatggttaatattgaagtatgagagattttccattaaaaccaggatcaaatcaagaatgtccataataatggtttctattcaaattgtcctggttgtgtccttcccagggtaggttgggaggtaggaagatgaagaattctttgatgacattaattttccccattaagcatgaggcaatgttatcagctgaacatgggtgggaagctgtcagaggtttggtaagaagggaaggtattgactaagcatcttgtagagtgggagagcaaacttattcgggaaccatccaaggattgtgagaaaaagttaaatgtccactgtgtttggtgatcatgaatggaagaggaaacctataagagtttatgactttcggctgggcgtggtggctcacgcctgtaatcccaggacttcgggaggccaaggtgagtggatcacgaggccaggaattcaagataagcctgaccaacaaggtgaaacctgtctgtactaaaaatacaaacattagccgagtatggtggcacgtgcctgtagtcccagctactcgagaggctgaggcagaagaattgcttgaacccaggaggcggaggttgcag

SEQ ID NO: 7689 - DNA, 1601 bp, Homo sapiens
tgttctatgagcctcttgtctgcctcatttttaaagtgtctttatcataaatcgttatttttaacaaatatgtttctgaatcgattgaaactattatatgggttttggcttataattattaatacggtgaattatacaaggcaaccaactaggagttaggatctgcttcacagctgtttacccaggtaaattatcacagggccaagcatagtttggaatcactaggcttaactctccaggtttcccttgtctcccaaagatttctcagcctgcggcaagttttttgatacatctatgatttttaaaaatattgtatcttctttattctcagcagcagggtaggtaggagttacctagtccattgttatcaaatggaactgataacagttccattgataacacaaggcccacaaatcaaaagatataaagagttatatagtgagaagctctttataccttttgatttgtgggccttgtgaatgcctcacttatataaaaataaagataatgtgaaaccatttgaaaactggaatgaaatgaatatattcctagaacaatataaatgataaggattgagtcataaagcaaattaaaaaaaaaaaaaacaatgagactgaaagaaggtgaattggtaaccaaaagccttctcccaaaagacaccaggcacagatggttttacacaaaagcttcatttcagagaatagaaaaatatacaaattatttcggagaatataaaaagaaaaaaaatccaatttattttacaaaatgtattagttaggttttgcttcactcatgtcatgtaacaaataatgccaaatctcagtaacttacaacacttctcactccattgtctgtggatctctgtaaccatgtagttatatcaatcaatatagaaaatgtacttaataaaattgaacactcactcatgttaaacaaaacagacctcatatccaactggtactagaaggtaacatgaaaagagacatctttctaaaacctatagcaatcattatagttaatattgaagtatgagagattttccattaaaaccaggatcaaatcaagaatgtccataataatggtttctattcaaattgtcctggttgtgtccttcccagggtaggttgggaggtaggaagatgaagaattctttgatgacattaattttccccattaagcatgaggcaatgttatcagctgaacatgggtgggaagctgtcagaggtttggtaagaagggaaggtattgactaagcatcttgtagagtgggagagcaaacttattcgggaaccatccaaggattgtgagaaaaagttaaatgtccactgtgtttggtgatcatgaatggaagaggaaacctataagagtttatgacttttggctgggcgtggtggctcacgcctgtaatcccaggacttcgggaggccaaggtgagtggatcacgaggccaggaattcaagataagcctgaccaacaaggtgaaacctgtctgtactaaaaatacaaacattagccgagtatggtggcacgtgcctgtagtcccagctattcgagaggctgaggcagaagaattgcttgaacccaggaggcggaggttgcag

SEQ ID NO: 7690 - DNA, 115 bp, Homo sapiens
ttttttttttttttttttgagacggagtctcgctctgtcgcccaggtgggactgcggactgcagtggcgcaatctcggctcactgcaagctccgcttcccgggttcacgccattc

SEQ ID NO: 7691 - DNA, 1437 bp, Homo sapiens
cactattagattcatcatgaatgatctaaaggggttaggataggataggactactaagtagtggattcagagaaacaggtttcacttcaacatctgatggacctttctcacagtaagagtcctccaaagaaggggttggctgcccttaagtgttccccatcattggaaaattcaaacatggcttggctagctgcttggtaaggatgttgcagaaggaagtcaggcagcagattttgattgtcttgatgacttttaaggccacttacattagggagtctttattttctacctttttcaggcagaatctcctcttgagtttacacaatatttatcaagtcttctctggaatggaaggagagaagtcaaagttaaccctgttaaacatattctagacaatcattttactttcttggaaggatttttaggacagagagattcttcccatcttgtgcttgttctaactacattaactattagtactgcattgatggctgacttactgggaagactgcttggaaaaatacaagaagccattgtgggaaagtgtattctccaaaagaattccaaatgaatgaagttgtttggattttgtctgagtgcaggtttatacacacatgcatttatgtatttcctgaatctttttgggatataagtttttccagagaaagctttgctctgtgcataagcagaagagaagaacatgaggaaagcacaagagtgtagggacaagaacctggccatactcaaaaggaactgaaggaagtccacatgactgggcaggaaatggggctgacactgctgttatttggcgtctttctttcctaattgggcagcatagaagagagagagcagcagtcagactctggggggtgggggggggggtcaacactgacccctctgacatcatctggtgggctgggaataatttctgaaatagtgtaaccaaacatgtgcagacaattatgtctgatgacataagcccaccacaaaaactgggcctgaaaatgccacttgaaagagtctctcactttgcattaatttttttttccatgaactgtggttattttatttctgggtctttaatatgcagggtaaatgaatcaaaggctgatcgtgatatgttcttttgatatcagttttaaattgtgccacctgcaggaggctaagcttgttatagtgagatgtatttttagatggtggtattcgatgctaagacatgtgtgtatagagcaggacaatgactgccagcaggagagagagaggaggggagacaagaagagacaaggacaggaatgaaagctttgagccaagaaatgaaaataaacagttcctaaccccaaagctgcagtggaattcccagctgggctctggattgtgtttgattcggtggaggacattttctgggcagcgtttatctgctcccctggctgggctttc

SEQ ID NO: 7692 - DNA, 1732 bp, Homo sapiens
gtggtggtgggtgcctgtaatcccagctactcaggaggctgaggcaggagaattgcctgaacccagaaggtagaggttgcagcgagccgagaatgcactactgcactccagcctgggtgacagagtgagactccatctcaaaaaacaaaaaacaaaaaacaaaaaaaaacccaactttttatgattttagtcttttacaatttattgagacctgtcttttggcctaacatgtggcctactgtggagaatgtttcatgtacacttgagaagaatgtgtatttccactgttgtcaggtggatgcttctgtacgtgtccgtccaaaccccatgtttattaatcttctgtgtagacgtcctgcttactattgaaagtggttcattccagcctccagctatgattagagctaccccttactttctccaattccatcaatggttgcttcacatattttgggactctgtttttgattttggtacatatatatttaaaatcattgtatctccttgttgaattgacccttctgtcaatatataaatagcctctgtccttcattttcttaattattgtcttttttgtggatttttttggagttaactgttttgatttcccttttatttcctgttgcgtatatattttaaaatactttctttgaagataaatttataatattaggattaaacatagaaccctagatttataacagctcccttcctcccttgctgtcgcaggtttcatctttttttttttttttttttgagatggagacttgccctgtagcccaggctggtatacagtggttcaaatgattctcctgcctcagcctcccaagtagctgggattacaggcaaccaacaccacacctggctaatttttgtgtttttagtaaagatgggttttcaccatgttggctaggctggtcttgaactcctgacctcaagaaatctgcccgccttggcctcccaaagtgctgggattacaggcgtcagccacggcgcccggcctgtcacaggtttcacctttacacattgagtgcacggtaacatagacgtacacttatcttttatgcattcatcttttaatttctgtagcaacaaaggtggagttacaaaccaaatacataatcttgttggttttcctggtcgtccctgtattcaccatcgctgaagacctttcacttcatatagctttgagctaatgccgctgtccttttatgtcaatctgcaaggttccctttcgcattcttgtagagcaagtctcaagttccgtttatctgggaatgtcttacttcctccttcattgtgaaggatagttttactgactataaacttcttaaaatttttttttctttaggaactttatcatcccattctcttttgtcttccatggtttctagagaaatcaagagataagctttttctggaaaataaataatcatcccttgtgtgtgatgagtcacttctcttctgctgcttttgggattttctctttatccctcactggtttgattataacatgtcttttgcaaatctcttcatgtttatctgacttgaagttcattatgcttcttggatttgtatattcacatctttcctcaaattttggatgtttttggcttttatttctccaaatattctttcttttcatttcgttctcttttcccttttcggagactcttgtaatgtgtaggctgatcagcccgatgatgttccacagaccctcaagtttcggctc

SEQ ID NO: 7693 - DNA, 1376 bp, Homo sapiens
aattcaagaaccagtagacctctggatgaccctggtttcctgtttctgtggaccacaatgctctggggcagtgctgcgtatcagaggttcaagccatggctggagcagccacccctgaagtagacaccctaatatccttcccactgagttcctagttctacatgctggagtgaggctgtcaactctgaagtgtcagagtgtgtctgaaaatgattgctgtgaaaaataaaatatttcacattgcaggcctcatttttaagttatttttcccagagaacattttcatattttagaacttatggtaatgttaacactttctatttgcataagcacttccctgttgggagatactgcaggtgtaagtttttctgaggagtgtcataccaccatggaactattttccatcgatctggagatagggaacttcttgtatactctgagagagaacttctttgagatgtaaactagactgacctactttagaggctgcctgtatcctaattttctattttaaaagagtgatggctgaacactgaaaagctcgggacattttagaactgtgctgcccaatatggtggccactagccatatgtggctatttaagtttaaattgaattaaaataaaatgaagtggaaaaaattaagttcatcaattatattagccacatgtaactgatgactagtggctacctaccatatatagaacatttctattattgcacattattctactggacaatgctgttttaggatgtagaagtcctgatggataatatcaaagccaccttaccacagacagagttttacagagctgtgaagtaattcttactgggaacaccagatacttacttaccattttatatagcgtatgtggcattctctcatcttatcattagagcatgcctgtatctttagcgacaatagcattcaaacaccaaatgttatattgtctgtctggaaatgttttcttatacaactcaaaggggaagagaggaatatgtcgtgagtaaatggaattatttttctctgcaccacatcattataaaaactcgaagaggttgggtgcagtgctcacgcccatgatcccagcactttgggaggccaaggcaggtggatcacttgaggtcaggagatcaagaccagcctggccaacatggtgaaatgctgtctctactaaaaatataaaaattagacgggcatggtggtgggcgcctgtaatcccagctactcgggaggctgagccatgagaatcatttgaacatgggaggcggaggttgcagggagccgaagtcgcgccactgcactccagcctgggtgtcagagtgagactccatctcaaaaaaaaagaaaaaagaaaaaagaaaaactcgaagagg

SEQ ID NO: 7694 - DNA, 915 bp, Homo sapiens
tgaggaacagaatagaggagctgtaagttggggtatagtgtggcaaggtttgtgagagacttaagaacaaagggtgtttatcataggtaattatcacagtgttgttagagtgtaggcagagcagctttctaaccaacattacaagtttattttgctagtgaaaccttttatttaccaatgaagcattagaatttcagagagttaattgtttgtgaactttgttcatggtctttctgaaactttcaactctctgtttagttacaataaggctcattttatagcctttattgtcctcttttgagaagaggcagtataggtagataggaacatgggcttgggatcagatagactgggaatagaaatccatgcctgacgcttggacaaattgtttaaacttctgaatgttaatttcttaaccagtaaaatgggaataataatgcttaccttacaggcaaggggacaatttctttgtgtggaataaaaaaaggaaggtaagctgactcattttcagaaagatctttaaaaattaataaacatgccatattccttaatcttatttatgattacatttggtttatttaagttttaccatgcatatctacttagtgttatcaaactataaggaggaagggctcttggtaaaatcagtgagataatctcagagtctgtgctcttaggaaattaataaaaaaattaaatctgataaaaaagatctgttttaatagcaaattcctttttaagactaattgctgtattatctaaaaggaaacaagctgagtgcagtggcccatgcctgtaatccaaacacttcgggaggctgaagcgggaggattgcttgagctcaggagtctgagaccaccctggtcatcatagcgatatttcatctctatgtttttatgttaaaaaaatagctaa

SEQ ID NO: 7695 - DNA, 20549 bp, Homo sapiens
ggtgtgtcctgctccccaatgacaggttgctcagagactgctgatttccatccctatataaagagagtccctggcatacagagactgctctgctccaggcatctgccacaatgtgggtgcttacacctgctgcttttgctgggaagctcttgagtgtgttcaggcaacctctgagctctctgtggaggagcctggtcccgctgttctgctggctgagggcaaccttctggctgctagctaccaagaggagaaagcagcagctggtcctgagagggccagatgagaccaaagaggaggaagaggaccctcctctgcccaccaccccaaccagcgtcaactatcacttcactcgccagtgcaactacaaatgcggcttctgtttccacacagccaaaacatcctttgtgctgccccttgaggaagcaaagagaggattgcttttgcttaaggaagctggtgagtacatggtcctagacagaaatcaggattctcaaccactgggcagtggggtaaggcgagaaggggctgggggtatgcacaagctggagagcttctccaaagcttgaggtcaccatttacccttgcatggtgagcatgttgtcctatgagaaaataattcagtgaattttggagtgggcacctagtccttcctaaatcacagaattgggctggaacaggggatttgtggagcaaacctgtccctcctgccatttggaagcaagaaggggtctatgcaaagggcaggtccctattacacttggtgtttggaaagaggcggtttgggaagtttgtactactttctgagtttgcccacaacactaacgaatttgggttttccagaaacagttattaataattagaaaagttggaaacaaaaacaaaaactttgacataaaaatagcagtagttgaatcttatatttgagtttgtgtatattcttttaataggaaaccttaaaatttttttaacaaatatgtcaaggacttagccttcaagaatgcttactgagcatcaccacattagtaactggcagcgtcttggagagaactcagcacgtgaccttcgaatgcaatatcttccactccagatctgttctgccttccgtccttgtcttcctgtctttcctagagtaccttctcaactagtaacttcagcaacatctctagcttctttccctccttgtttaactttttaacaaaagcatagcatacatgcaccagattacacatattctggatgtgcaccctgatgaatttcacaaagcaatcacagccaggtaaatagcctgcagattcagagagaaagcatcaccagcgccagaagtgcatgctgcactccagccactaccctggtaagcacttgctggacttctaacacacagattcattttgcctgatcctgtactttatataaatgaaatcatacagtgggtcctatattggatctgacttctttgctccacgttacattggcttagttacccaaagctgattgctcaaatgagaacctgacttcccattcccagtgtggcttaactcaaattcctatcatttctcaccaggattactgtaattcaactcactgtctctgcttgccccattgaaaactcctgatctttttttaaaatgtacttttggtgatttaactcctaactctccttcttatgagcatcgttgtcaaggcccctggcaagctcaatgttgctctcagcctctgctaccctgatggcttgggtcccctctgctgtagacacagcctgtcacactcattttctccaaacatcaaaattgttaaaatgatggtcatattgttgtctcttcctagaatgtctgtcctcaaatcttgttggtgaactttcaaagttcctttgaattctccttgatcctctgcagccataattatgccctttacttttcacttatgagcttatagcagttggtacaaatatgtcttgcagctttttaaaatgtactattttgttcagtttttttttttaatgtctggttcctcaaagaaattgcattccaaggttgaattttaccctcctgtgtgtcttcatgcctgacaggatgtctagaaagtaatagaggcttaagaaatgttttagataaatgaatgaatgcatgagtgagtgaataaggagatatgtcgagggaaattacgactttcattcagaaagccagggtttgagtttctgctctaacatttactagatttgtcaagacatttagcttttctgagtatcagttccatgatctttaaaattatctttagataataatgataactgataaaccaatctcaaaagttggtacaaggcacaaacaagtgaatgttcatgtatttttgtcataaaagataaattattattaatagttataattaatacttttatataataacctctcagtttaagtaagtaaaacaaaagttaattgaaatgcttacatgatagtgtaggttgtattttcctgtaagagagatttctagataatggaggaaaactatttttttggttgtaagaattaaagaaagaggaaagaaacacaaaaggtggctccacagtcaaggacaggtttattttagagaaaaaaaacctgagaggggcttctggctgagttaagtcagagcccactctcttacagactaagagttttaaggatttggcgtgggagggtttattagagacttggactgcttctgtttctctttgttgtgcttatctgggagggagagttgtgtgtctgttcccgtacatcttcctgcagctgcaggcatacccaccctgaatctgcttttagcttccctatcttagaacactaaagagaaactaatgtgcttatttaggcccactgttttactgggacccattgtatgacagtgaagtttggcagttacctaaaagacttcccctcaacctccctctgtgctcaagctgtcttgtctgtgttttactgtctgctctttctggctgcttgtggttagaagataagtgatttccttgaaatgcatgaggctagaaagggagctggaacttaaagtggtggtgtttgtctgagatgatggtgttcttgatctgtcagtggtaattaaaggtttaaattcacattgaaatttaaattttaatatatatttttatatattatatttaaaattaaaatttactattctggctaaagatgctcctaaaatatattatttactttcctggcttttaaactgttttgaaattctattcagaaagactgaatagaattaaaaataatgagcatcagatctgggctgtaatatgatcactcatgtatgttaacactattgtaaataaattactccttgtctaagatattaattatgcctctaaattctattccttcccttttgttattcttccatcccttctaaatatactcctcaaaattgttagcagttttgtgccactggccaggaccctgtcttactttctccagtttatctgccactatatcacatcaccacacttcttaggtaattatgttttgttttgttttcgggttataatgagtgtcactcaaactgcctcccagcatgatggattataaatagggaggtgatataatgcctcactgtccaatcatagagacatctgagagtgaaagggggcactaaaactcactcacagatactgtttcatctaccataaaccaaaactgttccaggcacaccagcctggaggcttctctacttataaagactctaggctttggagtctaggcatgtaccctagctctacttttctctagccttatgatcttcagcaagtgtttaacctttcttggcttcaattcttccactaaaaaccagataataattccttccccatgggttatttaagggttgaaagctttaaccatattaccttgggtgatgtatggtgaggccagatacagattaatagagacaagaaagaggtttgcacgggttcattctcctagaatgcaggcaggcaggtgtatgacgcacaggcccatccttctagaatgcagactggcaggtgtatgttgcaaaggtccatcttcctagaatgcaggcaggcaagtgtgtaacgcatagatccatccttctagaatgcaggcaggtgggtgtataacgcacaagcccatcctcctagaacgcaggcaggcaggtgtgtaatgcatagaccccatcctcctaaaatgcaggcaggtggttgtgtaatgcatagaccccatcctcctaaaatgcaggcaggtgggtgtgtaacgcatagaccccatcctcctaaaatgcaggcaggcaggtatgtaacacatgcaagagacatgttttcttctctgagaaaacaaaatgaccccagagtaaagaccaaggatattagcaattggaggttttcctatgaataaaccagtttacctctctgtctctctgtagtgaaaccctcttttggaccagcccctcccttcatcacagaaattccattctgctattttgtgccatactgaaatttgaatgaacaaataaaaacatcaaaagaagaggcagacaccaaaacaaatacacagagagtatgtaggaagaagaaaacgtccaaaaaaatctataactagtaattgcagagagataagagaaagaattgcatacatgaaacaagaatagaatgcctggaaaggaatagtcagaatatggaagcatctggggaatgaaaaatggggtttctaaaattaaaatcttaatagaaagacgaaaagttaaagtcttaaccaaaatgagaccaaaaaatcaggatagacgtaggaaggaagatgatgataagaaaatagtggttaaatttagaaactccaatgttccagtaatagaagttccagaaagatgaaaaagtaaaaattgagacaaggggtgaataagcaaatagtaaaagaagatttttctttataacataaagagctatgatttgagattgaggccttccaggtggccagacagtgaatagagagagattcctaggacacccggtcttgaaattccaaaacattaggaagaaaggttctggagagagaaaaagccatgcacttacaaaggagtacaaacgagggtgttatcaggcctctgaacaacagcatttaaaactgagtgaaaatgacttcacctagaatgtgatacctggacaaacaattgatcaccaatgcattttgaggcatacaagtcatcactttaattcctgctttacgtttttttcaggaagcttgtaaagggattctccaaaataagggagtagcccaagagggtgggcgatgcggaatccaggacaaggagtggggatgggaaacgcagagtcaggaggagtgtcattctcaggctggcagctggcccgtggacagtcacgccacatggcaggcatgtggctttatgctttgcaaatcctggtgctgcctcattgtaccctttggtgtctgagcaagtctattcatctgtgtaaccagttccctgcatccctgtttagatcccgaattaaacatatgctattcccattgggtgggattggtgttgggaactagggttaggggaggggaaattaatgagaaagttttatttcttttttttacattgagaaaatactacttttgctattaaaataataatgtatatttgtgaagtggtaaaattcatgtatcaccttgcacaggtatggagaagatcaacttttcaggtggagagccatttcttcaagaccggggagaatacctgggcaagttggtgaggttctgcaaagtagagttgcggctgcccagcgtgagcatcgtgagcaatggaagcctgatccgggagaggtggttccagaattatggtgtgctccatgggatggcattcttcttattgctattgctatttttattgttggttcttatatttccttccctcctgggccttcagccaggcctgctgaggaactggaagggaggaaaaactaatcttgcttactctaattgcttttcaagctgtgcacggcattatggcagttttagttccttagggctctcagtaaacaagtttggcaagttagataatagaccttttactgagatgactatcttgtacattgcaatttagcaaatacaagatctatggccttagtttagacactaggtaggaaaattaacacatttgacagctttgtaataaaatatctctgttgggactggactggatccatgactaattttatcagaacctcgtggtgtgtggattagccaaggtggagggctccaagggattccaccatgtagccaggattaagaactgctgaattctaaggctgctgagattcctcgcagttcagttttctgcaggtgtcatgtccatatagcagttcttaaaacttagcaagagcttggaaaacattagctcttcttatatggactgtcatgttgggaaacaggtataatctgttacagtacaattctctgttcttgtttatatgagctgttggagccttgaagtctttcaaagggaaactgcatttataatctgttgaggatgttgctgagacatctctgataccccatctgtgatggtgcggacatggactgtgggggagggacgctgtggatgtgggttggagggtccatctgataagggttaagcaggtagagaagagtcaaggtgtcagatgcaggtgaattaggaagggcctacaagcgtgtaaaaccaaaatggtagtgaagggaggcactttgtcactcacacagggagtctgaggttcaaaagtgaactttgggaaccatactcagagagagaaaaaagaaactgaggaagcagtgtgatggagaccaactggcggggttttctgggtgggtacccagccaatgcccttcctccaagatcagccgtccaggatgtcctcatggtgtgcagagtagggacagtactgcatgtccaggtcaaatctctcaggcttgtgggagaaagtggtataaattagtgaatttagaagcatataagaaaagacactgtcagcagcatggagacaataggaaagcatgaagactgtggagaacgggaagcatcgcgccatattcctatagtgcatgagtggagcgccaactaggaggtttcattgatttttgtgcagcaagagaatttggatgatcctcaaattattaaacatagatcaaaaatctacaattataaatatttgaaaataattagaaatatttttaggcattgtgaggaacaaatgtttatagatgcctatctggcccataagctgctgattttccacctctggcttaatgggtcagggatgggtctatgtgttgagtggatgaagagagctgttttagggcctcactacctctccaagtttggtaatttgctagaaggacttccaacactcaatagccagctatgctcacgtctagggtttattagaataaaggatacagaacagaaacagcagggtaaagacatatatcaccagagtccagagagtccagacacaggctctgagtccttctccatcccaggcctcataggttgtactttctctctagcagtgaactatagggacatatttggaatgtctttgcacaggaaggtccatttgagtcttagggtctgaggctttatacagggctagtcatttatgcacatgctgctatgtaaccagctattggaactgaaactcaggaccccaacaacgcaaccaaggaaatcatggatcttgttaaacaatcctgagaagtcttgacaagttgattcaacatgccccattgctccaggtttatacacctcaccaatgatatatagaatattgtagctaccatatgtgcagggattggccaagattccaccatggttccaggttttcctggaaagatgtagggactgagcaaacagatctgctccattaaatctctcttcccaagagctttggcaaggaaaagctgaggacaggaggatagttatcatggacacatagcaaaagttggaaaggcggcagaatatagcaattgacttacagatcctcagatgacttggaaatcaactaggtctgtctttagtataactgataaggctgtatgtttttggttttgaacttaatttctggtctgtttggagatcaggtgctcagttacttgccttttcacaatgtgatatgccattaggaatttatttgagatcaatttttagaacgttttgagttgttttaaattatggacagttgccttattctggctccagtttatgctagatattttgagggcgtatgttacatacggataaaataaaattagcccaaaataggagttaaaatgactctttttataatattagaggatagttgcttaaagagtttttggaatttccagcttctataatttgaaagtaattttaagaaaaagagtcgactcttaaaaagtcacaaaactaggaaaactcagacttaatcaactgcaaggagtgactcagccattgagaatatctgtacttaagagataagtggatagcatgaaggagcagaggaaattggagggataataagataggtggagtagaaactagtgtgacagaaaccaaagcaaaggtaattgtgaacacttgctgtgctcccaaaacgacacgctgtcacagctcttcacataccatgttgcaaggaggggtctgtttacactttattcccacaccaggcttccctttctcttggttttcttggcatctaacacagttgtctctgacatcacatagaatgtctctagatatttagatgatgagacaactgtcaagaagatgtccagaagaagcggatgaacttagcaaaaatactagggatcttcaacagagcaattttatctgtgtgatggaaagaaaaagaagtaaatttataattgttcataaataagtctagaggcatccaaatatatctacctgcctcagaaattacataatttgtatgcaggaataaatgaaaaacctcatttaaatatatcagtaagtgctcacacacatacatgtgtagagttttcaaataatcaactaagtatttgcatcattattttacatatatatttagtttttcaggtttgacacaagaagaaagtaaaattcatatctcaatgagttttgtgggtataaggaaaagtgtctttttaaaaatttaaacaagatatattttatcacaagagatctaaatagcccaaggggcttggtccttggatagaaaagtttaaacatgatcattttccctcaggtgagtatttggacattctcgctatctcctgtgacagctttgacgaggaagtcaatgtccttattggccgtggccaaggaaagaagaaccatgtggaaaaccttcaaaagctgaggaggtggtgtagggattatagagtcgctttcaagataaattctgtcattaatcgtttcaacgtggaagaggacatgacggaacagatcaaagcactaaaccctgtccgctggaaagtaagtacacaaggtcgcttttgctgatttccttcaagaaaactttcaggaatgacttttttcaatgaaactgaaaacaatactgatacaagagaactctggacctcgcaagccagtccagaagtcaggtccttggtctttcagctctgttagacttaaaactatacttttctttgtcttagacataaaactagacttttctttgccttacttcccttttctgaaaacatgatatgatttcctttggaaatattgtgaggataaacataaaaaaatatgctcagtgctttgaaatgtttggaagaatatgttcatagaaagcctaaatttatttttaaaactcttggcttatggatggacagataccggttcctcataaattctgatgcagtgaatttctagaagacattagggttaaagtcttccccaagttgtagcaaaatgggacctttattcccagattcatgctttagggctggccccactaccagctactaaaagccaactccacatatgcagctcccactctgtgcagacatcatgactaaaatcccagttttctacctttgactgctcgtcagaagcaaatcaggaggctgtttaaaaagcagcttcttgggcctcatatctgctgccctgaaacagggcctgtggtgaaggtaagcatagcagggagggcttgcacaaacgtgtatttctaacaagcagtccaggtgcaatgaaagataagatgcagagctcagtgctagcacaaacacacaaaaagagatgtgggaaaagtcacatgatagaaagctatgtgtgctaccatatcgtgaaatggcaaaacaggctgagcttaagtggaaggcttcatataggaggaagcatttggctatgctctgaaaaatggaaagaattttcgtaggtggcaaagacctgaagaagaaaggcacatccagactagagggctttgcctgcacaaaaaacagcttttccttcaaagctgccttggctgtttttttaaatcccatgtcagcattccaaatagagttagggaagagggaaagggatattctatcattttcctgaagctgtcctgtaatatgtggaaatgggttaggggaagctggagatgctactttcaaaaattgctaataggtatgttgaacttgaacttttggttacatatataaggatatgaattatcagccacattcccaggtctagaaggaactggagaaaagctaaagagagaggtctgataggaaaaacagggacatgatccaccaggaaggcagaggctccagctggagggctaagctgccttagacatgttgactttcctgcctgcccctctcctgtacccacctctctcgtcttccctatgtttcctgttactgtcttcctcattgttctcttttggtgtccttttttcagatgtgtaaatattttttccccacagcttggttttctcctatctcatggcctttctctcagatattttgactcccacactggcttccattcatctgattcactgtagatttgccatcaagatcctgactcttttggtggaaggctagtttctgcctgtttggaaaaccagattattgatgtatgcaggcttccaattgatgtaaattgatgcttctggaacaggtgcctgttcttagtccaatcttacattgcactcagaacctagtttcctgaggctgcctcctccactgtgaggctgtgggctggaaggtgtcaccagccgtgtccccgggacaacagcaatgagcatgcgtgattactcactgggaggctttgttgtgacctgtaggcttgctccagcagcatgggaggagagggctccttctactcccccatgcccaatcccacaccctcaatattgttccccttccagctcctacggcttgcttttctcctgcagaagcccttccagtctagctggctgattctggagtcaaagtccctggaaaaaaatgcctgtgctgtatgtcttctttgatagtcaagtctgctcatgattcaaacctacatggaagggcactccctccctgccaggcctctccttaccctgagcctggatggggcatgaggatgggtgacaacccctcccaagatgctcacagtctattaaggaagacaccatgaaagcaaatagcaaaattatcctatgaccaggggccagtggaggcagatatcaaaagaccgagaagcaaaaaagaagaggaaaaataaagagtgagcaaaaaaggcaacatgaagtgttgacaatttcttctcatctgactatagtggcatctgagtggttcagacgatgatattagtgaaattctgtgtagaatcatcctttccatggaaaccctttagatctgggtttgtcctgcctctgtgttgggttggctgtcaccctttgtcaccttgggcaagtctcttcacttcttgccttttctaggactgacttttattttcaaatgatggtagtatgtatagaataatacactgtccacactcttacacacacatttgtttacttaaaagactgttgaaagagaatattaatgattttgaaaaactgttcttaggtcttacatgaaaaacagacatatgctagaggccttcataagaatatattaaaaatcagcagagaaaacaatgtttttaaaatgtgtttttctgggttatgggattacacatgatttatttttatgctcttttatagtttatattttttcaataagtacctattattttgttgtctgaaaatttatgactcaatcaaacataatctagacaagtttttgaaagtttatattttaataatgtttgtgcttctgacaccatattcctaaatttcagggctagctttcatttccccaaagtaatatctttctagaatgttcctcagctcgtagagtctctttgctcagaagagatgaagcttgaaaagggggagtgaggtttgggggaaaacacgatggaaagctctctgcaaagcaaacactaccattgcctttcaggtgttccagtgcctcttaattgagggtgagaattgtggagaagatgctctaagagaagcagaaagatttgttattggtgatgaagaatttgaaagattcttggagcgccacaaagaagtgtcctgcttggtgcctgaatctaaccagaaggttgtataaagcaaaagttgttttctttgtcatcatacattcagattgattcccaaaagggaagtctctcagccaaggaccccacacattgttattttagagggttcggtggtgagaaatgggaggaatgccatgtcagggcagatagggctgagggctgccattgactctgccacctcccagctgcagggtctttagagagcttcagtttctctatccacgatggatagagtggtactttgcagatgatacaactgtatatagattcatgtagatattcttgctatatgattcatataagtataatgtccctatgtgtcatacatgcatgacataacccctaaacatagaaagaactaacgaacgccactctgttgatatcaacattatcactttatttagttgaataatctctatgtataattttgttatgttgcacagaatgtagaagaaatgtttcccatttagttttctaatgtaatgacaattggatccatcctattagcacaaatttcatacaccgataaaacaaggttggccaaaacatgtctacactgtggagcttcaggtataactagaagccgggtatctaaaaatgtgttctcagaagctacaggaaaaaaaatccattaataaggaacctccttattaatgaaagatacaaactttaaaaaaattatgatagtataattgaatccataaaattaaaaatatgtcacacatatcataaaattaaaagtgaaatatgttaacatgatatactgaattgtataaaataaagtattatatataaagttatttaaatcaataagaatctatgaacaccaaaaaaagcaaaacatccaatgggcataaatagataatttacagaaaaaaaacaaatggtgaataaacattttaagagtatttgatattgtctatattcaaggaaatacaaaataaaatatgaagcataaagttgcagtaagagaggcaagttcatattgttagcaagagtataaattattgcaactttcctagaaaacgaattgctaactttataacctttaaaatagcccatatttgaatttagaaattctaccttaaaacaagagaaatattcacagaactagagaagtacttatgtaaagatatgttactgcagtattaagaataataccggccgggcgcggtggctcacgcctgtaatcccagcactttggggggctgagatgggcggatcacgaggtcaggaaatcgagaccatcctggctaacacagtgaaaccccatctctactgaaaatacaaaaaattagccgggcgtggttgcgggcgcctgtagtcccagctactcgagaggctgaggcaggagaatggtgtgaacccgggaggcggagcttgcaatgagcggagatcgctcactgcagtccagcctgggcgacagagcgagactctgtctcaaacaaacaaacaaacaaaaagaataataccaaaaaaaaataaagatagcctgtcattcagcatacagagaatgagtaagtctgtaggttcacagaatgaaatgttacactgactaacaagcatattccaaaaatttttaagtgacaaggagaaattctgataatataatagtaggtacagataaaaaacagtatgcaaaattaatttgaagtttaatcctgatgtgtaaaaaaaagtatctctacatattcctttggttatcttggagtagtggaattataagtagttttattcacctttataactttttgaactttaaaattttgtaacttaagtattagttttattattttaaaaacagcttctccatctgccatccaaaaatacatatacaggaaaatctctaccccatatgtttaagtaatgctaggaactcaaagagcagacattcattccttatgctttagacttctgaggctctaggtaaatggttcaagtttaaaaggtaatgttgaagtgaacatgaacaagaaaatctcagaatgaaggacaggatgaccatcaaaaagaagagaaagggggtagaggaggttttcctctatgcactattttatttaattttttaaaactccatcttaatagttaatatgacatcaaagaaaatttggttgagtacctcctttgtaagagggactgttaaccctttgactcattgccattttcactaatgcttcatgagccaggttgtatcatccccattgtatacatcaagaggccgagtggtaggtactcatttacctgacttgtatcaggggcaaaatctgaattttgatgaccccaaagcccacaaaccttttagccagtttgtttcaaacttcatcaaatcacctgggatcttgtgaaagggcagacctctactcagtgggtctgaggttggcccaccactctgcaccttgaactagttcccagatgatgctgatgctactggtaccccactagacattcaatagcaggtctgctcccatcccttcctaggagttggcaaatgctggccccagggatgggtctggcctgccacctgttgtagtacaggatgcaagttaagacttgatgagggaaaacatcaaaacaagaatcgtatttgtgccctgtgaacattatataaaagctggttttctgggtccataaattaagtttcagtggagctcagccaagctatttttcttatgtatcatctgtggtggattttgggctgcaaagcacagttgattagttgtgacagactgtgtggcctgctaagcagaaaatatttgctatctggccctttacagaaaacattttacagacccctatctacaagaataggtatagaaggaataccttcccatcaacagtgcaggtacagcttctatatacctatagaagtcataactgtttgtaagtaatgttagggtaataataaaatcctcaggtaaatcgaccctttagctccaaaaaaatagcattcaagagagttctgctttatacattgaaaagggagaaattagatacatggtggacacagtcatcagaaatatcatgtaaagaagaaaagggctctcccaaagtgtgaagggttggggaaattgccttggggttcaatgtcagggaagccttcaggatgaaggttctgatgtgtgaccttttcagcaaagagcagagaatccaggcctgctgtgatctgttgaaaaccgaatgcacacaaacagagccttgtcttgtgagggccatgccaaaggcaactcaagggaaatgagaaatgctggatccaaaacaatacaatgcaaacactacaggtggacaattgagctcacatactgagaaatgcacctgaaactaaatttgtattaacttctcctttgcagatgaaagactcctaccttattctggatgaatatgtgagtatttccaatgagttataaaattaaaacttaattaattaattagcagtaatggcagagttgagttccatgagcataactatctagtacctatttgtccttcttaattagcacttcacagtttgatagtcagtgattatgattatgccagagccctcacttcacagggtcaaatgtggagctaaacactggaacagaataagcttcaacccaggtcccagcactgatttgcactgagcaccatatgatattgtctgccatgtaactatgcatccgtggatgtcacattgaacccgttatcacacacaacagagtcatctgttatgtagtcctgggctggaggctctcctgagatagggcatccagcctactttgaaggaaggccatatcactcttctcattatcttggacaaaccaggcacagccagcttgtcttctgattgataaaccttggctttcctaaggagaggcttatgtttctgctccaaacaccactgatattattcctacccccactgccttccaaaggaagagggaaacctacccttctcaaaactgaaaaacaaatcactttcccctttcctctgtctttttttttctagatctataaccattgccactcttcctagcaaaggacaaataattccatttgaagacatattttaaagaaatgagctccaacaaccttgaattccatatttaaattggatttgttttttggagaaatacttactgtcacttttgatgtttgcttttctttctttcttttctttttttttctgagataggttttcctgtcacccaggctagagggcaatggcacaatcttggctcactgcagcctcagccacctgggctcaggtgatccttctgcctcagcctcccaggtagctggtactacagatgtgcactaccacacccagctagatttttatgtattttttgtagagattggattttgccatgttgcccatgctggcctctaacacttgggcctccccagatgctgggattccaggtgtgggcccccatgtccagctggtattttgttattttcaagttaaccaatcattgtttatacccatttcatttcttaacaatataagctttcttaatagagcataagggaaaaggtgataaggaaaacatttagtttctgggtccaaggtagagaggaaaattcaaacaatttatttttggagtggaaattattatgattgtctagtgattttgaccagcatccctcaacaaactcactggtctccacatatttggaaaacacatcgttgaaccaaaatttgcttttaccaattgaataacattttgcttcaataagtattacttgagctcctatgaaacactcagtgtaggtcgtaaggagtgtgaagaaatcgtttctgcctacagagtagaataggacagactaaaacaaatgaaaatggatggaataagattaaaacaaagagccttcgcaggtcatggaagactcttcttgatctggcacctgccatggaagactcctcttgatctggcacctgcctgcctcagcagcacctttcttttcatcctctctccgtttctcaaaacaagcctttattaatatttacatatatgcatgcatgcacggatgcatgcacatcattactattccagaaacaccgtctacctccatttccccagtacatcatgctatatcacacttctgtgcttttatgataccattccctccaatttaaaatctcaacacataattcagatgttagcatttggggcaagcctctcctgattaccccttcccccagtggaactacatctgcccatgcggggcgcatatcattctgtttattgtgcgcttaggtgtctactgtacttagcccagcctcttccaccagaccatgagctggttgagtagagagatggggtccaaggggttcaatatcagccacagatttcaaaagatacctgtcgacatgactggaatatcaaaagctatttgggattaatagtctagattgagttttacaggattcatcacatggaaatataccagtttctgttatgaattttctagatgcgctttctgaactgtagaaagggacggaaggacccttccaagtccatcctggatgttggtgtagaagaagctataaaattcagtggatttgatgaaaagatgtttctgaagcgaggaggaaaatacatatggagtaaggctgatctgaagctggattggtagagcggaaagtggaacgagacttcaacacaccagtgggaaaactcctagagtaactgccattgtctgcaatactatcccgttggtatttcccagtggctgaaaacctgattttctgctgcacgtggcatctgattacctgtggtcactgaacacacgaataacttggatagcaaatcctgagacaatggaaaaccattaactttacttcattggcttataaccttgttgttattgaaacagcacttctgtttttgagtttgttttagctaaaaagaaggaatacacacaggaataatgaccccaaaaatgcttagataaggcccctatacacaggacctgacatttagctcaatgatgcgtttgtaagaaataagctctagtgatatctgtgggggcaaaatttaatttggatttgattttttaaaacaatgtttactgcgatttctatatttccattttgaaactatttcttgttccaggtttgttcatttgacagagtcagtattttttgccaaatatccagataaccagttttcacatctgagacattacaaagtatctgcctcaattatttctgctggttataatgcttttttttttttgcctttatgccattgcagtcttgtactttttactgtgatgtacagaaatagtcaacagatgtttccaagaacatatgatatgataatcctaccaattttcaagaagtctctagaaagagataacacatggaaagacggtgtggtgcagcccagcccacggtggctgttccatgaatgctggctacctatgtgtgtggtacctgttgtgtccctttctcttcaaagatcctgagcaaaacaaagatacgctttccatttgatgatggagttgacatggaggcagtgcttgcattgctttgttcgcctatcatctggccacatgaggctgtcaagcaaaagaataggagtgtagttgagtagctggttggccctacatctctgagaagtgacggcacactgggttggcataagatatcctaaaatcacgctggaaccttgggcaaggaagaatgtgagcaagagtagagagagtgcctggatttcatgtcagtgaagccaagtcaccatatcatatttttgaatgaactctgagtcagttgaaatagggtaccatctaggtcagtttaagaagagtcagctcagagaaagcaagcataagggaaaatgtcacgtaaactagatcagggaacaaaatcctctccttgtggaaatatcccatgcagtttgttgatacaacttagtatcttattgcctaaaaaaaaatttcttatcattgtttcaaaaaagcaaaatcatggaaaatttttgttgtccaggcaaataaaaggtcattttaatttagctgcaatttcagtgttcctcactaggtggcatttaaatgtcgcctgatgtcattaagcaccatccaaaaagtctgcttcataatctattttcaagacttggtgattctgaaagttttggtttttgtgactttgtttctcaggaaaaaaaatattcctacttaaattttaagtctataattcaatttaaatatgtgtgtgtctcatccaggataggataggttgtcttctattttccattttacctatttactttttttgtaagaaaagagaaaaatgaattctaaagatgttccccatgggttttgattgtgtctaagctatgatgaccttcatataatcagcataaacataaaacaaattttttacttaacatgagtgcactttactaatcctcatggcacagtggctcacgcctgtaatcccagcacttgggaggacaatgtgggtggatcacgaggtcaggagttcgagaacagcctggccaacatggtgaaaccccgtctccactaaaaatacaaaaattagccaggcatggtggcgtacacttgtaattccagctactcaagaggctgaggcaggaggattgcttgaaccctgaaggcagaggttacagagccaagatagcgccactgcactccagcctggatgacagagcaagactccgtctcaaaaaaaaaaaaaaaaaaaagcaagagagttcaactaagaaaggtcacatatgtgaaagcccaaggacactgtttgatatacagcaggtattcaatcagtgttatttgaaaccaaatctgaatttgaagtttgaatcttctgagttggaatgaatttttttctagctgagggaaactgtatttttctttccccaaagaggaatgtaatgtaaagtgaaataaaactataagctatgttaaataca

SEQ ID NO: 7696 - DNA, 3443 bp, Homo sapiens
tccttttttatggctggatagtattccatggtgtatatgtgccacattgtttttatccagtctatcattcatgggcatttgggttggttccaagtctttgctatttgtgaacagcactgcaataaacatacgtgtgcatgtgtgtttatagtagaatgatttataatcctttgggtatatacccagtaatgggattgctgagtcaaatggtatttctggttctagatccttgaggaatcaccacaatgtcttccacaatggttgaactaatttacaatcccaccaacaatataaaagcattcctgtttctccacatcctctccaacatctgtcatgtcctgactttttaatgattaccattctaacaggcgtgagatggtatttctcattgtggttttgatttgatttgatttctctaatgaccagtgttgttgacctttttttcatatgtttgttggccacataaatgtcttcttctgagaagtgtctgtttatatcctttgcccacttttggatgggtttgtttgtttttttcttgtaaatttgtttaagttccttgtagattctgggtattagccctttgtcaggtggctaaattgcaaaaattttctcccattccataggttgcttgttcactctgatgaaagtttcttttgctgtgcagaagctctttagtttagttagatcccatttgtcaattttggcttttgttgccattgcttttggtgttttagtcatgaagtctttgcccatgcctatgtcctgagtggtattgcctaggttttgttctagggtttttatgattttatgtcttacgtttaagtctttaatccatcttgaataaatttttgtataaggtgtaaggaaggggtccaatttcagttttctgcatatggctagccagttttcccaacacaatttattaaataggaaatcctttccccattgcttatttttgtcaggtttctcaaagatcagatggttgtagatgtgtggcatgatttctgaggcctctgttctgttccattggtctatatatctgttttggtaccagtaccatactgttttggttactgtagccttgtactctagtttgaagtcaggtcgcgtgatgcctccagctttgttctttttgcttaggattgtcttggctctatgggctcttttttggttccaaataaaatttaaagtagtttttcccaattctgtgaagaaagtcgatggtagcttgatggatatagcattgaatccacgaattactttgggcagtatggccattttcactatatcgattcttcctatccatgagcgtggaatgtttttccatttgtttgtgtctctcttgtttccttgagcagtggtttgtagttctccttgaagaggtctttcacatcccttgtaagttgtattcctagatattttattctctttgtagcaattgtgaatgggagttcactcataatttggctctctatttgtctactggtgtagaggaatacttgtgatttttgcacattgattttgtatcctgagactttgccaaagttgcttatcagcttaaaaagattttgggctgagacgatggggttttctaaatatacgatcctgtcatctgccaacagagacaatttgacttcctctcttcctatttcaataccctttatttctttctcttgcctgattgccctggccagaacttccaatactatgctgaataggagtggtgagaaagggcatcattgtcttgtgccagttttcaaagggaatgcttccagcttttggccattcagtatgatattggctgtaggtttgtcataattaactctgattattttgagatacgttccatcaatacctagtttactgagagtttttagtatgaaggggtgttgaattttatcaaagaccttttctgcatctattgagataatcatgtggtttttgtcattggttctatttatgtgatggattacatttattgatttgcgtatgttgaaccagtcttgcatttcagggatgaagccgacttgatcacagtagatcagctctttgatgtgctgctggattcgatttgccagtattttattgaggattttcatatcaatgttcatcagggatattggcctgaaattttctttttttgttgtgtctctgccaggttttggtatcaggatgatgctggcctcataaatgagttagggaggagtccatctttttctattgtttgtaatcatttcagaaagaatgataccagctcctctttgtacctctagtagaattcggctatgcatccatctggtcctgggctttttttttggttggtaggctattaattactgcctcaatttcagaacttgttattggtctattctgggattcgacttcttcctggtttagtcttgggagggtgtatgtgtccaggaatttatccatttcttctagattttctagtttatttgcatagaggtgtttatagtattctctaatggcagtttgtatttctgtgggatcagtggtgctatcccctttatcattttttattgtgcctatttgattcttctctcttttcttctttgttagtctggctagcagtctatctattttgttgatcttttcaaaaaaactagctcctggattcattgatttttttgaagtgcttttcatgtttttatctccttcagttctgctctgatcatagttatttcttgtcttctgctagcttttgaatttatttactcttgcttctccagtttttttaattgtgatgttagggtgtcgattttagatccttctcactttctcctgggggcatttagtgctataaatttccctctaaacactgctttagctgtgtcccagagattctggtatgttgtgtctctgttttcactggtttcaaagaacttatttatttctaccttcatttcgttacttacccagtagtaattcaggagcaggttgttcagttttcatgtagttgtgcggttttgagtgagtttcttaatcctgagttctaatttgattgcactgtggtctgagagattgtttgttatgatttctgttgttttgcatgtggtaaggagtgttttgcttccaattatgtggtcattagaataagtgtgatgtggtgctgagaagaatgtatattctgttgatttggggtggagagttttgtagatgtctattaggtctgctcagtccagagctgagttcaagtcctgaatatccttgttaattttctgtctcattgatctgtctaatgtggacagcagggtgttaaagtctcccactattattgtgtgagagtctaagtctctttgtaggtctctaaaaacttgctttatgaatcaggttgcttctgtattgggtgcatgtatatttaggatagttagctcctcttgttgcatcggtccctttaccattacgtaatgcccttctttgtc

SEQ ID NO: 7697 - DNA, 1564 bp, Homo sapiens
gacagtcatcaacctttgaccaggagggatctagcacaggccagtcttccagctatggccaccgtggctctggctccagtcagtcttctggctatggccgacatggggctggatctggccagtctcctagtcgcggccgacatgggtccggttctgggcactcttccagctacggccaacatgggtctggctccggttggtcttccagcagtggccgacatgggtctggctcaggtcagtcttctggatttggtcaccacgagtctagctcatggcagtcctctggttgcactcagcatggatctggctcaggtcactcctccagctacgaacaacacggctctaggtcaggacagtcatctaggggtgaacgacacggatctagctcaggttcatcttccagctatggtcagcatgggtctggctcccgtcagtctttgggccacggccaacatgggtctggatctggccagtctcctagccctagccgtggccgacatgggtctggttctgggcagtcttccagctacagcccatatgggtctggctcagggtggtcttccagccgtggcccatatgagtctggctccggtcactcttctggcttaggtcaccgagagtctcgctcaggacagtcctctggctacggtcaacatggatctagctcaggtcattcctctacccatgggcaacatggttctacatcaggacagtcatcgagctgtggccaacatggagctagctcaggtcagtcttccagccacggtcagcatggctctggctcaagtcagtcttctggctatggccgacagggctctggatctggccagtctccaggccacggccagcgtgggtctgggtcaaggcagtctcccagctacggccgacatgggtctggctccggtcggtcttccagcagtggccaacatgggtctggcttaggcgagtcttctggctttggtcaccacgagtctagctcagggcagtcctctagttacagtcagcatgggtctggctcaggtcactcctctggctacggacaacacggctctagatcaggacagtcatctaggggtgaacgacacggatctagctcaggttcgtcttcccactatggtcagcatgggtctggctcccgtcagtcttcgggccacggccgacaagggtctggatctggccagtcccctagccgcggccgacatgggtccggtttggggcactcctccagccacggccaacatgggtctggctcaggtcgttcttccagccgtggcccatatgagtctcgctcgggtcactcttctgtctttggtcaacatgagtctggctcaggacattcctctgcttacagtcagcatggtagtggctcagggcacttctgtagccaaggacagcatggttctacatcaggacagtcatcaacctttgaccaggagggatctagcacaggtcagtcttccagccacggtcagcatggctctggctcaagtcagtcttctagctatggccaacagggctctggatctggccagtctcctagtcgcggccgacatgggtccggttc

SEQ ID NO: 7698 - DNA, 2179 bp, Homo sapiens
gggaatgaccctgcataaaaaggcagctgaagatagactggcaagcacaggctcagggcagtcatttctggcgaggcagaggcaagcgaccagcagcagaagatcatacccaggccacgtgcagccggccacagcaaggtagagaagttgtgccgctcaatcacagacacctgcacccacaacatacttctgttacacacaagaacatttcaggaaactcagccagcttattttttgtttctcttctatgtcaatacttagtgtttctcattttgaggactttttctctctcctgtatctttgttttagtttctttggtttttattttgtagtcctttcagttatttttaatgtgccaaaaatttgtacatgttcaattaaaaatgttgtataatagtgtaatacttttctttgtatgaaaatgtcctcttcttcaaaggtataggctttgtaatgaattagattttctgccaataattgatatacaatttatattctttattgtgcctgtgtgttaccatgctaagaatgtctttgtttaaagggaattaatctttttatgatgtattaatctgtgttttcaattgttttccaagtacagttcaaataacttgcatatttactatacaaaatggttgacaagtgttctttttgcaaagacttgaatacattggcagaggtgctaatcacatcttccctaaggcacctggaagaattatttgaggaaaaaatgagttttcacattgttttataggaaattaaatttgtccaaagatttggagactatttttaaaacataaatacataaaatttcattatttcctgctatcttgtttgctggcagaagtgaatgtttggtgaggttattttgggataaattacaaaagaaaaaaaattagacactgcattaatttcttgttcttttggaatatcttagtaactgaggatcattttctaacaatgtggttgacataccttcagttgctttccacatctaaaagagttatctttcatatatgtacaagttattggtagtcttatttttgggctgtttgttgacttatgccccatttgttttacttgttctttaatataaacccttccattttttaacaattcctaacacttgatatcttaatatcagtcactaacattagtaacttcttgtatgttatattatggcagatctctttacgttttttctcacatctatctgctagtccaggaatttgttactaaatagattttcttggatatttggttgcctcaaagtgcttacatttgttaacagattgtaaaccacatttatttacattgatgaatgggctgttgaataatcattgtaaagcactttgtatatataaggtgctatataagtgtgaaatatcattcatttataaatgaaatgccttctaactttccatattgacttatgtatttggtcccaaattatatttaagtcttttttcttgcaacgtagcccattttttgaaagcaaaacatttctgaaattaggtcatggtttttttgtttatttttaggttaggtcacttaatataggaggatgttttctcatgtacttgctatttgcaagttcaggtttcatttggttctttatgttaaatacgaataagtaacctcaaatcaagctaaatgtaattaagaattttcagcaactatattcaagtgtttgatttttaaattctttctttctttttaataagaaagatgacctaaaaatcagtggtatttgtttgtcctcagaagccgtagttgaagaaagatattagagtatacacagaactggagccatacattgtgctaattttttacattaagtacagaagtctgagcacagcatgaatgcttctgcctgacaggaccacaaagcagcagaagttagggataaatggagatagccatgagtagaactgctgtagggcttcaggaggctacgcagacctgatcaactgcaaagtttccaaagtaaaagattaaaaactttcagacggttcttacctctacccgtgtttcacaaatagcctgaggatccaactatttttaaagcaaattggggccagacgtggtgcctcacgcctgcaatctcaccatttgggagacctaggtgggggtggatcacttgaggtcaggagtttgagaccagcctggccaacatggt

SEQ ID NO: 7699 - DNA, 542 bp, Homo sapiens
gctgggcatggtggcatgtggctgtaatcccagctacttgggaggctgaggcaggagagtcacttgaactcaggagccagagactgcagtgagctgagatcgcaccactgcattccagcctgggcgacagagtgagactctgtctcaatcagtcaatcaatcaatcaatcaaattggaatatgagcactaaccttggtaagttaaaattttgggaaaattgtacctgcagaatatgatggatgaaaacaacagccaggtgcagtgtcacgcgtataatcccagcactttgggaggccgagacaggcacatcatctgaggtcaggacttccagaccagcctgtccaacatggtgaaactccgtctctactaaaaatacaaacaattagccaggcatggtggtgtgtgcctgtagtcccacgctacttgggagggtgaggcaggagaattgcttgaacctgggagacagagattgcagtgagccgagatggcgccattgcaccccagcctggcgacaagagcgaaactctgtcgcaagaaaaaa

SEQ ID NO: 7700 - DNA, 651 bp, Homo sapiens
ggactatgggcatgccatcatgcccagctaatttttttattattttagagagggggtttcttgttattttgctaaggctggtcttgagcttctagcctcaagtgatcttcccaccttagcctcccaaagtgctggggttacaggcatgagccactactcagttcttaatgtttctctggctaggattcttcattgtcttattaaatgagtaccaaaaaactgcttttttcctgatgtactcatagacttctgcctttagtaagtagtgtcattatcatattcttgtcattcctccgcagtcaggtagtgccctggaggtttcctccctcctgttaaggtgctctgggtccagcagttgcctcctctcccttctaagttagtaggcgatccttctcctgtcttcaagaaagacccccttctctcatttgggccctctgttgtggactgtcaggaagttttcttaatttgtttgagaatacaaatctgccttgaagtgaagaaaaacagcatgctggtatgtacagtacctagtgtggctttccatcttaagaaacaacacaagcatttgtgtttttcattctaaataaaccctgtgatttctaccacctgagtgaatcaactgctaccaatcatactcttttccttggaaaa

SEQ ID NO: 7701 - DNA, 3837 bp, Homo sapiens
  SITE (1307): n equals a,t,g, or c
ggggctggactccttggttcctggggacgaagacaaaccctataagtgtcagctgtgccggtcttcgttccgctacaagggcaaccttgccagtcaccgtacagtgcacacaggtaggggaagagagggccctggccttcaagcccacagctgtcctagggcaaagtccctgatctcccatgttctctgcctccaggggaaaagccttaccactgctcaatctgcggagcccgttttaaccggccagcaaacctgaaaacgcacagccgcatccattcgggagagaagccgtataagtgtgagacgtgcggctcgcgctttgtacaggtacggagccagcctccaagtggcttccaaggcaaacctgcaagaggtggggtgggccaatagggagggttctgttcctcccagaggcaggacttgaagtctcctccctcccaggtggcacatctgcgggcgcacgtgctgatccacaccggggagaagccctacccttgccctacctgcggaacccgcttccgccacctgcagaccctcaagagccacgttcgcatccacaccggagagaagccttaccacgtgggtacccaacctggcctgcccactgccttagaattacctctcctttgcctaggggtgggctctgagaggtgcgggcctggctgtccctagatctcttagaaatgagcggtggccggaagagtccaagcaaataaggggtggaggctgggagtcaggatgggcaggtatagaagtgatgctcctgggctgagcactgttttctcagagaggagctgagaagtgggaaaacctttgctaaataaggcggggcctatcccctcagccacccctgaggatttgggaggatgtgagagtcaaagagctgatcttccgctggatagttcccacctgggagagctggacggccgcccggctcaacacctaaaaggtgattgtggatggggcagggcctgacttggctgtcctcccacagtgcgacccctgtggcctgcatttccggcacaagagtcaactgcggctgcatctgcgccagaaacacggagctgctaccaacaccaaagtgcactaccacattctcggggggccctagctgagcgcaggcccaggccccacttgcttcctgcgggtgggaaagctgcaggcccaggccttgcttccctatcaggcttgggcataggggtgtgccaggccactttggtatcagaaattgccaccctcttaatttctcactggggagagcaggggtggcagatcctggctagatctgcctctgttttgctggtcanaccctcttccccacaagccagattgtttctgaggagagagctagctaggggctgggaaaggggagagattggagtcctggtctccctaagggaatagccctccacctgtggcccccattgcattcagtttatctgtaaatataatttattgaggcctttgggtggcaccggggccttcattcgattgcatttcccactcccctcttccacaagtgtgattaaaagtgaccagaaacacagaaggtgagatcacagctctgctggcagagattactagcccttggctctctcgtttggcttgggtattttatattatttctgtcataacttttatctttagaattgttctttctcctgtttgtttgcttgttagtttgtttaaaatggaaaaaggggttctctgtgttctgcccctgtaattctaggtctggaacctttatttgttctagggcagctctgggaacatgcgggattgtggaattgggtcaggaaccctctctggtattctggatgttgtaggttctctagcagtctagaaatggatacagacatttctctgttcttcaagggtgataggaaccattatgttgagcccaaaatggaagtaataataaatgcctcctggaggctgtgggtgtgggggattctgtatctggattccgtatcactccaactggaggctgtgggtgtgggggattctgtatctggattccgtatcactccaagtggaggctggcaggtttttctgcaagatggtccagaatctaaaatgtcccattaatctggtcacttgggtttggctctgctgtatccatctatagtggtagagacccaccagggctcaagtggagtccatcatcctcccacgggggcctgttcttagcactgagttgatcgctccatgggggagagatcagacattccttatcagagatgatgtgaccttttctgactctgcccagtctctatgaatgttatggcctagggaagaatcatgaaactctttagcttgattagatggtaaacagtgttaacccatcctttactacagaggcatatgggtttgaatgttacctggggttctctctattgagttgagccccttcttcctttagtgggttttggacatcttctggcaagtgtccagatgccagaaccttcttttcctctagaagggatggtgcttggtaaccttaccttttaaaagctgggtctgtgacctggtcttcccatccctgcattcctgtctggaaccagtgaatgcattagaaccttccataggaaaagaaaaggggctgagttccattctgggtttgctgtagtttggttgggattattgttggcattacagatgtaaaagattgactagcccataggccaaaggcctgttctagttgaccaagtttcaagtaggattaagaggttggttgaggggtgcagtttctggtgtaggccaggtaggtagaaagtgaggaacagggttgcctcttggctgggtggagtctctgaaatgttagaagaagcgctgaagccttgattgatagttctgccccttgttgccctggggcttatctgattatgggacgagggtagaaagtaagaagcacttttgaatttgtggggtagaacttcaacaataagtcagttctagtggctgtcgcctggggactagtgagaaagctactcttctccctcttccctctttctccccatggccccactgcagaattaaagaaggaagaagggaaggcggaggagtctataagaaggaatcatgatttctatttagcagattggatgggcaggtggagaatgcctgggggtagaaatgttagatcttgcaacatcagatccttggaataaagaagcctctctgtgctgcctgctgtgtcctgggttcttgccttgggggactcggggagcgaggaagagagctcttcctcctggataacatcttggattctgtaccattccactgtcccttcccaccagacattttaaatggtcctcgttgtccccttccctgcccttgccttcctgctcattgtgtaggaaccagtgacttcatgaagtttctccggagccacctgcatcctgctgctctgaagtcacttcctgcctgaggtgtggaggcggcagggagaaaccaggaagccactaataatatcaagaggccggggcgtgcatctgtgctggagatcttaatgctggcgacatgcctccatcaccaaggaagatggataagagttgggtcccgtaaagaccacaggggctggaggtggcactgagaagactgagttagaactaacgggccagcccaccctcccccagcaagggtatcttgaatctatccagggtccagtgcatgcatctctcccaccctttcccctgtcctgtgtgtgtgctgggtgcggaggtcactaattctgatattaccttcctctgggccttaaattcctcatctgtgaaaaagtcagttaccatgatctctgcagctacctccaacattgaaagtttgtagttgtcttaa

SEQ ID NO: 7702 - DNA, 114 bp, Homo sapiens
tttttgtatttttagtagagacgaggtttcaccatgttggccaggatggtctccatctcttgaccttgtgatccgaccgcctcggcctcccaaagtgctgggattacagtcgtg

SEQ ID NO: 7703 - DNA, 105 bp, Homo sapiens
ttttgtatttttagtagagacacggggtttcaccgtgttagccaggatggtctcaatctcttgacctcgtgatccgcccaccttggcctcccaaagtgctgggat

SEQ ID NO: 7704 - DNA, 2753 bp, Homo sapiens
gcgactccccagcaggaagagcgacggccgttcggccaatagctacgaaggttggctggccgcctcaccaatcacagagcggcattggaagatggggccggggcgtggcggagagaacccaaactccgccccacctgactccgcccccaactggagggaaacaagcgagcgcgcgcgcctccggggtctcctgggaagagtagttctcctgggtccgctctgcgggcttctgggagatgtagtttctggtctgtaggcaggacggaaggagcgggggaggccccttacgcaaactacaattcccggcggggagcgcggtgaagcgggggtgggatctgaacatggcggcggtggtagctgctacggcgctgaagggccggggggcgagaaatgcccgcgtcctccggggtaaggagagggaccccggggagggcaggactgcagaagatcccttttctttcacgtccagcccgacgatagcaggaggtcagggctcttggttcctccccacacttttctgcaagatcttagagtctgggggtgcagagatgctctttagaggtcacccagtgcatccccccgccttcgggttgctcgacacctccggggtcttgctgcaagagggagctcctaggaagcctgttggactcccgcgctccaggtgtttcacactcaccgcagtgcagaggaaagagccccgggcttctggaggtttgagttccagccccggataattagcagtttgaccttgggcaaagcagtttttctctcagggcttcagtttcctcttccgtacagtgcaagggatggagtagactatctttaaggtcccttccagtgctaacatttgcagtttcaaaaccttttcccggatttccttcatacgtcttatgtgagtcccactgcagtccttcccatgctgtcgtctgaggaagaacagcgaagcttttcgtcctggcaccagggtgatgagcccgcagtgacgtggaagtggcttccaaaggtgccacctcggtggcgattttcccatttccctttggattctccttggcacttcttacttcagactgcagtcactccccttccccagatctcagccgctcctcccaagcccttactgccccccacctccccgcttgctttcttctcatctcttcttactgaccttccttacctccatccacagggattctcgcaggagccacagctaacaaggcttctcataacaggacccgggccctgcaaagccacagctccccagagggcaaggaggaacctgaacccctatccccggagctggaatacattcccagaaagaggggcaagaaccccatgaaagctgtgggactggcctggtgagttttaaccacccctttgcccaccaacggggcgtggcttgtaggggagggcaggacttagaaacttctccaagtttcaggtggcgagctgaatccaaagttgtgggaacagaattgttgggttcgattggaatctcagaggggtggggcagtggaggtgggaaagtatgtggaattgagaagacagtgggtttactgtggagtaagctgagttgatctgattcagacttgggtccctggcctcatcctcccttttgggagcttggagtgagacccaagtttaagtaagtagttcgttgagatcatgtgagcttgtactagttgtatagtagtactcagaaggcgttatgaacattgtgattgggctctgactctgaccttaatacatattattgaccaatattaaagagaaaggaggaagaaatcaacatttttttctgcatgtgaggtgtgccagtactttgccatgtaatgttttagtgtttgagataagtattacatccccatttcacagaggaaggaactgagactgagctaggattctcacctagtctgtgactccatgctctttcccccataccaaagtgcctcccaagcagtggttacttagcttaagaggggaaaactgggagggtaccttggccaagtctcagagagggaaagcgtcagggctgcctggaaaatcctgcacaggtgctgttgcaggaatgcagggctcgtgctgaggatcaggctctaggcgggaggaggaaagaggcaggcagagacccagccacactgggccttttgtgccatgtttggacttggccaggaagtgatggagttacggggttttaagcagggaagtgacaggatctgatttgtgtgggtccctccagcagccagcacagaggatgaatagactataagaggtattgcagcattcatgcaactgatgaagctagaatgactccccccagctcctctggctcaggcttggcccctccccaaaccccgtgcacatctccccacccgtagggccatcggcttcccttgtggtatcctcctcttcatcctcaccaagcgggaagtggacaaggaccgtgtgaagcagatgaaggctcggcagaacatgcggttgtccaacacgggcgagtatgagagccagaggttcagggcttcctcccagagtgccccgtcccctgatgttgggtctggggtgcagacctgaggagcgctgcgaccctcctaggctattgactgttaagtcctcaggtttggcccagattccagttcgtgcctctgaggtccaccagagggcgcatgaagcccaggctgttgccaaaccctaccctgccccacaccaaggagccagccaaaggcaaataaagttattgagtgtttagtagaaaggaa

SEQ ID NO: 7705 - DNA, 6040 bp, Homo sapiens
ctctgtctctgggaagtatattttatttacatttttaaaatctttaactagtatctcttcctcctttccacccccagagacttgggaagggaaagaacgggaacctcaaacacctactccccacatacaaatacacaccccatggctcacaccagcaaatgaaagtgaaagagaaacaggtccacccctccctctgaagggcccaccaggtctggacaagggtgggagggccctgggctgggtctctaaagagaagaaaaggagaggggagcaagtcagttgaagaggctggaaagtcatccagggccccaccctcctcttccctctgtgccctactgcctctgctggcagacaggggcaggggtcccttcgtcccctcaacaccagacacacaggcaggggctgcagccattaacggtcaggcctttggacacaaaatactttcgctttgtggtctcctgacgtggtcaccaccagggaggcatctctgtaaacagaaagcatgtgattgcagagactgggggacccaagcccaccacctaggggccctagggtgggctcctccagcacaccctcagttctagggccctagtgcctagcactgggccgacatctctgcagccagcatggaggggattagaggaagcccccagcacgggagaagcagagctgactccgatggggaaaatcagtctcagcctctccctcatgactgagacgtggggccccggagggtcactgtcagccactggaatgggggctgggctgtgaaccctcaggcttctctgcattcctgccttaggaatcccttcccacaccccaaggatcctgtgtcccctacatactactgccaccttccaaatacacaaagatcccagcccttggccaattcacttacttgctgagggcaaagtccaggatctcagccgtgtggccccggtagtcagtaagcaggcggccggtccgggcgtcccagaggcgcacgatgccatccaggctgcaggtatataccacggcagtgcctgcctcccacagcagctgcacgatgcccgactgccccgaggaatgacagaggcagggcggaggttggcaggagagctgagagccatctgctcccaattctcaaagagggacagccacacacaagggccaggcaggagccagatctggggtagatgctcctggaggcctgggcttccccaccactatggacacagcccacagggaccccagctccagctgcccatacctggtgctgacactgatgcctaagagtctgcgtagccaggtcatagatggccaaggtcccatccaggtagccaacagctgccaggggcatcctggccagaggagcgtaccatgaagactcatgagggcctggactcacacgccctgccgtcctcccgggcccccagcccaggcccctcccacaaacccctttccccatcctcactcacacactgcagaagcccaaggactccaccgagttggactcactctcctccccttctcccaggctgggctgggaggccacagtctcaggtctaaaaacacccaccacctgaaagccagagaggatcagaggaggacacggaatccgggtgcttgatggagagaaagacggtggggagaggagacagtgaagacccaggaaggaaggagaggagtcgggaaagcggaggccccagccgggctccaggtccactcaccttgccggtggtggcactgaccagcttggcctggcagtccacagagccagttaggatcaagctgccatcctggttggcagcaacacaggtgagtgggccctggtgaccctcagtccctagcatagagcagggaggcagctcaggcttcgtcctacctcccctctgagtcctgccccaggttctcagcccctccctacaaaggcccaggctaacacttcccccacctctgatacctttcagtacatggatagggcttccctgcttcaggtcccaaatcctgatggtcccatcttcatagcctaccacagctctcttccctgaagagaggcacagatgaagagagggcagagggcacgctcacatacactaagcaagggaatggggagagggagaggaaagaagagtggaagggcccagacactgccccaggaatcacaggtgagttcagagcaggaaggaggcgctgtgaactttggggcccaggaggtcagcactgcaaacagcaggcctcagattttgccggctgtgacccagaaggctgctctgggaggtgtatatcccgggattcggcctctgcacccaggaaaggtcactcaagggaggtgctctcaccatcagggaggactcggccacaggtggctgggcagttgggaccctggaaggtcttgcagtcaccattcgggactttccacatccaggtgttgccgtcagctgtgcccgccaacaggacaggtgcccgaggatgccactccatccactggacagggaggaaggggcagcagggaggcccgtcaccccatcccacctagaagcctgccccatgagctccacccaaggtttcctgcctctggggttccgcggggactttccaggtagcaggtagatattcttcctgtgccttggggcgcattggctcagagctggcttggcgcaataaaggcagaactggcctcccaagcttgcacccccaacaacccaaggccccacagagctgactcccgctctgatgatcttacctccaggtctcccgcttcaaaggaccagacctcctccttagtgtccacctgccacactttcaagaggccactcatgtcccctgtggccactagagtggagtcatggctgaaaccagcacaagtcacagagtctttatggccttcaaagaaaagtgggcagaaaacagaggaaaaaaatagggtacctggtgctgggggcatgtgattctggtatctggcccactgaaaggaccagctaggaaaaaaagaggggcgggactgagcagaacaggtgctggaactcaccaccactctaggaaccaatactcccatgtctgctgggagacactgctggccctcactcaaccagaccaagtcccagcctcctatgccttcccccttctgtccactctacacctctgcccgcctgctcctataccaatgtggccttctctggcctttcctggattcccttggccaattagtgcctcctgcctctgtgcccaaaacacactagtattcgccccgtgtccctggggcccagcacagagctggcacaaaagagatgtcactaagtggctgttggatgcacaacctctgcaggtcagcctcctaagatctcccaaaagaatatgacctctcccaggcctctaccccagccccctcacctgcacactcaaagagcagctccccatcgctgagccgccatacgaaggctttgtcatcttcacccccggtcactgccaaggtattggtcttggggtccaggctcacacaaaacacagatgctgtcccaagagatattccatgggtaaggggacagagctcccacctagggctctgtccttcacaatcttcaggaaacccaccccctttcacccaaagcgtgtctttcctcctggaaaacacaggtacatccaagttcttctaagtttcaagaattgggttgttagatccttcccatatttgccaagctccctatttgccagagtagatcccctcactgtgtgactcccgtcaccacccaacaccaatgccatggacaagaggtggggacaggtgcagggcttacagttgtcagcatgggatgccaccggggttgggtacagagcgaggagagcatcacgttaagggttttttgttttttgttttttgttttttgagacagagtcttgctctgtcgcccaggctggagtgcagtggcacaatctcagctcactgcaacctccacctcccaggttcaagcaattctcctgcctcagccccctgagtagctgggattacaggcgcccgccaccacaaccagctaatttttgtatttttagtagagatggggtttcatcatgttggtcaggctggtctcgaactcctaaccttctgatccacccgcctcggcctcccaaagtgctgggattacaggcatgagccaccgtgcctggcaacagtttcttactaagaactagcacttgagaaagttatataaaatatgctcaaaaagatataattatctctcattttattttatttttttgagatggaatcttgctctgtcgcccaggccgaagcgcagtggcacaatctcagctcaatgcaacctctgcctcccaggttcaagtgattctccttcctcagcctccggagtagctgggattacaggcacatgccaccacacccagctaattttttttttatttttagtagagatgaggtttcaccatgtcggccaggctggtcttgaactcccgacctcaggtgatccacccgccttggccttccaaagtgctgtgattacaggcatgagccaccgcacctggccaattatctctaattttatactcactacttttattaacttttatcaaagataactttttttttttttttttttttggagacagactctcattctgttgcccaggctggagtgcaatggcgcagtcttggtccactgcaacctccgcctcccgggttcaagcaattctcctgcctcaacctcccgaggagctgggactacaggcgcccgctaccacgcccagctaatttttgtatttttagtagagacggggtttcaccatattggccaggctggtctggaactcccgaccttgtgatccgcctgcctgggcctcctaaagtgctgggattacaggcgtgagccaccatgcccagccaaatttttgtatttttagtagagactgggttttgccatgttggccaggctggtctcgaactcctgacctcaagtgatccacctgcctcagcctcctaaagtgctgggatttcaggagtgagccaccacgcccggccaaagataactttttaaaagaaaactaagaggttaatcaaggttaactggcaaagtagagggtgtctcgactgatgccagaagccaagcaatcatccattctgccacactttcccacctgtgggctcctccagcgcaaggccagcatcttgcccatctctgtgtcccccataacgttctgtccatggctgatgtttaatgcttacacgcccacctaaactgatttgaggtggatcgcctcaaagacctacctgagtgcaatgcaaaggtgacctcgctatcgtcggggccctccatgctgccgaccaccccttcctggggttctagaacccagccctcttcgttgccctcttcctcctcttcttcctcaaagtccacatcttccatctcctgggccaggtcatctgctttggggagagggttagaagatggggctcgggaggcggtaagaggtacggagagaagcatgaggaggcctgaggctggggcgggtcatgtggcgagaagggaaggtggagtcagacacaccggggtccgcgggggcgcgcgggacacaggacgggaggccacggctggccagagaccgtgcggtaagggagggccaaggggatgatgggaagggggtgtgtgaggggaagggccagaggaggcgtcagggaacccccaccccagccaggcctgagaactaagtgtgagggtgggagtgggggaggaggggaagagggatatcggtaggaatgaccagtcgggtgtggaggggagcggggaaaagcaggagtcagaggccaggggtgagcgtctcctgtcccatggcctgaggagcggcagttctcacctgggtccggcggaccgggatcaagttctaccacctcgataatctcttcatcaccatggaagcttagggtctccagtgggggggtgtcagcagcagccccgctttccgattcggactccatgcggcgcaagcggcggatccacttctctgggcccaaacgcctcccagagtcagctctgcgcgacgacgcggaact

SEQ ID NO: 7706 - DNA, 12281 bp, Homo sapiens
tttgtacttttagtagagatggggtttcaccatgtttggtctggctggtctcaaactcctgacctcaggtgattcccccccaccgccctcggcctcccaaagtgctggagttacaggtgtgagccaccgcaccaggcccagtttcctcattttgtaagatgggactggagttgacatggactgaacctgcagtccatcccctcctccatctgcaaaactgtaggtatacatacagctctttgaggaagagagttagctctcatgagcttttggaaagggtccatggtgcagaaaaggtcaagcactacagccaagaggtctcttccatatccagtgatccagtgtgatagggttgagctctccctttccccacccaactcctgagccttcactagtctattgcatccgtccccggaaactgctgcagtaaagtgtatttgattaccttggaaaaggtgggacagcccaagccagaatgcagaaggaagaagtggatactttgggcagagccacacatactcctggagccatacagggttttaacttctagacataaactttattacatttatagttgtatccctttgtgtgatatagttaggatttctctattaagtaattaatcctaactatatccttgggctgatttgatttctgcccccacccgacagactgacccttgtcccccttccccattccagctcaaggcacttaatattacaaagaaggcagtggctggctggagagatgggcctcaagtcagaaatcccccagtgcaacttaagacaaacagagagaagtcaccttcctcttaggaccctccctgggttagcagaaggaaagaacccagaagtcttcagtaccacagtaggcttcggtatctccctagccaggtgagggacccccaggcattctccctgcccgcaccgagtctctcttcaccctggctacttcctggccacacgtatgactctgccccttactttctgctctgagctgcctgaatacaggaagcaagagttcactctgaccagagatccagaagcctgcaaggaggccccagcagctttcaagaatggggagcagatggccacatgtggcctgctctgtcttatagcgtcacaagccaggagcaagcccaggggagatgctgttccatgctggcctgtataggttactttgctcgttctgttatctgtcccccatccctaacccagataaacaatacatatgtcactgaaacaagaagggattgaagcaaggagacccatgggcacagatctcttctaccttcctgagctaaaagatgccaagccaaaggaatacaggataatggcctatgtgtccaggaggccggggacaaagctctctggctttgctgggggaagaaatagctccaactacgtagtcaagaagcctgtgacagaggtgggaggggaacctcgtgaccttgaagtcacttctacctttcatattcccttctagctatcgaataggctcttttcatattcctcacaaccccagctgttaggaagaatgtggtgtcatacagtaggtggcggggagaagacacatcttcagcctagtccctgccaagcccaccaagagcaacagttagtccctagctcctccgtccccaccaagtacccacacatccatagccagagaggccacctgtctccaggacagaaaggaaactgggcatgttactcaaggggaaggaaaggggcctaaagcccagaccacagtcatagggcccagccctctagcttggaagggagagcccaggatcgggtgaaaatgggggcttgctccttaattgcgatcccccatcagctgcagcacaaaggtgaagatgtagatgatgtctgtgtaaatctgcagggcgccagtgatgtagtcctcggggctgatggtgtgcttccggttccccaggaccagctgtgtgtcgtaagccaggaactgcaaggatagggaagccagaagtgagaactcaggcatcagtgtccagagctcatttttggtcagcagatttgtcttgggggcctatgcgccacacagtgcttagggccacattaacgcacagcataacatatgggctctatactgtagctgctcacagtctaggaaaggaggcagacacaccgttctcaatatggctgactagtgttctaatagcaggcagcttgaacaagagatggcaagagtgcccacaaaaatcaatggaatctctggacagtagtgagaggaatggcctgctatggccccattccctgcctcccaggcagtctaaattcatgcccccttccctagattcctcccctcatcccctcagctccccttcctagagtggggctgggacttaccagggtgaaacaaatggcccccagagcagcatagagcatgtggagccagtaaacctggagaagaaggggacagagaatggcattagaaacctcagcaaaccacaggcccacaggccccagcttcccccgggatagtggcatgagagtgggtagagctgggaagctagctctccatgaaaggctactgcctttccagatcttggaggaaattaagactggtgatatatccagcagagaaagcagaggccatcctgcaatggctgtataaaaccaatctccaaagccagtcaaggtacacaagtgtctactatacttctagaaaaaaagcagttgagttacagctctgaaaggggcagacccagcattcaatagaccagttcctacagcccagcctgggaggggtagactaaggaagaagggaggccccccaacccctctggtgagtatcaaaatccgggagcacccacaggacagcccacatgacatgcccacaggtggccgtccacagaaggacagagctggcccatgggcaggcagccctcgtgtccccatccttccccttcggcactgttctcccccagctgaacagaataaaggaaataattggatccagagacccccgcaaggtcccttccacctaggcccatcatctcagtcctctgggttcctctcccagtctgcctccgagaacctgattctcagctgccagccagattgaacccaccccttcccctaggagtgcagtgatgcagtccagggcttcaggtgctctggctccaaggccgcccatctccacacagagagtctaccctcacccagaaggatgctgcctccacgttggtgcctttgctagccagtcgagaggttctggaggtcagagcctgccccggggacctttggggcctgcgagaccatgctatataggaagtctgccctgagcactgggttccctgaccccagctctcctgggacactcacgtattggaagtagagcacaatgctagtgacaatcccagtcaccaggagcacaattcccaggacacagaagaggcctgtgcacgaggtgaagtccacctgccaggaagcaagaaagaggcacctgtcagatggctgtgacaaccagcccagtcagactggccctgccagggagtcccagtgctgcctcctagggggtatgggaatgtccacaacattctaaggacagaaacaggacacagttttgtaggtgcggatgaggagaaggggatcaggtctctagggaacatccctagtgtgccggggtccgggcctgataagaaaggggagtcggggggccagggaagggccctccatgccctcaccttggtctgaaagcagaagatggtgactgaaatggataccaccgcagtgatgatcattgcaatgatgacggctttggtttggtacatactggggagaagcaggagttacagacaagaggcattaagccacgtatgaatgacttcaaaatcaccacttccagaggggacctgcccagaatccacccacgcagctggctgccggcccaggaacaccccactccccacaatacacatttcccaagagtggtgctttatccctgaatgtacctggaaatggtgcccgtcatgaagcccatggcaaaagtctaagggaaggagagagacaagaatgaaacacttaaaaaggaaggaaggcagggtgctgggggagtggccatggtggcctctgccagagctggggaacgccaccaagttggaaagaggcagccacagaggagatcagaacaggcggcccagataaggtggaggagacagccaggacatccttctgaaatgggtccccatcccttccctgggagcagtctccctcacagcatctccacaccctcctgccacccttctagacttacaaaaagggtcagcagaatgatgttccatgggaaacggcgtctgaagggaaagagaagccttgattaaatgacttggggcccctcaggcgtcagaggctcctacagcagaaggaagcgcttggctcctgtgcctggaggattaagccttgactccaaggagggaggttggcatggcctttggcacctgttcaggtgtggtacgcagggacaacatgggccaatgagacagacctgtgttgtggcgccagaaacacctggattggtttgcaactcttaaactgactgcctgtgtgatggggagaaagttactcagcctctttgagcctcgggttcttcctatttgttaactggctaaaatgctacctgtcttgcagggttactataagagtgacagctagttagctcctaaacacacatggtcctttgtatacacctgaacagtagctgtcatcgtcatcctcctcctcatttcttgtaagtttccattcagctgctataaaggaatccttctttccaaaatactcggcccccatcccaatccctgtcacccctctcactgtgttaagtctctgggactcacctgggtccctggcagcaggcaaggatcaggtaggtgacaacgaagacagcactagggacaaagagatggggaagcagttcaggcccaaatctgccccgcttggcagcacacaccaggccagtgatttggggcccaaatagccgtttggaagtctgaggggaagcaactcaacaggaagcaagaacgagattacccccagccagggtcactgagatgctctgaagcaccaggctccggccaggaaggaggtctggggaggctgcagctgacgggctgagaggacatgggggctgcagcgcagcgtgcacgccaccaccagcaggtcccactcttgctctcgagttctaggggtctgctactcatctgggcacgcacacccacaccctctggcacgggaaactggcaccaacttgggggccctctcaaaaagcattttgatcctgccctgagcaaagctggtcacctagaaacagaagctgccacccctgcctccctgcccaaccacagaggagcacacactcactaggacacgtagtagacagccacatttctcctcacaaaggcgctgacaggttccctgtggggcacaggaggacaggagtagtcaccctgaggcttgtctgccccacccaggccagccaggcagccctggcttcaccttctctaattgcccatggtcaccctgagagcagggcccaccgccacccacacccccagcaggtgaccctgaacccccagggcagtaggagtgggtggcaaagcctagagacttacacaaaggtgaagatagcaatgatggccacagtgatgagcagctgcacggagatgatggagtaaacctggacacagacggccgggcatgggtcaccatccggcacccctggcctgccccaggaagctgccagcccccagtactttcctcccactcaagaaccctccctagctgcagcctggcccagaggcgaccccagtgagatgcctggctcagaggcaatgtgcacttcttcctcagccccgctcccatgctccctgccatctcccctcctgtccaacaccagcctcggtgactactgacttgccctgcctggccaccatactctaccagtatggcctctgcactcccagcagctcagtctgcacgctctatgcagctgtgagatggagagggtgggttacaagcgagtaggatcatttctggctccaagctgcctatagtctaaagggagaaagatgtctggggaaggcgggcgctgtggcagaacccacctaggagattctcccagactgaatgtgtcctcccaaaacatggtcaagaagagaggtgcaaaaagagagggaaccctggggttagagaagccaggtgcccctctgagaagcagacaaggctagagaagacaggcagccagtgtatttcatggaattgatgccctggggctactgtggcctacccacttcccattcccacagcctgaggggccccaggtacacccacctcccagcgcgtatcttacctttcggataaaagtgtgtcgcactttccggtcatcccactctccaggcccgaagctatcactcactgctctctcctccccatcatagccatggcctgggcctagggacagatgacacttgactcagctggggacctgagacatgtggcgtcaatcccaaagcctccctgacaatctcaaagtctcagggatctccagccaaaagacaagtgttataacaggaactcttctcccaagctggggtcttctagacaccctcagagtgacccagagccggcctgtcacgagggggcttaggtgggaaacgttcctcacgtgcatctgtggagggctcctgtgtgcccagcccacgccactgggggttcactggggggtcacgatgtagtggggaagccaggcaggagcaggtatgggcatccactggggcagccagccagggcagaacaggggatggggacagagggtaggagaaaaggagggcggcagagcgcagtttgtgcagcagcagggatagaggtgaagacagggatctgcatcagcctcacagaggcaggtgtgcaaagggtgtgcgtgactgtgcaggacccatgcgcagatccgcaccagcgcacatgtccaggtgagagctggctgacacccctctggggttcagagatgctgcagggctgcaaacattccctgaatgcctgaatgcctgaatgcctctttgggaactacttttaaaatccacgcttgagccacccaggaagactcactgcactctaacttcacctcatttcctttttttttttttttttttttttgagatggagtttcggtcttgttgcccaagctggagtgcaaaggcgtgatctcggctcaccgcaacctccacctcccgggttcaagcaattctcctgccttagcctcctgagtagctgggattacagacgcatgccaccacgcccggctcattttttgtatttttggtagagacagggtttcaccatgttggccaggctggtctcaaactcgtgatccgcccatctcagcctcccaaagtgttgagattacaggcatgagccaccgtacccggcctctttttttgttttgttttgttttttgttttttttttggttttttttttgagacagagtcttgctctgttgctcaggctgaagtgcagtagtgcgatcctggctcactgcaacctccacctcctgggattgcaagcgattctcctgcctcagcctcctgagtagctgggattacaggtgcacgccaccacacccggctaagtttttgtatttttagtggagatggggttttgccatgttggccaggctggtctcgaattcctgacctcaggtgatctgctcgcctcagcctcccagagtgctgggattacaggcgtgagccaccgcggccggcctcacctcatttctgaccaaacacaagcatgtccctgccatgatgtttaccaaacttggctccaaatgtcttttgcaaaagtcagatttcactttaaaggatgaggaaagtggttcaggttcccaaaggagttcctaaggaagtcgacaggtctgggaggtggcagcagcttgttggccgcttgttgggaaacagagctggtgccctgaggtaacccctcaggagtcattacttggcccagccccattctcctgtggtgtgtacgttctgggacatgcctcatggatctccttgaacaaagggggcagcaagtggctgggggccagttgctgaggcaaaaagtggagggtaacaaagacagaaacagagggagagatctcaacagagaagatgagaaagggatttaagggaaactagaagagaaaaggggcaggaggcggtggcctcatctgctccaagtgctgtccctcccacccaccttccatctgcccttccaggactcaccgtagttcatgggcatcgggtgggtggggggcatgggctgtgggtagccagcagggtgaccgtagccaggctgcgggtagccagggtaggcaggataccctcctggcaggacagatggctgcccatagcccccagggggcggagggcctgggtacagggggttgcggtcttcatatggtggtggggcgctggggttggacatggctgctcacgggctgagggggaaccccagctgctgggacctgaaatgggagaggagaaaagcaatcgtgaatgcccaggcccagctcactcagcctcatgggcccacttccagccttgtccaggctgcctccgtggagaggaacaccacctattttctccttagagggcagcgtgtgatttgctgtccacaggccacctccccaccaactgggctcctgtccctcctgcctttgcgcctgcttcttgtccacaggcctctcactgtgcagctccccagccataggaaagcaggaggaaggattcgctgaggagagagggaaccagggagcctgggaactccctgttgtggtttaagaaaaccttccagttttggtggcttgatggcagaaccagcgaagaagccagatgggccaggcacagcctcctggcgactcacagggccagctgggaccctctgaaagggtcagctctgcccctgccacagctgacggggatgccaggcctggaagccagagctgggttggagccaaggctcaaagtggagagccgggggaagaagtggaggaaaacaagctagccccagtgccagagctgccaggccccgaggaggaagggatccagggacccgggggccagtggcaggctgagtcaggaagcctgagaagcaggagtgggtggtacaggggctgggggcagggaggctgtgccaaagggccagcttgagacaggactttctggttccttcaaataacagcggtggcgtgtcagaaaggcatgcggcagcctgcgaccacagctgctctctggccttgctagggaagagagagtgagtgcacggcccctcgccctcccccttacccccaccctggagggggagacagatgttctgaatcccaggctctctgtgagttctacctgtcttccaggtgcagtgctagcagggaggacaaagagctgaggagtcaggccacaaggtcaagggaatgccttccctgcagcaggaagagccccatagccaggggagggccaagaaaccagggggagggaaccccaaactggagttggaagggacctcagggccataagccccaaatgctcacttcagatgagagaatgcaggccctgaacagggaagtgattccccagaaccccagaactcgcaggtcagtggcataaccaggacggaggccttccagatcctgggtccaggtccttcatgttatgcggtgctcttatgcctcctctgccagttactgtcctctgggcctggtggtcccctctgaggtagcagagatgcaggcttaggaggagctaaggaagcccctagagggcccctgcatccccagtaaggacaagccctggcagtctgggctcgacagggccaccacctcttctagagcatctacagggggctttaggatccccaaggaggacacccccagatgcaggtcagcagacaccagaggctctcagaggctctgctggaagcaagagagaccagcgtctctttttagggcacattgcatagttcggggatcaaataaaggactgtcttatctcttctcttttatgacaactgggataattcagagaggggaaggtggcagggagggttgaggagggggaattgaataaaagtccaggtctctaagtgggttattttgaggaaagctgttcttcatctccctagaggggctgggatagaaccagggcaagaatgtcaggtcagaaatacaaagctggcagggtgcggtaactcacgcctgtaatcccagcactttagaagactgaagtgggcagatcatgaggtcaggagttcgagaccagcctggccaacatagtgaaaacctgctctactaaaaatgcaaaaattagccaggcatggtggcatgtacctgtagtcccagttactcaggaggccgaggcaggagaatcacttgaacctgggaggcagaggttgtggtgagctgagatcgcgccaccgtactccagcctgggcaacagagtgagactccatctcaaaagaaaaaaaaaaaaaagcactggccggaaaggctctgtgggcagaaaccccaaccgtgatgtcaccatgacgtgtcccagcacctcctcagggtgcacctctgtgaaataaggtgggggcgacacgacctctaagcccactgccccctctaacaacagactatgattctgggaactcggctctgcagggcctgacctttgctcggccagagagctgcccctgctccctcctctgagccaagcagggcaaacagctaactttccagaccaagggactgtggcagccaccgggtgaaaggtgcctcagagagaagggtcagcctcggatgggccacggggactccaaggttctggtgcagctcagcgggtgctgactcagagcttcactcctgcctctcttgcccctccctttcaggcttttggtttcagaagcatgtgctagtaggcctgcctgcactgcacacagcagtttccaggccagtccttcgggtacctcagccaccagcccatccacaccagaaactaccatgaccatttcaactcactatgcctcagtttcttcacctggaaaatgggtctcacactagtaatagtaccctccacggggttgctataaaaattaagtgagaaaatacacatagaaggctgggcacagtggctcacgcctgtaatctcaacactttgagaggccgaggcaggtggatcacctgagatcaggagttcgagaccagcctggccaaatggtgaaaccccgtctctactaaaaatataaaaattagctgggcatggcagcaggcgcctagaatcccagttactcgggaggctgaggcaggagaatcgattcaacctgggaggcggagattccagtgagccacaatcgtgccactgcactccagcctgggtgacagagtgagactttgtctcgaagaaaataaaaaagaaaatacacataaagtgcttagaatgaaacccgacccctgatcaatggggataaaggttggttattttcattaaatccttacaacagtccagcaagttaatactgttattattattcccatttacaaatgaagagattgaggcacagaagaattaaatcacttggccaagataacctagctagagtgtgatgaagtcaaaatgagccccaagactgactcccaagcccctgctcttaatccctaacctgaaaacaccctgtctatccaaccttctcatcacttctgccatagcttccatctaaaaccctctcatgggttttagcctcaacaggaggctgacacaagtggaagccaaactactcaggccctccacaccaccacagggctcacagcctggccaacggccccaggagaagagggtggcccaggcttggagatacataaaggtcagagctggaaagaaactcacccaaggacagccaacccctcactttaccaactagacagccacagcacaggaacctgtccttggttaccgagctggtcctggggacaggacgagatcctagctgtctacatagagagacctgggcacaggagaggaaaccccagcattaacgctagccaggggagttgctaaactcagccacactcacctctgagcagtgccaagaacactgtcagactggcaagagcctccggggaccagggctgccgggtttggcagctttagagcctgctcttgggcttctgcccagcctccatgagggccctggccacttccacatcagcaaggcctccactagggatgaggtttggggctggcatctgcct

SEQ ID NO: 7707 - DNA, 675 bp, Homo sapiens
tctgcattggaaattggctgaatgacagtatgtgggtcctttgcaatttttctctgtataaagagtgccatagtggctgcatctgagcatgcctgcattcctacagatatctaaagattcctccatgtcaggcagttgaaagggtgattgcttcctctaggaggggacatttcctgttttcttagatctgacaagattcctccctgtccccaactatcaaagtatccgtttccagcaagatgagattcctcttcagttaaacaaaacttgctactttttatattttaaaaatctttatatatatatatacacacacacacacacatacatatacgtacacattggcacacatatatgtatatattttgaaaatttgctggatgtggtgactcatgtctgtaatcctagcactttgggaagctgaggttggtgggtcacctgagctcaggagttcaagacaagcctggccaacatggtgaaaccccatctttactaaaaatacagaagttagccgggcatggtggtgggcaccggtaatcccagctactctgtggctgaggcaggagaaccacttgaacccagaaggcagaggttgcagtgaaccaagattgcattactgcactgcagcctgggcgacagaacgagaccctgtctaaaaaaaaaaaaaaaaaaaaa

SEQ ID NO: 7708 - DNA, 680 bp, Homo sapiens
tctgcattggaaattggctgaatgacagtatgtgggtcctttgcaatttttctctgtataaagagtgccatagtggctgcatctgagcatgcctgcattcctacagatatctaaagattcctccatgtcaggcagttgaaagggtgattgcttcctctaggaggggacatttcctgttttcttagatctgacaagattcctccctgtccccaactatcaaagtatccgtttccagcaagatgagattcctcttcagttaaacaaaacttgctactttttatattttaaaaatctttatatatagatatacacacacacacacatcatacagtatagcgtacagcagttggcacagagtatatgtatatatttgaaaatttgctggatgtggtgactcatgtctgtaatcctagcactttgggaagctgaggttggtgggtcacctgagctcaggagttcaagacaagcctggccaacatggtgaaaccccatctttactaaaaatacagaagttagccgggcatggtggtgggcaccggtaatcccagctactctgtggctgaggcaggagaaccacttgaacccagaaggcagaggttgcagtgaaccaagattgcattactgcactgcagcctgggcgacagaacgagaccctgtctaaaaaaaaaaaaaaaaaaaaa

SEQ ID NO: 7709 - DNA, 313 bp, Homo sapiens
cagttttgtcttttttttttttttttttttttgagacgaagtcttgctctgtcgcccaggctggagtacagtgggttgatctcggctcactgcaagctccgcctcccgggttcacgccattcttctgcctcagcctccggagtagctgggactacaggcgcccgccaccacaccctgctaatttgttgtatttttagtagagacggggattcaccgtgttagccaggatggtctcgatctcctgaccttgtgatccacccacctcggtctcccaaagtgctgggattacaggcttgagccaccatgcccggcc

SEQ ID NO: 7710 - DNA, 297 bp, Homo sapiens
tttgtcttttttttttttttttttttttgagacgaagtcttgctctgtcgcccaggctggagtacagtgggttgatctcggctcactgcaagctccgcctcccgggttcacgccattcttctgcctcagcctccggagtagctgggactacaggcgcccgccaccacaccctgctaatttgttgtatttttagtagagacggggattcaccgtgttagccaggatggtctcgatctcctgaccttgtgatccacccacctcggtctcccaaagtgctgggattacaggcttgagcca

SEQ ID NO: 7711 - DNA, 4034 bp, Homo sapiens
agggtctcaacgcagactacgtgaagggagagaacctggaagccgtggtatgtgaggaaccccaaggtgagaactttgtactcactgtcccttgctgacgctttcctagttggtcccagcactgagcagaactgtgctagagaagcagggaagcacagaggcgtctgcttctagaatgtccggccagagcaaaagcctgccctgatgagcctgcctcccagtttcaggagcccaaagatgctggggtgacagccagggccatctgctgccatgcctgtgacttctgggcattgcggctgctcggcccctgcccttgattcgtccgtccgagccagagccccaggcacctctgctccccatcagcgaatacaattacatcctgaacagagccatggggaagcttttcacctagacctagaacttttccctttgcaaattgccacaggcaagagggaacttgggtaaaacccagaccctattgtcaacacctgtgcccctccctcccccttctgtggtcatcaagcactttctggattcaggagctgttggcaatttgaggtcgcataagttcaggccacaggcctagagtgcccaactgctcgaggcagatatgacctgtgcccacgggatgccaatgaggaggtccggaaaggcttgctggggtcggggagcagccgaggcctggtggcgcaggcagggagactaggacagctcaggcgagtgttgccagtggaactacagtgcagcagccgtggggactgggcctgggagaccaggaggggctcagcctgtgtggtgtgtactgggagccaggtgccctacaatgctgctgaagacgggtggcagtgctgcaccaaatgaactaaaataggcctgggttcagatgtggaaaaatggattccgctgtcgcatccactgtcatgagctttgccacggttagccaccacgaggccagcatctgtgtgggcaggtgctaggttgagccctttgtttaaaataacccttccagcagcgctggcaggaacacgctcattttttaggtgaggagatggaggctgagctgtttccagagcctgtccagctttctctttctctccccttgaccggcccaaaactgctcccaggctcaggagggaaggttgctaagcggccccccaggggatacaaagggaaacccagttctgttcccagcacgggcttgctgctgtatttgcttcttctgtgcaagacagagcagaattccttctgacggcctctttttcccctagtgaaatactccacgttgcacacgcagtctgcagagccgccgccgccgcccgaaccagcccggatctgagggccctgtccagctgcaggcatgcacaatggtgccaccgcttgtcacccggctccccccaccccttcatttggacccacagctgctgtgctgctctgtgccatcggctccttgttggtctgagtttcccggatgagctctgggtgtttgtgagtttggtttctctgccctgccccaagcgtgctgagacttggtgccgaaattcaagagccagctctgatagaaagccagcaccagcctcgggagctgctgagccaccaactcccaaagccagcctgcctccagctttactgagcacaggatgcgggggccaagatgatgctgaggcctgatgacatttatgcttaggggacaagagtttgaactcaagggactgtgacccctgcacactggagtggctcattgtggcaggtttctgccaatagacagcccctgacagtggcctcaaggagctgcaggtggggggctcagcctgcacccacttggagcccctgcaaggagcgaaccggtcagcaccaagtaacaccacacacacgcagcacccaggatgatggtttcacttcagtcttccccatcccaggttttatgttgctgggcttccggagagccggtccaagcggaggctttcagtgatttaagtacaaacatgcatctcgtgatagtcctgccttgagagcttaggaatcttccggataagtatgaagcaattcgtaggcctgtttcccatctgattccatagggggctgggtgtggccttccggttgacatgagaaaggtctttagcaatcatttctgcaccggagatgagttttatcctgtgttggggagaggtgctcaccctccaccctgtgtccctgttttggtagcaagagtgaccgatgtcaagaacgagcatcaaagccagaatcctgcttgtttgcttaaaaatgtaattgggggcggcgggggaggagaggggaaagagacattcgcttggtttagtgaaacgcaggtgactttgtagctctgtggtcagcctacttgtctgctctgagggagagtgcgtggggagccatgctcaccgtggcaaacacaggaaccccatgactcgcccctcacctggcgtggagctgcctggtttgggctggagcagagctggtttcctggaatgttcctttggcccacatatggttctgtcccggtgagctctgttgtcagaggctcacgggacagaaccacatgctagggtctagggcccctgtctactgatagtcagtttgctgtgtcagaaagcacttctgaaagcagatatgagtcaccagacaggcaggatcttacaaaactcacgggcctctttggtctgcatgatggccccatgcgtttcataggctgtccactgagcgggattgtctgctgagtgggattagccaactccagtttcttaaggaaaccactggaatctgcagcccccacatgcatctgtctaacgcatgcctcgtgttcgttttgcaaacatgcctgtggtggagggtggtcagttgtagccctgtgcgtctcaaggctgccttgtgaggccattcccagtgcgtgcccttgagctccttaccaccccttttcctgctcggccctttaatccctgacagacctggactgtgtggctgaagggggacctgcagcactgcagaaatgcctctgcgtggtgccatgaaggaaagaaaccttggcctggtctcgagaagcttcccatgcttcaggaagttagtaagggtggggtggcttgcaggattggcctgtttccagggcctcccacactcattggccagattgtgaactttgtcaggcttgtccctccctgataccaagtatgtcgagaaccgatggccccaccctctggctggtgctgggccggaggtggctatggaggattttggcatgcgtggcctgtcgccacctggacagcgtgacctcaggggttgtccactttacctttatggtgaggcctgtcggatggctaagtccttgaaaccctagagctgtgacgtagaatatgtgctgtctgtgagaccgtgttcccaggagcactgactgcagttgagagagacccattttgctctcccttaccgccccccgccccgggtgctttctgcacaaagcctagagcctggcactcaagcccaccggtggcagctcctagtgactggacatgcctggaagacccctcagccttctgtttgcagaacgttcatttcaggagcttctccttcccacagacatcttacacttgctcgacactgccacctgcagaagcctggcgggctctggtcaccatgtgtctatctgaaggttgcactggccagcatgggcctgtcccaagcgagaggggagacacagtggactgaaaggactggttgaaagtggccaatctctgtcagcttaatttggcagagaaaatttgtaacaactctgagcacatgctgggtgaagtcacagctcaaggaaagataaagctgggcggaaggaggtgtgcgtggcttctggggtgggacccagaggggaggctctgggacaggggctggggttcagtgccagggccctgaggaagaaatggggactgatctcaaaattccagaattccctgtacatctgttcacgtgcttgtgtccaggtgtgacttgtaaactgtctagtgtttgcattaaataaaatggcaccgagcaga

SEQ ID NO: 7712 - DNA, 2444 bp, Homo sapiens
tacatttacaatttactgaatgaattaaatcacataaagttagttactttacatcatcatatattaactgtgcttgacgcacagtaaacattcaatccatgttattttattaccgattttcctcaaaggaaaaatctactaagatacttacttacttacttaaaaaagaccagggagcaaacatatgatcattttaattacagatgattgaaatacagtgcaacagatgagacaaatacaatactgtaccagtttttaaaaacctgaaccataacggcttcgcattctagtacacttacttacttaaaacaaaaattgcttagataacaaaactatacttcaagttgttttagaaacagttctgcgctaggaacatacaaaggaaaatgacccgttgtgcttctttaaaatcgaatgagagtctcctctagggtcctgctgacagagccccccccagcctccgccaggtgaggtgcacagggcccactccaggcaccagctccccccaacttggcttctctggtttgtcgaaggcatcatccagtccacactatgtttaacagtcctagtcagccaggggattacatatttctgggaagaaaatggcaaatgtccccattaaaaaaaaaatcagtatatcaataatccagtatatccattcataaataagctttcagatatgttaggaacataaaagctattgttgaacacgacttagcaacaaatcccacatatgataaaaaatggagaattgattttaggttatcaaattaccttgaataaatctctctggtatcttcttatagaaggataattttccgtaagaatcaggaggttcccagttaaaaaaaaatccattctttctctctctatgaaaaaacccttaacatattttcaaaaataataaggtcaatctgtaggcctttgcctggaatccagtagtttgaaaccaaccagctaacactgctatgcagtcacactggggtttgacctcaggggccgctgcagctgcctctgcctctaaaggctgaattcctgcagccagtggcggggtgggggggcagctgcagcaacaggcacggcacatgggaggggcatggcctgctggggcaggacccaggtgtgcaatagtcatctgtggcatgtcacacagaggagctcagagctatggcgctcaagtggattgaaccaattggtaagttagttaattcctgcgagaaccgacggagtcacagagctcaaagtcagtaagtaaaggttcaggagcgggaagagagggctgaccagctgcggtcggctctgggaagggaaaaccaagggaagtgcgtgctatgcttttccaaaccaaagccacagcacggtggctgctttcaaatatgaacaggcagccacgcgagtaagctgagttgaaggaattgtgataaaatgagaaatgatttcatacaggcaaataacataagaacagacttgctttgatcccagcagctggctgcggtaaagtgggggtgggagacatggctagacagcccaggagcgagtgacaggcagtgctccttgaaggagccagaggccagcacctgtgcacagctgccagaggcctcggtttaccctcagcggggctggaagactgagcatggccgcttggtgccatccccatgaatgggctgagccgccccaagaggcgagtaccagagtgaggtgaggacagaacacgttgcccttgaaattgcaccacagaaaaacgagcatgaggtttgttggaaaagaatttctcccacagtacagttgagctgatcccccctcgggtgactattctaaacgtaaaaaaggacataggaaaataaaggcctgtttctcttctctaaaaataccttatatgtacacaacagtaattgttaacaggaggaccccgtgcatgaagaaaactgtggaacagagggcagtggcctgtcttctccccaagtacttcattcaagacagttttcaagttgtggccaagagctgagggaagccacggggctggcaatgcatcttgaagtgagtggtgtttgttgttactgaaggatttaagttggaaagaaatggcgtacagctttcttgaacctcagtactgcattccgttcacttagtttctcccaagctgcctgaatgccagaagttgcttcacagggtgggcgtgacagacggctcccctgtgaaaccgctgacaggagggtaacggttgccaacagtgggagctgtcacctagccacacaaatggtccctgggcctaatcctaaaagacaagatcacaagctacagccataacagtgatcgccaggtccctttcctgagccaccgggagacagtggagcagcaggctgacctcgcccatcagaccgaggtgtggacggaggtggcggagtgggagggcgaggagccccgctcagatgaggatgagacgg

SEQ ID NO: 7713 - DNA, 10852 bp, Homo sapiens
ggtaagagggactggctctcagtccccgcctcgcggggggtgcctcagccccctgcgatgggggtcctaagggccaggaggggaagagggggagaggatgataataatttcagcatcgccggctgtgttcacccagcctgtgaaattgttattaatatcctgaaagggagagaatgatattactccccgtaatagacagatacgactccgcataatagagcacgaggtatacacccaccctgtgatattcttcctcatattcagaggccaagaagttgatattactcgtaatatcgcaggacgtatacaccctcgtgttagatggtccttaataatattccaaggcggagtgggcgatgtgactacatatatggcagaaagtggaaacccccctgggatattgttcccacgatcctggagggaagaaaatgatattactttcaatatgacagaaggtggacatgccaccactgatattgtttctaattgcaacgtgggagaggaggatatgacacgcgatatcgcagggagtagaaacacccctgtgatactgttcttaatattcagggaggaagaggatgatattactcccaatacagacgggtgtacaccctctgtacaccaagggtgtacacctgtctgtgaaacagttcataatctccagaggtctccagagggggagatgatattactcacaatatggtaaacaggctgtgagtccactgcggatcctaagagccagggggggaagaggggctggctctcagtcaccacagtttgggggggcctttatgttcaggttttgcccaagagtcagcttatttgcttctagtactagcagagtagttgctgccaaggccctcaaacaggggggccatcctgtagaaaccctgtctacttgtttagagacttaggccaccggcctcagccaggtccccacagtttgggataaaagtccagctgccatcttttccctctctgacgcatacaatggaaaaggctttgtcagatccggtagccccagggctggggctgccagaagtttttcctttaactcctgaaagccttcctgttgttgggatccccattccaaagcttcccggtccccgccccctttgtgacctcatacaaaggcttggctaatactgcaaagtttgggatccacagtctacaaaaccccacagctcctaagaattctctcacctgccttctgcccttaggctccggtagattgcaaacgacctgctttcttcctgatcccgggctgcgttcggacccctgtggtatagtaaatcccaagtaaggtacctgcggtcggcagatctgagctttcttcttggacacctaatacccagggtcctccaggtgggtcctaaggatcttaggattcgcgatgggggtcttagccagggggggaagaggggctggctctcagtccccgcctcgcggggggtgcctccccccctgcgatgggggtccgaagagcctgggggggaagaggggctggctctcactccccgcctcgcggggggtgcgtccccccccctgcaatgggggtcctaagagccagggggaaagagccgctggctctcagtccccgcctctcagggggtgcctccaacccactgcgatgggggtccgaagagcctggggggggaagaggggcaggctctcagtccccgcttcgcggggggagcctccccacacagcgatgggggtcccaagagccaggggggaagtggggctggctctcagttcccgccttggggtgtgtgtctgccctgctgcgatgggggtcctaagagcaagcgggggaagaggggctggctccggtagattgcaaatgacctgctttctttctgatctcgagctgtgttcggacacctgtcggatagtaaatcccaagtaacgtcggcagatctgagctttcttcttgggcacctaatacccacagtcctccagttgggtcctaaggatcttaggatccgcgatgggggtcctaagccagggtgggaagaggggctggctctagtccccgcctcgcggggggtgcctccccccttgctatgggggtcataagagccagagggggaagagggtttggctgtcagaccccgcctcgcatggggtgcctccccccactgcgatgggggtccgaagacccgggcggggtcggggggggcggagaggggctggctctcagtccccgcatcgcgtggggtgcctccaccccctgcgatgggggtccctagagccagggggggaagaggggctgtctctcagtccccgcgtcgcggagggtgcctctcccccttgcgatggggttcccaagagccagtgggggaagaggggctgactctccgtccccgcctcgcggggtgtacctccccccactgcgatggtggtcccaagagccaggggggaagtggggctggctcgcagtccccgcctcgcatgtggtgcctccccactctgcgatgggggcctaagagccagaggtgaagaggggctggctgtcagtccctgcctggcgggggttacctccccctctgcgatggcagtcctaagagacgggggaaagaggagctggctctcagtacccgcctcgcgtggggtgcgaagcgcctgcgatgggggtcctaagagcccgtgggggaagaggtgcaggctctccgtccctgcctctcggggggtgcctctcccccctgcgatgggggtcctaatagccagggggggaagaggggctggctctcagtccccgcctcgtgtggggtgcctcccctccccgcgatggggatcccaagagccggggagaagtgggtctggctctcagttcctgcctcgcagggggtgcctcccccctctgcgttgggtgtcctaagagccgggggggggggaaatgggcttgctctcagtccccgcctcgcggggggtgcctccccccactgcgatgggggtcctaagagccacgggaggaagagaggctggctctcagtccctgcctcgcggggggtgccttccccacccgcgatggggctcctaagagccaaggggggaagacgggctggctctcaatcctcgcctcgccgggtggcctcccaccctgcgatggggctcctaagagccacggggggtagaggggctggctctcagtccccgcctcgcggtgggtgcctccccgccctgcgatgggggtccgaagagcagggggaaggagaggggctggctctcagtccccgaatcgcgtggggtgcctccaccccctgcgatgggggtccctagagccagggggggaagaggggctggctctcagtccgcgcctcgcggaggatgcctcccccacttgcaatgtgagtcctaagagccagaggtgggaggggctggctctcagttcccgcctcgcggtgtgtgcctgccccgctgcgatggaggtcctaagagcaagggggggaagaggggctggctctggtagattgcaaatgacctgctttttttctgatcccgagctgcgttcggacccctgtcggatagtaaatcccaggtaaggtacctgcggtcggcaggtctgagctttcttcttggacacctaaaacccccagtcctccaggtgggtgctaaggatcttagaatccgcggtgggggtcctaagccagcgggggaagaggggctggctctcagtccccgactcgtgggcggtgtcttccccccttgcgatggggatcctaagagccagggggggaagaggggcgggctctcagtgcccgcctcgctggaagtgcctcccacccatgagatgggtgtcctaagagccaaggggggggaataggggcaggctctcgatccccgcctctcggggggtgcctcccccccttgcgatcggggtcccaagggccagggggggaagaggggctggctctcagtccccgtctctcgggtggtgcctcccgccactacgatgtgggtcctaagagccgggggtgggagggtctggctctcagtcaccgcctcgtgaggagtgcctcccccgctgcgatggaagttctaagacacagggggggaagaggttctggctctcagtccccgcctcgcggggggtgccacgcgcctgcattgggggtcctaagagccatgggggggtagaggggctggctctcagtccccgcctcgtgggggttgccccccccctgcgatgggggtctcaagagcctgggggggaagaggggctggctctcagtccccgcctctccgggtgtgcgtcccccccctgcaatgggggtcctaagagtcagggggagtgagcggctggctctcagtccccgcctcgcagggggtgcctcccccgcctgcgatgggggtccgaagagcctgggggggaagagaggcaggctctcagtccccgcttcgcgggggttgcctccccgcacagcgatgggggtcacaagagccaggggggaagtggggctggctctcagttcccgccttgcggtgtgtgcctccccccctgcgatgggggtcctaagagccaggggatgaaaaggggctggctctcagtcctcgcctggcgggagtgcctccccccccgcgatgggggtcctaagatcctgggggggaagaggagctctctctcagtccccgcctcgcggggggtgcctccgactcctgcgatgggggtcctaagagccaggggggtaagaggggcaggctctcagtccccgcctcgctgcgggtgcctccgtccctgcgatgggggtcctaagaaccagggagggaagaggggctggttctcagtcctcgcctcgcggggagtgcctccctccactgcgatgggggtcccaggagccaggggggaggtggggctggctctcagttcccgcctcacgaggggtgcctccccccactgcgatgggggacctaagagcaagcgaggggaagacgggctggctccggtagattgtaaatgacctgctttctttcttttcccgggctgcgttcggacccctgtcgattgtaaatcccaagtaaggtacctgccgtgggcagatctgagctttcttcttggacaccccatacccacagtcctccaggtgggtcctaaggatcttaggaaccgcgatgggggtcctaagcccggggggaaggggggctggctctcagtccccgcctcgcgtggcgtgcctcccccgcttgcgatgcgagtcctaagagccgggggtgggagggactggctctcagtctccccctcgcggtgggtgcctccccgccctgcaatggggatcctaagagccaggcggggaagaggggctcttctctaagaatcaaaacactgtcacctttagcagtgaaggatccagtgagatccagtttaacggtcataaccgcctactggtccaacgttcagaagtaacacaggcacctggacaatacacagtagatgtggaaggacgcggttgtacatttatccaggttacagaaatctgcctaagagggtgatgagtgtttgccagtaaaagagtcagactgtctgttcagttctacgtgaagtgttatttgaccgttttgtgtatttacatgatcaatagccaaaattgcaagttactttatgaaaagctactcagctgtctaagagaagtttgaggaatattgctattagaaagtattctatcttcattaaattacgttattctgaaaactaaagaatttaacctgattccctgatgataaagatgtaaactgcattagtaatagaaataaacaataggttctttctttttaaaaatgttttatttttaatttttgtgggtacatagtaggtgtaaatatttaccgggtgcatgatacaggcatgcaatgtgtaagaatcacatcagggcaagtggggtatgcatcacctcaagcatttatccattgtgttacaaatgatcgaagtatactcttagttattttaaaatgtaaaatcacattactactgactatagtcagactgtataattcttaatacaggatgggttttcttataatttgctatcctttctaggccacccttaagtacaatgttctcctacctaagaaggcatctggattttctctttccttggaaatagtaaagaactactctttgactgtttttgacctcacagtgaacctcaagtaagtgtcatattttgacagtaactcccacgtgaacaagatggtaaaatattttaaaagttcaaacagtagtgaaataacaaaatataaatcatggtaatgagttctcatgttggtggtgacaattctacagcacagtcactttttagccgtctgtccggacaccacaatttagtacatcttcagctaaatcagagctaaaatgaggcaagaaaacatgcagtctatgtgagcaggatttgaaagctttcactgcactgatgtttcaatgatactttttattctgttgtatggaagtactcctagttttgaaaaacagagattctatatttctttctcaagacaagcatgcatggtcatatagtagcaagcccacaaatgtttattttgtaactgtaaagagtaacattttagatttttacttttcagaatagaaaaacgaaatgatcctcttgaattcaagcatgatttatagatgctaaaggcttttagccttagttaatatgtggaaaacattgagtaaaattagtttgggagatattttttagaatttctaaataaaaatcgcttgagctccagggctaagaactcaatgaattggggaactctttttcttttttggttttttttttttttttttttttttgagacagagtcttactttgtcacccaggctgcagtacagtggcacagtggcacaatctcagctcactgcaacttccagctcctgggttcaaaggattcttacggctcagcctcctgagtagctgggattagaggcgtgcaccaccacatctggctaatttttctatttttagtagagtcagagttttgccatattggccaggctggtcttgaactctgaccctcaagtgatccacccaccttggcctccagaagtgctgggattacaggtgtgagcaaccacgccctgatgaactatggaactcttaacttcataccccaatagtcttatccagaagcaggaaactgagctagaagttctcctggggacacatctactctataattatgctcatataccaccttttaagcaaagatgtcctctaagtgttacgcaactctaacactaacctaagtatatgtaaaagatttagaagctctgtttatcagttcaaactttgagactgcaggtaagcttaaaagcagggtttggggaagatttcatgtccagataattcattatttgctccaatttctgttgctatgtatcatctctttcattatcattctggttgtgcctattcacagatgcttgaaaatgactttcttccgatattttctcttcagcttttacctgtcctccagatttctagccaattagtatttatccacctggcactctcattatgagataagtcactttttaaaattgatatctaaacgagtgttttcttaaaattttcagatacactggaattcgcaataaatccagtatggtggttatagatgtaaaaatgctatcaggatttactccaaccatgtcatccattgaagaggtaaataatagaagcctaatctttcatcacaaagacagctacatagagtataaagataaaataaatacttgtttagccgtagtttagcaaaacaaaactatagaattcttcttcaacattcacctttgtatttttgcgctaacactggagagctggtgtacttcatttgtaccaattagcagtcagtatttcccatggttcatcatatgtttttctttagttgctacctgtgtttatgaaaacatcatggcaccaaggaatgttccataaaacagaacgtgacgtagaaaagagtggacattcagttctgcagtggcgctgtcatttgttctaatatctattctctatccttccctaacaatttcttcaaagcttgaaaacaagggccaagtgatgaagactgaagtcaagaatgaccatgttcttttctacttggaaaatgtaagtttagccatatttttttttctttaaagtttttcttttttccttccaaggataattggatgcttcaatttcttatagatatgtatgataggatttgtaaaaggaaaaaataagggacgttaaggattaccagtgttttatcccactgatcatcttctccttgctagttccaaggctatttcatatatgccctggctatgtgactagatagctttccattttagaaacatcatctccctatcaaacacagtctggtcacagagtagatatgtaattattttataatttgactaaagtcttacaaagtttgccataattttttgaaattacaattgtgtattgaaggtatgtggtgtgatgttttgatatatatagtgagctgattgttatcatctagcgtgactatatgtgaattagctggctaacacatccctctcttcacacagttacctcttctttttttgtgacaaagcacttaagatctactcccttagggaatattacatatacagtacagcattgttaactgtaggccaccgctgtacctgagatttgtagaatgtattcatcctgcacagctgaagctttctatcctttgaccagcatctccccattttcccatccctgataactgccattctactgtctgcatctatgaactcaactttagatttaacttacaggtgagatcctgcagtgttttttgtgtgtatctggtttgtttcattccacataatgtcctccaagttcttcagtgttgttacaaatggcagaaattctttcttcttttaaggccgaataatttgtatgtgtatatgcctcagtttcattatccattcatctgtttcgaacgcttaggttgattccttatgttggctattgtgattaatgaaagaattagcatgggactgcagctgtctcttcaaaatattcatctcattttctttggatgcatacccagaaatgggattgctggatcatagggtagttctatttttattttactgaggaaatgccaaactatggcatgcgctttagagacatcctttctatgtgtattgttaccactcacataaatgcctacattcctctgagacttccagctaaattcctctcacctcaatgtaagcaaaggaacttgaaattttatatgatttaaggttaacaactcattattttgccaatatgtaagttaatcataccctagatctatttaattatgtagatcataaacttctgcggataattttctcagtgattatcttttctcagacctgctacaatgtaattataatttgtgtcatgataggtttttggtcgagcagacagtttcactttttctgctgagcagagcaaccttgtgttcaacattcagccagccccaggcatggtctacgattagtacgaaaaaggtaggcaagcaacagccatgccctaaggttattgaatgtggtgtttatatctaacattccctgagctactaaactttccaaaatcaacctctgtcttcacagagtaaacaataaatggcattactttgtgttctggtttctttatcccatgatgtgtcttctgactgaacccattttccagttaccagagtttttcaacaccagaatccttgcaatataacctgacagggctccacttgaacttgaaatacaagccacactaagcttccaggtctttttgttattgtcattgttgttcatgctaagactgactgttccaagctacttctgtggactttgacttaaaaagaggagtggggaatattctgaaatgttaacttaaaaatttgatagattaatttctaaaacatatactaaaatgttgtagagaccatacaactgttccctggaaggttggtactatttatttcttgttgaatgctgtgtgaagtttgtggagtgtttgaattctgtctctatcatttactaatagaatatatttcatcaagtgtcttaaatattattagcatatttctgcataatgtataaaatgggaaagtaattgtctctatttcaaaattattggaaggattagatctaatgtgcttatatcatctatttaataaaaatacatgttccctttattttttcagaagaatatgccctagctttttaccacatcaacagtagttcagtttccgagtgagacaaagcaattactggaagaagtaaagaaattttattacgtcataaaccattgaaaacacatctagtaagaaaatgaaaacctgaataagataggacaatagttgaagaaagaaaagtctctggtacttcattagacttgtgtagctgtgtactgcatgagtaatctgataatcattaagattatattaatttctttaaaaatagctttaaagaattcacagctatatatgtaccttttataaatctctcatttttgttttgtaagttgacaggtcagtaaaaatttaggcatatatatttgtacatatgtgtgtatatgtatatacatgtctatgtgcctatatatgcatgtttttatttctaaatatctatttatatatacatacaaatgtgtttattgtttaaatgatgttttaaatcccaggtggagaagcatttcttttaacaaactgattcttctgtatcaaacctggaaaaaaatcatgaaccatctgacatcgtgaacagtctgcagtgggctatggtttcttgacaagtcttatttccttatcatcccattaaatgttgtcattttgcatctga

SEQ ID NO: 7714 - DNA, 418 bp, Homo sapiens
ctcaactgacagaataaactcctgttgtttaaaaccagccaggtgtggcatgttttcacaagagccctaggaacccaatacatcgactttcaagggccgcatcccactgacttcgaagcaggcctggatctgtgtgttgtctcagttctgggagctcccatgagcctgcagagagactgcagggtcttcctggacagttcctgaggaggaaagagagactcagaggattgccccgatgttgcccctccctcctcctaaactctgctgggctctcccactcccccaggaagacttacttccctgctaacttctgccctgcaagttgaccctgacattttcaagtgccacccgcccctgtgaacttgaatggattgcgctgttctttgcacaagaacagaaacgtctgcctggagtgcag

SEQ ID NO: 7715 - DNA, 4544 bp, Homo sapiens
tttttttttcttttgagactgagtcttgctctgtcgcccaggctggagtgcagtggtgtgatctcggctcactgcaagctccacctcctgggttcacgccattcccctgcctcagcctcctgagtagctgggactacaggtacccgccaccacgcctggctaattttttttttttttttgtatttttagtagagacggggtttcaccatgttagccaggatggtctcaatctcctgaccttgtgatccacccgcctcggcctcccaaagtgctgtgattacaggtgtgagccaccgcgcccggcctttacgttgaattctttaaattcagcttgtgactttgcacttcaggattctgagtgttctctgtcttcttcctgcattgtttttcttataccatacaggtttttcattggccttgactttttgttgttaactcattcttctttgggtttattttcatttgtttctgctgaatattatttgtttcaaactaaaaataacattccacattttaattgatgtgcggactcttaatctacttaaaatgtgggctgaagttccatgattccagctagtctggaataggtcatttaactggatgttaattcacctacattgttccctaagtgacatgtgggtcccattctgctgacatatttgtgggtcctggtaacaaccatttgggtagatttgctgattcctcttttctccttagtggaagagaaagccaatacccacctcctcttgggcatgtgcttagacgcctgtgctcgctaccttctgttctccaagcagccgtcacaggcacaaaggatgtatgaaaaagctctgcagatttctgaagaaatacaaggagaaagacacccacaggtaagggaggaaaacacagaagggggaatataaaacaaaggcttcaaaattgaagggtgtgaaatgtcacactcattggtaacaggatcagcagatggtcctagatcctccttggtccccagtctactcattttcttatcaccagcaccctcaccccaactacttgtttcagaaaggatttgagactagttatcagttactaggtctgcccagaactttttgcatgatccatggtttgcacaacagagcaacctttctacagagcaggactggtcaggcttcaatggacacagcacagtatttcagagtggggtctctagatacccctattagaagcttatgaggaacggtttaatacacaaatatccttgcctcccttgccccacagttaaaatggcaagaggtgagggaagggcaagggaccacattaaaaacacttaaaccattggcatattatagaatttaagtataacgtgtaaagctctgtgttagaacattaaacacattgaattgaaatcatctctttgggtctcccctccatccgagtaagttcttagatgtaaggagtgcattgctttgtctatgaatgcttgctactgccaatataagacataacaattttaactgaatgtgtcccaaggctggggtacatgggtagggtgagtaatatgttttggaagaaaagggaggttgagctatgaattatctccatgaaagggatttataacttattatgaagagtcccttaatggagtgaggaataataaacaagcaagtacagaattcagatctccaagtactagagtcagggggcttaaagcatggcatcagtggggaagtaggtatggaagtctacctcttccatactgaaattccatttcagtagccaaattaaaaaaactcctactgggcatcttcctaaaatagatggtgtatttcttgtttttgatgagcctcagggttatcagcaggaacaacataatacagtggggctccagaggcaatcaaaccataggaggctggcttctcaaagttgctcagccttaaaggagataatatgtgtagcttcttgctgttgtttttcatttggtgcttctaactgggtaattagttggattaataagcactgtctgttacctaatttccagatttgtattatttcccaaaaggtcgaactaacattgtccactgtacaatgtgattatgattaacaaatgcccacaaatttgttaaagaatggtatccctcatcttttgtggaatgctaggaaagatgaaatcttatgtattcagagttggatgcactccacattaaagttctgtgaaggcatgtttttaaagaaaaaattgttttttcttttacatacagaccattgtgctgatgagtgacctggctactaccctggatgcacagggccgctttgatgaggcctatatttatatgcaaagggcatcagatctggcaagacagataaatcatcctgagctacacatggtactcagtaatctagctgcagttttgatgcacagaggtaggtagcaatgtaaacttaactgacttgctttaagggagggatgtcactggattgatagatttgtgaagtggtatgtagggagggcaagggccaacgaataaacatgtaaattaaaagactggttgaatggcagaaaaaggaggtattgattaggttgaagtactattgtgttcaattcacgtaacttctacagacctgcactagcctgtcgaaccccatcaagctggagaaaaccttgcaatgatagtaccttacgtcagtagtgctttacagatttctaaatgtgttcagttacaatgtgtttctcacagtgtgctggtgaagctttatgacaggaagtatcattttgtcagacatttcttagtgtcagcacactataccgatcattttcagaaacctgggatgacaggtgtattacacataccaccattcatgaaatcttgggctcatcaaagtcctcaggatatactggaaagggccgttaggaatcccacagcattcagtggagttccagcctgtcagatggggatgaaatgaggcagcaccagcttgtcgcttcataagcacacagtaaattagccctatatctgcattcatgctctctcttcagaatcaccttgaaaacatacactttcttcttactgtcccttctctctgggttattttagaacgatatacacaagcaaaagagatctaccaggaagcactgaagcaagcaaagctgaaaaaagatgaaatttctgtacaacacatcagggaagagttggctgagctgtcaaagaaaagtagacctttgacaaattctgtcaagctctaaatccatttttgtgtagggagaataatgtctagtaatgtggaagaatagctatcattcctgtctctgtggcacccgatcaatggcttaaatctgtcgtttttgatattcaggtttcctcaatttagccttagtgaaggaggggttgtacacactgccatttttgtattttaaaggaaaaatgactttcattcccaactgattatgacctttcaggatgtcgtcaagtgatgctttcagttgtaacacgtgacttggtgctgtccctgctggtctaagtagaactgtagattcatatgggctggtgttcctgtgcgctgtgggtgtggtgattcagcctggcatttctaccataagtttttggtctgctgatttgctgccctgtcttctcttactttactttatcaatacctggcaaactgaccagaattaccttcctcatggcaaagggggattatggtgaattgttgttcttatagtctgtttcatgaagcacaagtggaatttaatacataaaagagaaaaatatcttagtttgctaccagcatccagcatgaagttgtaaagtggggattaggcacgtgacagtatagcacccatttgaatttaaataaaagtgaaccatatttatctggttatataaaactaaaaatgggggtgtttatataaaactaaaaactaagaatgatgtaaccttttgtctgtgttatctgaacactctacttcctttgcagccttagtcacacaactgagtcatctcaagtactctttaaggacacacagcccaggctgttctgagtcagaataggcccctacaggtatattttaaaactcttcgtaattctaatgtgtactgctggtatagctgaactactgacctggatcttagtcctagcctttttgcttttgcaatttcagtatcttcatctctaaactagggaaacactgggattctttcttagctgtgggggaaggtatttggttagatgactttgaatgaatagactgctgtgctgaaagagctttatcacactgtctcaaagtatgtaaagatacataggtggatgctcttactgcagcagtcatgaatacatttttagccatttacctaaggaaaaagacagtttttctaggtaccatgaaggaagattgaccctgttggtatgcctgtgggggtgggatgtgagtgggactgataaactgatacttttggttcgtatgtacatactggaagaatcttcataataaatgagactacacaacaatattgtatgtatcccagtaatctttgcatttctcaaaaaaaaaaaaaaaaaaaaaaaaa

SEQ ID NO: 7716 - DNA, 120544 bp, Homo sapiens
  SITE (66414): n equals a,t,g, or c
  SITE (66415): n equals a,t,g, or c
  SITE (66416): n equals a,t,g, or c
  SITE (66417): n equals a,t,g, or c
  SITE (66418): n equals a,t,g, or c
  SITE (66419): n equals a,t,g, or c
  SITE (66420): n equals a,t,g, or c
  SITE (66421): n equals a,t,g, or c
  SITE (66422): n equals a,t,g, or c
  SITE (66423): n equals a,t,g, or c
  SITE (66424): n equals a,t,g, or c
  SITE (66425): n equals a,t,g, or c
  SITE (66426): n equals a,t,g, or c
  SITE (66427): n equals a,t,g, or c
  SITE (66428): n equals a,t,g, or c
  SITE (66429): n equals a,t,g, or c
  SITE (66430): n equals a,t,g, or c
  SITE (66431): n equals a,t,g, or c
  SITE (66432): n equals a,t,g, or c
  SITE (66433): n equals a,t,g, or c
  SITE (66434): n equals a,t,g, or c
  SITE (66435): n equals a,t,g, or c
  SITE (66436): n equals a,t,g, or c
  SITE (66437): n equals a,t,g, or c
  SITE (66438): n equals a,t,g, or c
  SITE (66439): n equals a,t,g, or c
  SITE (66440): n equals a,t,g, or c
  SITE (66441): n equals a,t,g, or c
  SITE (66442): n equals a,t,g, or c
  SITE (66443): n equals a,t,g, or c
  SITE (66444): n equals a,t,g, or c
  SITE (66445): n equals a,t,g, or c
  SITE (66446): n equals a,t,g, or c
  SITE (66447): n equals a,t,g, or c
  SITE (66448): n equals a,t,g, or c
  SITE (66449): n equals a,t,g, or c
  SITE (66450): n equals a,t,g, or c
  SITE (66451): n equals a,t,g, or c
  SITE (66452): n equals a,t,g, or c
  SITE (66453): n equals a,t,g, or c
  SITE (66454): n equals a,t,g, or c
  SITE (66455): n equals a,t,g, or c
  SITE (66456): n equals a,t,g, or c
  SITE (66457): n equals a,t,g, or c
  SITE (66458): n equals a,t,g, or c
  SITE (66459): n equals a,t,g, or c
  SITE (66460): n equals a,t,g, or c
  SITE (66461): n equals a,t,g, or c
  SITE (66462): n equals a,t,g, or c
  SITE (66463): n equals a,t,g, or c
  SITE (66464): n equals a,t,g, or c
  SITE (66465): n equals a,t,g, or c
  SITE (66466): n equals a,t,g, or c
  SITE (66467): n equals a,t,g, or c
  SITE (66468): n equals a,t,g, or c
  SITE (66469): n equals a,t,g, or c
  SITE (66470): n equals a,t,g, or c
  SITE (66471): n equals a,t,g, or c
  SITE (66472): n equals a,t,g, or c
  SITE (66473): n equals a,t,g, or c
  SITE (66474): n equals a,t,g, or c
  SITE (66475): n equals a,t,g, or c
  SITE (66476): n equals a,t,g, or c
  SITE (66477): n equals a,t,g, or c
  SITE (66478): n equals a,t,g, or c
  SITE (66479): n equals a,t,g, or c
  SITE (66480): n equals a,t,g, or c
  SITE (66481): n equals a,t,g, or c
  SITE (66482): n equals a,t,g, or c
  SITE (66483): n equals a,t,g, or c
  SITE (66484): n equals a,t,g, or c
  SITE (66485): n equals a,t,g, or c
  SITE (66486): n equals a,t,g, or c
  SITE (66487): n equals a,t,g, or c
  SITE (66488): n equals a,t,g, or c
  SITE (66489): n equals a,t,g, or c
  SITE (66490): n equals a,t,g, or c
  SITE (66491): n equals a,t,g, or c
  SITE (66492): n equals a,t,g, or c
  SITE (66493): n equals a,t,g, or c
  SITE (66494): n equals a,t,g, or c
  SITE (66495): n equals a,t,g, or c
  SITE (66496): n equals a,t,g, or c
  SITE (66497): n equals a,t,g, or c
  SITE (66498): n equals a,t,g, or c
  SITE (66499): n equals a,t,g, or c
  SITE (66500): n equals a,t,g, or c
  SITE (66501): n equals a,t,g, or c
  SITE (66502): n equals a,t,g, or c
  SITE (66503): n equals a,t,g, or c
  SITE (66504): n equals a,t,g, or c
  SITE (66505): n equals a,t,g, or c
  SITE (66506): n equals a,t,g, or c
  SITE (66507): n equals a,t,g, or c
  SITE (66508): n equals a,t,g, or c
  SITE (66509): n equals a,t,g, or c
  SITE (66510): n equals a,t,g, or c
  SITE (66511): n equals a,t,g, or c
  SITE (66512): n equals a,t,g, or c
  SITE (66513): n equals a,t,g, or c
  SITE (66514): n equals a,t,g, or c
  SITE (66515): n equals a,t,g, or c
  SITE (66516): n equals a,t,g, or c
  SITE (66517): n equals a,t,g, or c
  SITE (66518): n equals a,t,g, or c
  SITE (66519): n equals a,t,g, or c
  SITE (66520): n equals a,t,g, or c
  SITE (66521): n equals a,t,g, or c
  SITE (66522): n equals a,t,g, or c
  SITE (66523): n equals a,t,g, or c
  SITE (66524): n equals a,t,g, or c
  SITE (66525): n equals a,t,g, or c
  SITE (66526): n equals a,t,g, or c
  SITE (66527): n equals a,t,g, or c
  SITE (66528): n equals a,t,g, or c
  SITE (66529): n equals a,t,g, or c
  SITE (66530): n equals a,t,g, or c
  SITE (66531): n equals a,t,g, or c
  SITE (66532): n equals a,t,g, or c
  SITE (66533): n equals a,t,g, or c
  SITE (66534): n equals a,t,g, or c
  SITE (66535): n equals a,t,g, or c
  SITE (66536): n equals a,t,g, or c
  SITE (66537): n equals a,t,g, or c
  SITE (66538): n equals a,t,g, or c
  SITE (66539): n equals a,t,g, or c
  SITE (66540): n equals a,t,g, or c
  SITE (66541): n equals a,t,g, or c
  SITE (66542): n equals a,t,g, or c
  SITE (66543): n equals a,t,g, or c
  SITE (66544): n equals a,t,g, or c
  SITE (66545): n equals a,t,g, or c
  SITE (66546): n equals a,t,g, or c
  SITE (66547): n equals a,t,g, or c
  SITE (66548): n equals a,t,g, or c
  SITE (66549): n equals a,t,g, or c
  SITE (66550): n equals a,t,g, or c
  SITE (66551): n equals a,t,g, or c
  SITE (66552): n equals a,t,g, or c
  SITE (66553): n equals a,t,g, or c
  SITE (66554): n equals a,t,g, or c
  SITE (66555): n equals a,t,g, or c
  SITE (66556): n equals a,t,g, or c
  SITE (66557): n equals a,t,g, or c
  SITE (66558): n equals a,t,g, or c
  SITE (66559): n equals a,t,g, or c
  SITE (66560): n equals a,t,g, or c
  SITE (66561): n equals a,t,g, or c
  SITE (66562): n equals a,t,g, or c
  SITE (66563): n equals a,t,g, or c
  SITE (66564): n equals a,t,g, or c
  SITE (66565): n equals a,t,g, or c
  SITE (66566): n equals a,t,g, or c
  SITE (66567): n equals a,t,g, or c
  SITE (66568): n equals a,t,g, or c
  SITE (66569): n equals a,t,g, or c
  SITE (66570): n equals a,t,g, or c
  SITE (66571): n equals a,t,g, or c
  SITE (66572): n equals a,t,g, or c
  SITE (66573): n equals a,t,g, or c
  SITE (66574): n equals a,t,g, or c
  SITE (66575): n equals a,t,g, or c
  SITE (66576): n equals a,t,g, or c
  SITE (66577): n equals a,t,g, or c
  SITE (66578): n equals a,t,g, or c
  SITE (66579): n equals a,t,g, or c
  SITE (66580): n equals a,t,g, or c
  SITE (66581): n equals a,t,g, or c
  SITE (66582): n equals a,t,g, or c
  SITE (66583): n equals a,t,g, or c
  SITE (66584): n equals a,t,g, or c
  SITE (66585): n equals a,t,g, or c
  SITE (66586): n equals a,t,g, or c
  SITE (66587): n equals a,t,g, or c
  SITE (66588): n equals a,t,g, or c
  SITE (66589): n equals a,t,g, or c
  SITE (66590): n equals a,t,g, or c
  SITE (66591): n equals a,t,g, or c
  SITE (66592): n equals a,t,g, or c
  SITE (66593): n equals a,t,g, or c
  SITE (66594): n equals a,t,g, or c
  SITE (66595): n equals a,t,g, or c
  SITE (66596): n equals a,t,g, or c
  SITE (66597): n equals a,t,g, or c
  SITE (66598): n equals a,t,g, or c
  SITE (66599): n equals a,t,g, or c
  SITE (66600): n equals a,t,g, or c
  SITE (66601): n equals a,t,g, or c
  SITE (66602): n equals a,t,g, or c
  SITE (66603): n equals a,t,g, or c
  SITE (66604): n equals a,t,g, or c
  SITE (66605): n equals a,t,g, or c
  SITE (66606): n equals a,t,g, or c
  SITE (66607): n equals a,t,g, or c
  SITE (66608): n equals a,t,g, or c
  SITE (66609): n equals a,t,g, or c
  SITE (66610): n equals a,t,g, or c
  SITE (66611): n equals a,t,g, or c
  SITE (66612): n equals a,t,g, or c
  SITE (66613): n equals a,t,g, or c
tgatttcttaaaaaaattaatgtcaaccactcaccttttgcattgagaatgtttttaccttttcacaactgcaggggttactgaaaggtttttcattccaagttttatttatttattaattttaaatcatccacagtgactcagctcatggtctcgttgttggaaacactaggagttttcaggacagtctcttcatgtgggtgttttcattacagttcatttacactgttgtaaaataaggtactgaagcaaaaggaggactgatctcctttactgattggtctaaattcaaaagtgaattggttaaaatcgtgtcattaaaattttttaactgtccaatggtcactggagttttctgggcataaatatttttaaaatagaatcactcagtgtaccaaaattaaaagcattatgaaatttgcagtcataaacatgcagtggaaaactggctgtcagaatacttttatgaagagtattaggaagaccttaatttagttctgggtgctaaaaaaatcacgtgtaaggatatagtgtcagaacactgaaatctaagtctacaaagaatatcatgttttggtttgcagtgaaccacagtaagttgtcagtgctgctctgtgcttaccacttaaatcatgataaggtgaacctccataggtaaaccatgtgagaattctgtcctttcatttattttgaaccaagaactattattggattttaactctcattctgagatttcttctccaggtgatggtaaataaagtaatacgcacatgcattatgatgaggatggagggagtggttcacagcacctcaccttcgggtcctcaggtagaactgcaagagtaagaagttaggctctgatctgacatgttctcagaaactatacggttgaccttcaaataatgcaggagttaggggcatagaccccctaagtagtcaaaaatccacatctaactttgactcctccaaaacttaactactcatggcctactgctgaccagaagtcttacggataacatagtcgattgacacatattttgtatatgtattatatactgtattcttacaataaagtaagctagagaagagaaaatgtttgttaagattataaggaagagaaaatatatttactattcattaagtggaagtggatcatcatgaaggtcttcatccttgtcatcttcatgttgaataggctgaggatgagaaggggttggtcttgctatcttgggtggcagaggtggaagaaaatccatgtataagtggacccacacagttcaaacccgtgttgttcaagggtcaactgtattctgactcagaatagcttaagaccctcagggtcatagaaaaataccatcataatctcttttatggtaggttggcaatataaattattaacaaactctaaaatattaccagtacctgaaaaaaaaaaattcagcagaaaactgtgaagtggaacatttagtcactgtttttcattcattttgaaatttttatatgtttacatatatctgttgtaaaaaataccaactttccaagtactaggaatgctgaccactaagcctgatctaaagtttatgttggggacctcaggtatacaggagtggaacagggacaggagtgaaagctttgactgaagacaaatgtgggcttatggcctatctctgtcactaatttaactatatgggcaaagtactaaacctgtgtcttcatctgtaacatagggattagacaccagtgataggagggtcttggtcagtagctaatcacagagctgcttccttaaaagccttgagtacttttgtttaaaagtttaggtctacttgaaagtctgtaaagtgctaatttttatcatcctgagagatctgtttctcccctttccagttaccagtggcattctcccaaaactgttagtatctatgttatagaaagatacttaaatgctatgataaattgtatgaaaaaaactttaaaattcagcaagcaattcttaatgaaagataaaactggccctctagtaccataattagtttagaattcagtcttttaaattatttgcaccttgagactctgtgaaatgaaaacatttaacagtaaactcttgtcccaagggagcaaagtgagagtaaatgctggtccatagtgatggggaaaaaggactgtgttcaccatgagtttttcaggatgcagcataaagcttatctaaatactacacagatcattatcttttaacccaaccaatcatatattcaaactaagggaaaaatatgtaagcttttcctttggaacctgagacaccaggagccttaaaccacaaataatctactgtagctatggacagggtagtcaaatttatttcaaaacaaaagctttgttgggctgcatcaaatgcaggagaaaaggaatacttaggggcatggttaaattaccagtgtgcgtaacagtgaggtatgcctcaaataagcctttaaaactttataaactgaactagaacatacccatgcagtaatattttttcagtgctactaatgaaaaaaaaaaattaaagcctgcactggaaatttacaatatggcagaatttgttacttttaccttttgaccctaatgtacagattttatgacagggtctgtgttaaaaatctaaacattttcacaagattttaaacatcactggaaagctgaatttagaggaaacaatatcagataaaagtacaatgcccgtgacagccaacattatgtaactgggctgtatgaggttgtttagaaggctagggttaaaaagatagatagacaaaaagatttttaaaaatcacccccaaagttgatgcgctgatttgaacataagtacaccagatactacagcaaggggatatacactgcaaaaaggtcatctatttacagaagagtgatttaaagacattatggttttctttacagatgtaagaacagcaactgttcactttttaaaaactctacatctcaaccctccactattattatagtccactgaattgcctgtatcaaaggcagttttttgtttgtttttttcccatttgactctccaaatgaacttccatcatttcttcatcatctgtgggctggctctcctgaaaagtctcagggaataagtcacaggagggcaggtttttgacctgctactaaaaattaaaccacaaaaactagagatccctctcctgcaccctgttcccctcactttgtgcagttcagtcatcactatccgacagggtctcgtactgtgctgagagcagtggggcaggctctcgctcccagatcctgttctgttggtgaggagctgcttggttcaccgcagagggagcacatgcaatcggtgttggtggagtactgctgagcatccgcatagtcagagggttataaggaaactgagttgagcctgacaaaagaaaaattaggttttcattgtcatgaacataactggtatttcatccaatccaacttttgtaggatggagtagaataggattattgtaaaatggtcatgtgacaccatgaaagcaaaatgaatacaacacggaatggccaaagtctcaccacttaaatcctagccaatgatatatagcagtcagtgcgggtccaaaaaagaagagtaacatgagtagcatatgagtgagggctgctgagcccagaagagaaagcccaggctagatttttagttaagtctatatcagatgtttccatggagaatcacagagtcaggttatagcaagagctttcttaactcttcaagagaaatgcaagagtatagttctcagacgacaatggacaagtacccaggaacgtctgcagactgaggggcagcaggatgcaagtcatctgctgaatctcactgggcagattttaaagtctacaagattgagaaatgaggtaattaatgaacactgctacccttcatcagtttctagatgtttaactgtccccagaaagcctcctacagcttaagaaaacgcaaaaacaggctgggcgcagtggctcacgcctgtaatcccagcactttgggaggccaaggtgggcagatcacctgaggtcgggagttcaagaccagcctgaccaacatggagaaaccccatcttacaaaattagccgggtgtggtggtgcatgcctgtaatcccagctagtcgggaggctgaggcaggagaatcgcctgaacccaggaggcggaggttgctgtgagccaagatagcaccattgcactccagcctgggcaacaagaacgaaactccgtctccaaaaaaaaaaaaaaaaaaacccaaaaacataaaacataaccatttaatcaaataataaatctcatgtatggcctaattaattcttccctaagagatctgagaagcagcaaccactggtctgggctgtaagctttcaaactcaaaacaaccactttgcatgtgacatgagttttataatgcaaaagcctgatataatttacatatatcttacagggaagggcacatttcagatttttttcagtgacatatttgtatttaatcctaaggaaaagatggcttataattctctgaaactctaaaattcgtaatatcccagttttaaaagtctgttgctttttaaagctactgtgatcatagttattacatacattaagtttacaaataggcacaaaatagaaaataataagtatcctggagtattgtttttcatcagtttgtgtaaatgtagtgaacgtacagacagatgatggctttttttgtttttgttaagatggagtctctttttgttgcccaggctggagtgcagtggcgcaatctcagctcactgcaatttccgcctcccaggttcaagtgattctcccacctctgacctcaagtgatctgcccgcctcagcctcccaaaatgctgggataacaggcatgagccaccgcgcccagctagatgatggctttttaaactagtcttctcatttctaattttgatttcttagtatttccctaagaactttttctaagaataccaatatgaaaggtgaagtactcttagaagtggcatgggtacattcaggtacagttctcaaaagaactaaaaccaccttatttgctttgcaaatagtcaatgttcgctaccagtgtaatacagaagtgaggagaatggttgagattattttttcatagctcttcctttgtttatggtaatcaggctttgcattctaaaaatgtttcaggttatatgtgcattcagtttctattctgggtgtgtgcattggttgactcctgtaatactaacactttgtgaggccaaggcaggaggaatgagttcaggagttcgagaccagcctgggcaacgtagtgagaccttgtccctacaaaaaataaaaattaaaatgaaaatgaaaaaaattagccaggcatggtcgtgcacgcctgtagtcccagctacttgggtcgctcaggtgagaggatcacctgagcctcagaggtcgaggctgcagtgagccatgatcatgccattgcattccagcctgggtgacagaacaagacccctcaaaaaaatacttctattcgggaaagtggaacatattaatgatacagaaatgggaatataggtttccaaattagaagagttgctgaattttgaagaactaataaccaagacattgatattattgctctgtctcattttctaagttaaagcagaatccttacctgttgaagagggcctgtcttcccaggcccaccctggcgtctgcctatggtaatccccttctgaatgtacagaggagactgaagagggccgttccgttcctaagtagccttgcccaggtataggagacttagatttcctgctgtttgacttgctgatcagctttggtttgcaaactcctcctgaaagtgaaattcaagttaaagtattaatatattaagttctcaaaaattaccaaaatgctaatgattatatattgctaaatgaaaaaaaagcagaatggtaacatgaagaatccagatcctggtactcaatgaaataaaatactacaggcatacctcagagatactgagggtttagtaagtcacaattattttgctggtggatggtcttgcctccatgttgatggctgctgactaatctgcatggcggttgccaaaggctgggatggctgtggcaatttcttttcctttcatgaaagacttatttgtagcatgcaatgatagcattttagccacagtagaactttcaaaattggagttgatccctcaaacccttctttattaactgggtttatgtaatgtagtattctaaatcctttgttgtcatttcagccatgttcacagcatcttcaggggcagattcaatctcaagaaaccactttctttgctcatccctaagaagcaactcctcatccatttcaagtttgatcatgagattgcagcaattcagttacatcttcaggctccactactagttctcttgttcttttttttttttttttttttttaaggcagggtctcacctctgctgcccaggctgcactgcagtggcacaatcacggcttaccagctcactaaagcctcaacttcttgggctcaagcaatcctcccacctcagacccaagtagctgggaccacaggtacacaccaccacacccggctactttttaaaatttttgtagagatggggtctcaccatgttgcccaggttggtctcaaactcctgggttcaagtgattctactgcctcagccacccaaagtgctgggattacaggcatgagtcatcatacccggcctctcttgctatttctcctacacctgcagtgactccctccactgacgtcttgatcccctcccaagttatccatgggagctggaatcatctttttccaaactcctgttaatgttgatattcttacctcctcccatgaattacaaatgtcgttaatagcatctaaaatggtgaatccttttcagaaggttttcagtttactttgctcagatccgtcagaggaatcactatggcagctattgccttatgaaatgtatttcttaaataataagacttgaaagtagaaattattccttgatccatgggcttcagaatggatgttgtgttagcaggcatgaaaacaacattcatctccttgaacctttccatcagagctcttgggtgactaagtggattgttaatgagcagtattgaaaattattttttctaagcagtaggtctgaacagtgggcttaaaatattcagcaagccattctgtaaacacatgctgtcatctaggctttgttccatttctagagcacaggcgagtagaccaagcataattcttaagtggcctaggattttcagaatggtaaaggagcactggcttcaacttaaaagtcaccacctgcattagcccctaacaagagagtcagcctgtcttttgaagttttggactcttccagtagaaggctgttttgtctacatggaagatctgttgtttaatgcagtcacctttatcaaagatcttagctaggtcttctgagtaacttgctgcaacatcttcatcagcactttctccctcaccttgcacttttatgttacagagacggcttcttcaacctctgaatggcctctgctagcttcagccttctcatctgtggcttcctcgcctctctgagccttcagagaattgaagagttagggcttggattaggattaggttttggcttaagggaatgttgtggctggtttggtcttctatccagaccactaaaatcttctgtgtgtcacgaaacactgttttgctttattaccatttgtgtgttcactggaatagcactttcaatttccttcaaaaacttttcctttgcattcacaatttggctaactgtttggcacatgaggtctagctttcagcctgtcttggctttcaacatgcctttctcactaagcttaatcatttctaacttttcatttcaagtgacagacttagtgattcttcttttcacttgaacacttagaagccattgcagggttaattggccgaatttgaatattgttgtgtgtcagggaataagggagccagaggaggagagagacagggaacaaccagtcagtggaggagtcaggacacacaccacctttatgggttgtttgccatcttatacaggtgctcctcatggtgcccccaaacaattacaatagtaatatcaaaggtcactgatcaccatcacagagataataatcatgaacaagtttgaaatattgtgagaattaccaaaatatgacacagacacaaaggagagcccatgctattagaaaaataatgctgatagacttgcttgacacagggttgccataaaccttcagttaaaaaaaaaagcacaataaaacgaggtatgcttgcatttaaaagaaagccaggatttcacttgtaacaatcaaaacaaaaaacaaggttcgtcctcctgccattaaaatgtggtaattaaggaactgaaatttctgggacatcaagccttctttactggcctcagagtacagaaactactaaagaaagaaggcagggtgacaaaaatcatacttcactaatgaccaacccccctttcccaactggaattaatacaccacacaaagaaataatatgtaaaggaaaaactgcagaacaaagcttcttcatgctactacaggacttgagcagaggctcagcaagttttggtagcccttttgatttttccagactgtgtagctgatgaactcagcagaatttcacagaagtgagacacctctgactgtgctctaaaagaaaacatcaaaaagagctcagaagagatcagagcccaggtcatcagcaaattttttcctcagccccagcaaaacaatttcacactgccccaaattcctatacaaccagtacaattgtaattgactaagtcaccagtcttataaccttaaaacacacacacttaaagccaataaaaattggaaggtaagaacagaaaggggaaggtcttaaagttaacatgtatagttttttttttaagacctctaatctctttaatctttttcttaaccatagtgagatagatcttttgcttgaagataacaggaaaataaatctaaactaaaacagaaatactgctgaacttcaggtaattttgaaaagcacaagagatattctcaaaatattaagaaaaaggttgtaagattaaagcttaggattattatggtttttttgtgtgcttgtttttaacagaatgtataaaatctcattctagcaactcttatctggctatccagagacatgtctgaaacaatgcttatcagatacaagcattagcattccggatgatgtgatctgaagaactgtttctttttcttccctttttcctactctttttttttttccttttttgagacagggtctcactttgtcacctgggctggagtgcagtggtgcaattgcagctcactgcaacctctgcctcctgggctcaagtgatcttcccacctcggcccccacaagtaactgggactacagcgtgagccaccacacccagctaatttttgtaatttttgtagagacggggttttcatcatgttgcccaggctggtctcaaactcctgagctcaagtgatccacccaacttaccctcccaaagtgctatgattacaccttttttcctactctttttttatggcttacgattattttattttattgtgtgtgtctgtgtatgtatgtattttgagacggagtctcactctgtttccaggctggagtgcagtggtgtgatctcagctcacagcaacctccgcctctcgggttcaagcaattctcctgcctcagcctcctgagtacctgggattacaggcacacgccatcatgcccagctaatttttgtatttttagtagagatggggtttcaccatgttggccaggatggtctcgatctcttgaccttgtgatccgcccgcctccgccccccaaagtgctgggattacaggcgtgaaccaccgcacccggctggcttatgtttcttttctactgagcctaatttttacagttaaatcacttttattcaaaaacattatatttgtgttacaattacaatgcagtatgtatagatgaggactaggtgcaaacaaataaaaaatggacatcccaggagggtgacactttgggtaaaaattttcttccattttatttctgttcatattataatgtctgggtaggttttcaaaaaccttttttaagtaacggaaaccctaagaggtgactctgagcacataaagacataaatgaaatgtcttagtgatgcatcagaatttgggaaataaactggcttttttggggaaaagcagcagaaaagcactaaaatgaaagctgtacctgaatgaggtgatgggtccccttcctctcttcgtgtctcaccactggtcacaactgaggtgttggcagtaccaggcactactcccataggctgggacatgacaactccatgatcctcaactttgtcatcaaagcttcccatgagagccttcctgataatgtcttccagcccaagattactggcaggatcagcaaaagaatggcctctagagctaactgagcctgaaagagaatcaaaaacatttccacttatttctgaaaggccaatcaggaaacaaacatgcattgccccatcagcccactgaatacacacagcacttggcaagtgacctagaacaataccaggacccaccacacagagacctttttttttggagacagagtctctctctgtcgcacccaggctggagtgcagtggcgcgatcttggctcactgcaacctccgcctcccagattcaagggattctcctacctcagtctcccaagtagctgggactacaggcacccaccaccacaccaggctaattttttgtatttttaggagatggggtttcaccatattggtcaggctgatctcgaattccgaacctcaggtgatccgcccgccttggcctcccaaagtgctgggattacaggcgtgagccaccgcacccagcccagagaccatcttaatccacagataactccttaaggaaatttgtttcccaagtgaatcagtcacccacacttctattaaagttactcaacaattttctcagttccctagttttgacagtgttctttaatagtttcattctttttgttcatttatcttttcaataggtatttactggatctcagttcctttctgtgctactgggtaaaccttccttcactaaattatttatttatttttccatattagagcagtcactcccctggtatacagttggtactcagtacatatttgttggactgactactgctgtgccaattttgtattggtaaataatgtcttttcaatcttacctgacgtagtaactgctggcagattaaagatctcagttcctggctgagcagctgctatatttaagcaaacattcaagttaattaagatgtgataatcatatataccaaactaaagtctcaaaaaattcctataataaaattaatctttttatttttcatgatctcaacctttatttctcacccattaagtgaagataaaatggaagtattttttttttttgagacagggtctcactctgttgcccaggctatttttaaagggaaatcaggaaataggtaaggtaggaacatcaaaagaagagcaataagctgtgtgcagtggtgcactcctagtcccccagctactcagcaggctgaggcggtaggactgcttgagcataggaatttgaggccagcctgggcaacacagtgagactctcccatctgtttaccaaaaataaataaataaataaaaaaagaagcagtgtaacccagaaaagggaaaggaactttgcactgctggagaaaaacaaataggaaaatgctgttctcagaacaggaaccaaggctttctgacgaagaagaaaccttggactctgggatgaccgccacaaataccaacaggtttgaggcagcctgggatgtgatccagaggaaagccaccacagtgaatactatgaaaatgactgtgtttccctgcatggctaactggaaactcaggatatttgctggaaaaaacaaaagactctgttgatccttttcattcctgctgactgtgcaacttgtaatctgcagtttgaatgataacagcataagacctgggaaccgcctataataaagcagtgtgccagaaaggggaagaatttgggacataaattggtgtttccgtcattcccaacttgacgctaagaattttaaagagaaaaaaagaatgcagaaagcaagtgggcagccaaatgatgtgtcccaaagaatgtgaaagttcttttttttttttttttttcctttgagatggtggtgttttattcttgtcacccaggctggagtgcaatggcgtgatctaggctcactgcaacctctgcctcctgggttcaagcagttctcctgcctcagcctcccgagcagctgggattataggccccccgccaccatgcccagctaatttttgtatttttagtagagacggagtttcaccattttggccaggctggtctcgaactcctgacctcaggtgatctacccacctcagcctcctaaagtgctgggattacaggcatgggccactgtgctcagccagaatgtgaaattaattaatttattaattaatttatttttaagacggagtctcactctgccgcccaggctggagtgcagcggtgcgatcttggctcactgcaagctctgcctcccaggttcacgccactctcctgcctcagccccccgagtggctgggactacaggcgcccgccactatgcctggctaattttttacatttttagtagagatgggatttcaccgtgttagccaggatggtcttgatctcctgacctcgatatgcccgcctcggcctcccaaagtgctgggattacaggtgtgagccaccgtgcccggccagaatgtgaaatttctaatgagaccacagaaggatggactcttacccaagggctgagcacatgagaggagggaagagtgcatgtgcctagaaacaaacttggttgattagggaggctttaaactgacagaggagaaaagtcctcagaagaactagaaaacaatggccatggatgacagtcttcttacttatgggccaggtgacaaggtaaataaattgagcctgaaacagcagagccctgttatcatgaagtgtgtggaacaggagtcattcatttgatagatatttaattgagcagttatttgactgaattgttaagattaccttattgatcaaaaatggtcagatgaagacaatttcctataagttaaccaatgataatccttagatactgcacttgcaggataacccttcctttgctaatggagcttacagtgcagtgtggtacttgctaaggccatacaaattagaatcacctgggtagcttagtaaattttctacattcctggggctccataattcaactatttaataagcaatccaggtgactggtacctactgttgagcaagaatgtggtaactgctcagaaattagcagaatggaaggtagacatgtgaaagccactgtggaggccaacttgacaggaggagctgactcccatcaggaggcagagagaccaggatagtaatggccagagtaatggtaactgttaactgtggtagggaaggaggaggaactttttgtatggggaggtagaacatggattcaattttagatatttaaggagccagtaagttagtcaagaagtaatgaggtctgcaaagatatgtaagtagagcttagtaggaaaagctgggctacagatacaaatttgggagttttcagcatacaagcgaccattcaactccccagagtagatgagatgactcaaattataagacatgaggagaaaggggctaagaagtgagccctggggaaaactaacaatcaagggccaggcaaagcaagactgagcttctaaggagacagaagtggccagagaagtagagaagaaacaggagaacatggcatcagaaagccaagagaggaaagcatttcaggaaaggaaagtggttcactgtgtcaaaagctgcaaagagatccaataaagtaagttttaaagcattacagttttcaaaaaaataaagtcactgatgtccttgggaacactggattcagatacaatgagctgaagtgaagctgtgttggctgctgatggctttcatttagttctacttcccagtgaaggctaaatgtgccatggtgggcccaggagcccactggttctttaatataaattctcctttccaccatgaaaaatagttcttgcaataaaaaaaaaatcccagactctaaagcaattctgttagtacttcccttaagacattaattatctcctgttaaagttaggtacttgtttcatcatacagcttcagagaatagagaccatgtggcatactaaaacacccaacatagtacgctactgaaaacattaggcaagagagaaaaaactataaagtaggcttcttcagttcaaacatggcatttccctgtcaaagagtttcccactttaagggtaagacaaagactacagaatgagcagaccacacaaaggtgaaatgatttgcatctcagttcctggctgctctgagatctctagctctccgtgctcacacagattcatctctgagtgccaagagaaattgaaaacaagagtatatttttgttggtgacacttgaggagctgtaaataatagattaaactgttgaagactggagacagaaaatagtaataacaatattttttgaaaaggtggccggatacagtggttcacgcctgtaatcccaacactttgggatgctgaggtgggtggatcacctgaggtcaggagttcgagaccagcctggccaacatggataaaccccgtctgtactaaaaatacaaaattagccggatatggtggctggtgcctgtaatcccagctactcgggaggctggcccaggagaaacacttgaacccgggaggcggaggttgcggtgagccgagatcgtgccactgcactccagcctgggccacagagtaagactccatctcaaaaaaaaaaaaaaaaaaaagaaagaaagaaaggctatctgtaagcctgataacaattctggtcagcattctaaaatatttgtcttttattttgttgccacctaaacagaacctagtaattaagagcgaggacaagttcagaaacagtggtgacactggctcatccttttttccttggtgttcaacatttattaatcacaagagtgacacagatctaaacaaacatccaccaggcagttcacagtgcaaggcccccactttcctttcttttgacaggatcaggagactagtagatggtagatcacagaaataaagcagatcgtcctttcctcagctgccaccacagtgcttggtccttccaaggaagctaaggccacgttgggatgaggccctcacttcatccggcaactaccaccacgtccggcagcgccagccccacacttgcccataccatgtcctctgtctccgagctcgcctgcatctactcagccctcactctgcatgacaatgaggtgaccatcacggaggataagatcaatgccctcgttaaagcagctggtgtaaatgttgaacctttttggtccagcttgtttgcaatggccctggccaatgtcaacattgggagcctcatctacaatgtaggggctggtggacctgctccagcagctggtgctgcaccagtgggatcctgcccactccactgctgctgctccagctgagaagaaagtggaagcaaacaaagaagaatctgaggagtctgatgatgacatgggcttttggttgttttgactaaatttcttataacgtgttcaatacaaagctgaacttaagaaaaaaaaaaaaagaataaaccagactatggtctacccaaagtctctctatcaaggggactgaggaaaagactgataagactggggggatagttagtacaagtgagtgctgagagaacacgaggaggttctgattaatacttgcatatcaacccagaggaaaaaggttctgccacagaacattagctagaatatttaccaacaatctggttaagatgctatgagtatggaactgttagaagccagttggtccatcattagcaacatggactctggagttggaatgcctgggtttgaactgcagcctcattacttactagatatgtaacctgtgccaactcttaaacctgagtctgtttcctcatctacaaaatggagataattgtaatatgtagggttgttgtgaggattaaatgagactatatctacacatgcttagaatagagcctaccacatagtacgctagataaccttttgctaccattattactgattttatatttttattttattaatttattattttttgagacagagactcactttgttgcccaggctggaatgcagtggcacaatcttggctcactgcaacctctgcctcccaggttcaaatgattctcatgcttcagcctcctgagtagctgggattacaggtgcacgccaccatgaccagctgtttatatttttagtagagacagggtttcaccatcttgcccaggctggcctcaaactcttgatctcaggtgatcaacccgtcttggccttgcaaagtgctgggattacaggcgtgagccaccacacccagacaatttaaaaaaaatttttttttttttcttgagacatctcactctggcttaggctgcagtgcagtgatgcgatcgtagctcactgtagcctcaacttcccaggctcaagcaatcctcccacctcagcttcccatgtaaataggactacagggatgtataccaccgcacccagctaattttttatattttgtagagatggggtctccctgtgttgtccaggctaatctcgaactcctgggcccaatcaatcctcccgccttggcctcccaaagtgttgagattccaggccaatgttttatttttacacggttagtttatcagagttgcatatgaatagtgaatgaatcaactcaagtccacaaagacactggtagggtagaaaaagtagctggactggagcaagcacagacggacttggacttgtcctatacttggagctagttactgtaaaagtagagcgagggcaaggcatgaattaaaagtagcccaagaccttgacatcaacgttcatactaagtacttaacagtgcacttcataacttaacagtgtataggctgccaacaaaacagctaatagtcttaggctactttaaaaatgatgaatttagcatagatcatattatactactctattttgtattactcgaaacctagtgaaaggctaggttaaatgtttttggtggagaataactgagatggtaggggtactaagaatgaggacatgtgacccacagctgatgaaactggggacactgattgagaggactcctgaaagacacgtcttcaaatatctgaggagatgttatgtggggataggcccaaatggacaaaatgaagactgatgggtaggggagaaagaaaagtaaactatggagagttaatccagtcctacataaagaaaagtaacctagacacagcatttcttcaaagagaaacggcacagcttcagaaaggagcgaactcctgcctcctaattagaactcttcatgggctggcagacacttgagaaggaactctaggatcagatgtgttggacagatgtcctgtaaagagccttcaaactcaagcattacaggagaggcaacactggagatatcattattaatgcatgttttatttggggttcatgaaagaaatcccacttacccatatcagagtcacctccaccagaggagttcaacttacgaaaaatctcctgcttctttgatttaaccatgggtgatgtattttcaagcttggtgaagaatgaaggcaagtagcttatactccctggtgagcgggcatcattcctgttagggccaaagttaagtatattacaaccacgtactcctaatcctggggacattcctatcaatgataacaacagtcagagagtacttagaaaactactgcctcctcatcctgtgtttgtggttacagccctaagaaacagtatgtaatcataaaccacttagtacatcatttgaggaaaaatgatttagctctcaaaatgaaatcataaaattagaattagaatggagataatctagagcagaaattcttaggaaggaatgaagaagcagtaaatgaatattaataggaaaactcagaaacagcttatgatgctctctccttaacagcacaaacactgatatattaatggttaccacctaaactgggaacaattttactagaattagttttaagtacactaaaattaaaactaatagcacgcttgactacaaaatagcaagaactcatatctaagcaatcaacagctggactggaacacaacagtataggaataaaactgcctatttgttacaatcatttcaagcaacctaacaaatgagctgagtttaatataaagagtttcatattttactggcagcttcctatactaacacatttaaaaaaaaacaaggtttccctaaaaactccaggccaccaaggatctagctagagccagagatgagaacagagactataggttattgaaaacctaatccaatcatgtggattcagtcatcattcaaacacaagaacacgtactctatgccaggaaagacaattaaggtgataggaacaggaataagacatggtccctgtcctcaaaacactcataaacgtaggggaaagatgtaaatgtataattaaattgaacatcactccctctccaaaaatggattttcttcatttcattgaaaagtagcaatatctgtttagctccctaagaataaatgcaataaattaatagcaacactttgtaagaaaggcactagcaatttggagttagaaaggccttcgtttaaaactggcccttccccattagtatcagtacgaccatgagcaagtgacatgtctggctttcagcgcatcagtggagggttcagcactaggcaaactgcacgactatggacagaaaggaattcagggaacaataagcaacatgatttggacagagattccagtgtagggatgatgcagagggaagtgaagctgaatgcgcagcatacacctggtcatgccaggaactcagatgccatgcaaaagactgggtgctggattctgcatgagttttagacaaatcactcaggtggaggtatggagactgactggaaaggagccaactcaaaggcatctagtcaaatggggataatttaataattaatagggttggggtcacggttagaaataggtaagattaaatctattcagagtccacagtgcttggtatacagtaagcattcaaatgttggctgaatcaatggatgaccctttcccctagacaaaaacattaaaaaaaaaatctagaaagatttaatttcaagaataatgaacaaatattttctaacctatttaaatatgatattataaatattttctttttgctaaaatacactagcattagatgagtaggaaaagagacaaatgatcctctaagaatgccatccagacataaaagcccaaagttctgagaaaaacggcaacaactgaaggaaatgttaaagcatgagcacccacgccatgaatggttgctgtcactaggaagcacacttacctctgctctgcaggctctgcgcccctctgagacaagagcagcaagctgtcctgtttctcatgcacaaccggaacctggggtggggagatgggctcgtagggctccgaagagacgtgactcctctctggggattttccaggcctactattgtaatatgtgaaatattagattgtgtttcaaaggctaacctgggacttacctaaacagaaacttgttaactcatgacttcattcaggagaaggagcaaaagctgccaatttctatcagaaaaaaagttgcctcaggtattcactatatacatagttaaaacaaacaaacaacaacaaaaaaaaccactgtgttactgccacttgacccatgcgcgccccgtggatccaggagtcacgtcatcagacagtgctgcccgggcagcagcagtggcagaagctgcgtccttgaggctccgcatgtccttcaacatcagacaccatctcacccttggctccttagtccaggtgaaacctcaagggttttcctacctattttgagtcgactgaccagttctttcatcgtcaagttaaagataaaggacttcagtactaaactgacacccaagaagttttatcaggtgagtcaacataggttctagttacactatattatggcagaggggttctctgcaattttatattttttctctggataccatttggtaagaataatataagatagacacactgtttagctcccacccatttatcattttttttttttttgagacagagtctggctttgtcacccagcctggagtgcagtggtgtgatcagctcactgcaacctctgcctcccaggttcaagcaattctcctgcctcagcctcccgagcagctggaattggaattataggcatgcgccaccataccccggctaatttttgtatttttagtagagacggggtttcaccatgttggctaggcctcctgacctcaggtgatccacctgcctgggcctccaaaagtgctaggattacaggcctgagctaccgcacctggcccatttatcttattattaaaatttttattttttagagacagggtcccgctcgttgcccaggcaggagtacaggagtgcaatcatagctcactgcagcctcaaactcttgggctcaagtggtcctctcacttacatctcccgagtaactgggattacaggcatgcgtcaccatgcccagctaatatttttattatatgttttattatgtctggtggcccatttttaattttttgtagagacaggggtctcactatgttgctgacctcaaactcctgggctcaagcaatcctcccacctcagcctccaaaagtaatgggaattacaagcacctcgccccaccacaccctcaatttttttttttttttaagacagagtcttgctctgtcacccaggctggagtgcagtagcacgatcttggctcactataacctccacctcccaggttgaaaggattctagtgcctcagcctcctgaatagctgggattacaggtagccaccaccacacttggctgatttttgtagttttattagagacggggattcaccatgttggccagaatggtctcaaactcctgacctcaagtgatccacctgcctcagcctcctgaagtgctgggattacaggcgtgagccaccacacccggccctgctaaaattttttgacatagcgattatgcatatgaaagccacctgtgactttcaacatctggaattatgactattagactaaagcaaaattataatatgatttgttatggcctttctcaatcagcccatccagttgttcaagatagccactttttttttaagttgttttgctgtttacctccaaaactctgtaaataatcttaaacatgttttttttatttataaaacttgaaacagtatctgttaactctcttccatgaaagatgaagaatttgatttgccttctctgttgttgcccattttatttttatttttatttttatttttgagacagggtctccctctgtcacccaggctagagtgcagtagtacaatcactgcttactgcagcctcaacttctgcgctcacgtgatcctcccacctcaggctcccaagtagctgggactacaggtgcatgccaccatgcctgggcgattttattttttagtttttttgtggagatggggtctcactacattgcccaggctggtcttgaaccgctggcctcaagcgatcctctcgccttggtctcccaaagcactgaaattacaggtgtcagccactgtgctggcttgcctattttaattttgtccattttgcctttacatagcatacttcagccttttatattttcttttttaaaaatgaagaaattagcacacatacccttacttctccatctctttcctatgcaaccctcacctcccaatatctgtcagccatttttaagatttattgcatcacatccttttctagaactacagagaaactcctctgtgttttgcttataaaaatcactccatacaattacatagaaattcaataacctgctcctggagtacataatgaaataaaggcagaaagcaagtttttttaaactaatgagaacaaagatacaacgtaccagaatctctgggacacagctaaggcagtgttgacagggaaatttatagcactaaatatccacatcaaaaagttagaaagatctcaagttaacaagctaacatcacaaccaagagcaaacaaatcccaaagctagcagaagacaagaaataaccaaaactgcagggggcgcggtggctcacacctgtaatcccagcacgtggggacgctaaggcaggcggatcaccggaggtcgggagtttgagaccagtctgaccaacgtggagaaaccccgtctctactaaaaaaatacaaaattagctggggtggtggcacatgcctgtaatcccagctactcgagaggctgaggcaggagaattgcttgaaccaggaggcagacgttgtggtgagctgagatcgcgccattgcattccagcctgaacaacaagagcgaaactccttctcaaaaaataaataaataaataaaataaacaaaacggaagctgaactgaaggagattcagacacaaaaaaacactcaaaagatcaacaaattcaggatctggtttttgttttgttttgagatggagtctcgctttgtcgcccaggctggagtgcggtggcgcgatcttggctcactgcaagctccgcctcccgggttcacgccattctcctgcctcagcctcccgagtaactggaactacagatagatgccggccaccacgcctggctaattttttgtatttctttttttttttttagtagaaatggggtttcactgtgttagccaggatggtctcgatctcctgacctcgtgatctgcctgcctcggcctcccaaagtgctgggattagaggcatgagccacggcacccggcctcagaatctggtttttagaaaaaattaataaaacagactgctagctaagactaatagagaagattcaaataaacacaatcagaaatgacaaggaatattaccactgaccccacagaaacacaaacaatcataagaaaatattatgaacacctttatgcatataacctaggaaatctaaaagaaatggataaatttctggtcacatacaccctcctaaaactgaaccaggaaaaaactgattccctgaacagaccaataacatgctctgaaattgagtcagtaataaatagcctaccacccaaaaaaagcccatgaccagacacattcactgctgaattctaccagatgtacaaaaagagctggcaccattcctactgaaaatattccaaacattaaggaaggactcctccctatctcattctatgaggccagcatcatcctgataccaaaacttggcagagacacaacaataaaaagaaaacttccggccaatatccttgatgaacatgaatgcaaaaatcctcaacaaaatactggcaaaccaaacccagcaaaatattaaaaagcttatccaccacaatcaagtagatgttatccctaggatgcaaggttggttcaatatacacaaatatcaatagatgcagaaaaggctttcaataaaattcagtaccctttcatgttaaaaactctcagtaaactagatattgaaggaacatacctcaacataataaaagagccatatatgaaaacccacagccaacatcatactgaatgggcaaaagctggaagcattcctcttgaaagccagcacacaacaaggatgccctctgtcaccacttttattcaacatcctattggaagtcttgaccagggtgatcaggcaagggaacgaaagaaagggcatccaaataggaagaaaggaaatcaaactatctctgtttgcagacataatcccatatctagaaaactccatagtctcagccccaaaggtccttaagctgatgaaacaacttcagcaaagtctcaggatacatcagtgtgcaaaaaatcactagcgttcctatacaccaatgagagccaagccaagagccaaataaggaatgcaattcgattcacaactgccacaaaaataataaaatacctaggaatacagctaaccagggaggtgaaagatctctacaaggggaactacaaaacacttctcaaagagataaaagatgaaaagataaaaaatgaaaaaacattccatgctcatggataggaagaatcaatatcattaaaatggccgtactgcccaatgcaattcacaaattcaatgctattcctattaaactaccgaagacattcttcacagaactacaaaaaactattttaaaattaatatagatccaaaaaagagcctgaatagccaaggcaatactaagcaaaaagaacaaagctgtaggtgtcatactacctgacttcaaactataatacagggctacagtaaccaaaacagcattgtattggtacaaagataagacacacagaccaatggaacagaacagagaacccagaaataaggcctcacacctacaactgtctgatcttcgacaaacctgacaaaaacaagcaatgaggaaagaattccctatcaataaatggtgctgggataactggctatcacatgcagaagactgaaactgggcttcttctttataccatatatatataaaattaactcaagatggattaaagacttaaatgtaaaaaaaaaaaaaaaaaaaaaaactataaaaaccttggaagacaacctaggaaatacctttcaggacataggcagggacaaagatttcataacaaagacaccaaaagcaactggaacaaaaacaaaaattgacaagtgggatctaatttaaagagcttctgcacagaaaaggaaactgtcaacagagtgaacagacaacctacagaatgggagaaaaattttgcaaactatgcacctgacaaaggtctaatatccagcatgtataaagagcttaaacaaatttacaagaaaaaaacaactccattaaagagcgggtaaagcgagtgtggtggcatgtgcctgtaatcccagctacttgggaagctgatgtgggacaatcacctgagcctgggagggttgaggctgctgtgagccgagactgcgccactgaaatccagcctgggcaaacagaatgagataaaaaagagagtgggcaaatgacatgaacagacacttttcaaaagaagacatatatgcagccaagaagcatatgaaaaaaaaagctcaatatcactgatcattagagaagtgcaaatcaagccaggtgcagtggctcatgcctgtaatcccaccactttgggaagctgaggtgggtagatcagctgaggtcaggagttcgagaccagcctggccaacatagtgaaaaaccctgtctctactaaaaatacaaaaattaaccagatatgggggcaggagcctgtaatcctagctacttaggaggctgaggcaggagaatcacttgaacctgggaggtggaggttacagtgagctaagatcacaccattgcactctagcctgggcaacagggcaagactctgttttaacaacaacaaaaaaagagtaagtgccaatcaaaaccaaaatgagacaccatctcacaccagtcagaatggctattaaaaagtgaaaaaataacagatcctggcaagactgtggagaaaatggaacacttatacactgttggtgggagtgtaaattagttcaaccactgtggaagacactgtggaaattcctcaaagacctaaatgcagaactaccactcaacccaacaatcccattactgggtatatacccaaaggaatataaatcattctattataaagacacatgcacatgtatgttcactgtagcactattgacaacagcaaagacatggaatcaacccaaatgcccatcagtgattgactggataaagacaatgtggtacatatacaccatggaatactatggagccatgaaaaagaatgagctcctgtccttttcagggacatggatggagctggaggccattatccttagcaaactaacgcaagaacagaaaaccaaataccacgtgttctcacttataagcgggagctaaatggtgagaacacacggacacatggaagagaacaacacacactagggcctattggaggatggagggtgggaggagaaggctcaggaaaaaataactaatgggtaccaggcttaatacctgggtgacaaaataatctttacaacaaacccccacgactcaagtttacctatataataaacctgcacatgtactcctgaacttaaaatgaaagttaaataaataactaaaatgaaaatcagttgatgctgttttctaacaccacagattgtgcaaacattttcatcaggaatggaccatgacaatgctatatagttttccatttttctttgataatcacatttcttttctttttttggttttgttttggctgaaagggaataaatgtgctttcatcttatccttaaggttatccagctgcgtctaatgactaagtccgagatttgcttcaaaattatccagtttgggggtcggggcaagcggggatgaaaatgaaacaaaactcgtcatacactgaggattaccaaaattgggtgatggatacctagaggtgtattatacttgttctctctacttttgtatgtatttgaaaacttccacaataatttttttttttaaagaagaccatttagcttcttatttatattcttctatctgctctttgctcactttgatgggttggtaggtaggctggagaatcacttctgctacaaatttctctttttcaggctctgagccatggcttccattactctggctcatgtgtcctctatgtcttcaggtatttgccagaatctttgatctgcccatatctcagtcttgttctcagcattctttttatcttttttttttttttttttttttgagacggagtctcgctctgtcgcccaggctgcagtgcaatggcatgatctcgggttcaagtgattcttccgcccaggttcaagcgattcttctgcctcagtgtcctgagtagctgggattacaggcacctgccatcatgcctggctaattttttttttgtatttttgtagagacggggtttcaccatgttggccaggttggtcttgagctcctgacttcagatgatgcacccagcttggcctcccaaagtgctgggattacaggcgtgagccaccacgcccggccttctcagcattcttaaatttatttccctttgtgcttgttaactataatttaacatttgctaatatttagtctaccactttgaagcaagaatcctgtgtccactttattttaaccaaacacagaatatcaggtaagaagatatgctctttatcagagagccctggcatataacatgtttccactcatgatgccactattggcttccctttcctttatttaaggtcaccttaaaatatatatgtgtgtgtgtgcatatatatatgtgtgtgtatctatacatacatatatacatatatatatatataaaattattcactgacagaagtctgaggcctagaataaaatataaatgcagaagcaagcaaacaaacaaacaaaaaatatataaactttttttttgtagagatgagatctcactatgttgcccaggctggtctcaaattcctgggctcaagcaatcctcctacctcagcctcccaaagtgctagcattacaggtataagccactatgtctggccaatatcaccttcttaaacttctactgatgctgacccagtagaaaccattgagacagataaatatgagaggtattattcggaagcaccactgaagtgtccccaaaccactaccaaactacacattcttcttaactgtctttacaaaccaacaaatagaatataatcatcttttgaatatacattaaaaagtcatagtaccaaatgccaagacagtggacattctaagaataatatgcagggggaagaaagctcatttacactttcctgggaataaaggcaaatgaactttagttgtgagaaacaaattccttatcctgtagatatattccatttgttttactgttgggcaatttatatataatttggaataaagatcataccttcccctggatttgtccacaagattttctggagagacccttgaacctggtctttgatgatggacagactgagcctgggattctgggctgtaacggtttgatgttttagtcctcacaggtgtagataccaaagcagaaggtgagttctggaatgtagaagtaggaggctgctggggagtctgcgaggaaacttgatttctagcaaaatcttgtgtgataatttgctgtgaatgagaaatgaaggaagtggtaaaattcattgagtacttgcaaaaaaaaaatagtattaagaaatctagatatctttattataaatttctttttctatatgaaatctgctttccccatgatcaaaaaagaaaaattaactaataagaataatgaaaaacttacacagatgtgatcagcaagtgtgatcagccgatgggtcctgggcacttgccccattccctctgcctgtgaagaagggggcagctgttgttggggagatggtgattcctgctgtggtcgatagtgatgtaatggtccttcatattgtctggtaggatcatctaggagagaacacatagatgtcttactccaggaatgtctgtgcttttcactcattatcaaagattaaatataattcagaagaacacctgaaaggatgtggtacatagctccaaacaaagaacttatcttaattttggagaaaaaaaaaattattcactgaagaagtctgaggactagtggaacaaaatataaatgcagaagtaagcaaacaaaattaatataaacaattttctgtatcattaaaaaataaaaaagaatcgattgctgtttctaaagaaggctcatgtaagattaccctaaaacaaacaaaacaagttaattcttactatggtctagacagataattagaagcaaatgataaatgcaaatatgaaaacatgtaaatggtagcttaagaagacatactttccgcttgatttgccttaacaacctctggctgataggtctgcagtttctcctggggtggcgcaggtgagctggcaggacttatcacctcaatagcatcgctaggtgtttcatacctgtgagaagatactttaagaaaagaaaatcttatttcaaaactaatcccaggaaaagtttctgaagtctaagttcttcacacctgtagcattttttcaattctgatccaccatgttcaaaggtattccaggttaatgagggttttctgaagttttatgggctttaagacatgttttaggctgggtgcagtggctcatggctgtaatcccagcactttggaaggccgaggcaggtggatcacctgaggtcaggggtttgagaccagcctgaccaacgtggagaaaccctgtctctactaaaaaaaatacaaaattagtagggcgtggtagctcatgcctgtaatcccagctactcgggaggctgaggccggagaatcgcttgaacccgggaggcggaggttgtggtgagctgagattgtgtcattgcactccattctgggcaacaagagcgaaactccgtctcaaaaaaaaaaaaaaaaaaaaaaaaaaagacatgttttaaagcccaataataaacactggaatgaggcagaacagagaacagatttatgatattttcctgggagctggaaaagaaatcaccagggaaacatttatggaagaggttaataaacaaatgagggagtagatctcaataactgattccaatgattccaattctgtgggacactctgttcttagaaaaacgctgaggctataaagctgcttcattcaccaccatgatgattttaaagctatggattatataacactatataatgattttctcaaataaatggagtattgctaacaaaacttactccaaacattaataattttttagcactgtgttacattgtgaaaataaccagaaatggtagagaatgtctgaagggaagtatattcccagaaagggaggatgtcaaccaactctggaggatacccacatcagaaaaggacctcctctaagacacagttcccaagtaaacagagggctatgcagtggggctaacaggcagcttttcacagtcctgccatagcctcagagctgacagttgggagcagatgtaaccgcctgctcaggaacctctgaattcagagggctcttcacatccacaaactgcactacagaatctgagagcactgtcagagctccaaagggtgcatggccctgggctggacacagatgcagcaggtgggaatgaactctgctccctagccaccacctgctcctctggtactcaacagtccttcctatccccaccaggtcatggaaactgcagctacctgggttctagtacacttaggagattggaaacttgataaatggaacagaaatgatcattgagaaactaaaataaatcactatattctaagaagtttacagtaatttgtgacttttgtatccactgttactcatcactgtttatgtattcaacatcctaaatctggttacaacttccaatattcactcagtagaaagtcggaatccaaaccgtgttcacattgttcttgaagccttaaggggcaagactatggcaatggacctccccttcaggatgaggaaggttctcaagagtcaaactgaaaaccacactgaagaactgtacatagcctttggacatcatggaattcactgaccagtgataaaaaagataaccacacacagagacatggacactcagaaaagatgagctttctattttcacaccttctgaaaatcaaattcctaaagcaaggtttggtttgtgatgcaaactgaaaagaaatgtttaatccaatgattaaggaacccatgtgctataccattcaataagcccaggtgggatctcccagtgtgccggtgacttcccttcaaaagacctattcatacaactatagaatatctctttctcagctagcaattttctgcatgcagaaaatctatattgcagattttcctaatctcaggttaaaagaagtcttttgtctacacaacactaactctctctctaaaagcctcagcaatgcggtagatatgacgtaaacaaattataattaagctagtggatactcagagatcaaaagaactgcacattgcattctggagcatgagaaatcattttttttttcatgatgtctaactctactgaatttattcaatggagataacagaaagatgattatatatgattaaattacttccagtattagcagatgcttatttaaatacttgcttgttctttctgcaattccacatagaattaaggcaatagtttaaaagaaaatttaaaaagtaacttttctagcattttaatgtagacctgtgaattctaacacatttgcagtgtagccatcctaatgactaaccagacttgaacaaaatccaacttgcaaaaacgatgcaatataaataccaatcaccaataataggtagtctcacttttaaaaacctgtgtcttagaaaaaggatattagaggctttggggtattggcataaatatagaaccatgtcctagcaaatgcttcctgagaaattacacctcagtagcccagagcctggcgatatatccattacctttcagatgcctaaatatgttaataaggtctgccttctactttccaaatttaattacatgaatgatacagttttcttgtggaagatacattgataggcttatatgtaggaaactgggatatttaaataatcataaaaacagcagaagatacatttttgcattacatttactatcaaccgttaggatttttaaataccatatagttctacttgacctaaagaataaagtaattctttactcagacatcacattgtgaaactcggattgagatacatacagctactagaagagtctgaactttgagagccacgttccctcgcatccttgtccgaggcaatttgccgggtgatgatcacgtctatgaagttagctgcagtaatggtagtcttccctctggtccttagctcttcctcatatctggattttggaggaggccctttatctttcccagcctcagaataaactactgaagaatgaggctggggcttgccacttggaaaggctgaagaagtgtataaacactgaacagatctcttctccacctccagggttttctgctctagctgctgctgttcactaactgctgctgacctgcttctcaaattttcttctaacctggcagcttcatgcttactctcttttgttttggacacatccatctggggtgcagaagctgcagcatccacaagagcagccagggcatccgcagcagtgttgtaacgggaggctggcaggccttggcttattgaagggcccccagcaggcagtggcctgtaaataaaaccaaatcacagctctgtgaagggaagaccatttgctgggaatgtggtggggagatggaaggacaaactgcaacaacaacaaaaaaagccttcatggcatgggcagaaaagcatgactatacttagactattgcagtcacaaattttaaaatgtatatgcaagagacattttttgtcaaaatatgtacaagagactgacatgattcgtagctgagcagttggatccaaaggtgtgattacactggttccattggttccttggaaaacactgggtctctgttgcaacatggtctcctgagttcttactgaaggggaaggggagcgaacatatccatgactgccaggtcggccaggctgttctgagcctgcagaggtgaaaaagagaaagaaacaaagacataaggaggaagccagagacaaaaggaagcaatgcttatggattgtttatttcctaacatacctaaatagaaaaaagaaaaacaagataagaaacttgatagtctactttctggcctttccagaaatatgttctaaaagtgtccaaataaagatgcaataaaaccgcagcagtaacttgaaacaaaacatcagccatcatttactgtcatttccatttctctgataaatttcaatcttgattccataaataaaacagcaccaacaagaagtactactacaaatcatataagttcatctttctgatttttcctcaaactctagtgtgtatatgatttccaaaatctaatcaggcacaactttctaagcatcataatgaaaataatataccactgctacactagggtttgagactgtttcattcaaccacagtttgccctgcttcacttcttcactgtccccttcacaggtgactctttctctcagcaagctctctcttttgaaatgaaatcattcacattatcttcccacaaaacacttggctcccacaattacacttctacaatatttggtatgtttttgttcacttaaccctaactctcccataaccaagtcagagcttggacttggtaagaactacttcacgcagaggattctgaactctcaaatccctccccagtcactttcttcttgacctcatcttgttctgtgtcctcactccaaccttctaacgtgctcactggcttcataacagctagctgttttatgttttagcacacacccctcttctcacagacaccaccacctcagccaggcttctcagcagttttctcccttctaaccattcatcagcttatatgaatatttatttttttaattaaattaaaaaatttttaagagacagcatcacactctgtcacccaggatggagtgcagtgacactccatagctcactgcagcctcaaactcctggcttcaagggatcatcctacttcatcctcctgagtagctaggactacaggtgcacaccacggctgctggctaattttttatatatatattttagagacagggtctcaccatgttgctgaggctggtcttgaattcctggcctcaagcaatcctcctgccttggcctcctgagtagctgggattataggcatgagccaccatgcccagcttatctgagtatttctatgggatatattcctagacgtggaattactagacaaaagagtatttaaaatttttatctccacagaggctacatccgggaccagccatacccactcttcagggttttaatccatctattccactcgtgtaaatgtccctctgatcatgtcacctgcctcctggacacaacatttcactgtaattcaagatgctacacaagctgctaactgtattttccattcctcctctaaactcaagctcaacaacacctttatatctaggagtttttgctagggctgttctttcagccttgaaagctctgtgaccaatatcttcaggcccaactgcagtccactgtttgcaccaaataaaaatgataccttcatcatgaaaacatttttccgtgtaaaattcacgtttccaccatctcagctgctacagcactttcacctgtttttcacttggggcctgtaataacgttgtcttagaatttttgtttccatcaaaactttttgtgcgcagcattaagcacagtgtacaagattactaagatgtgtccagagaatggaagagcagtgcctttcactgacctggccgcaggtagaggtcggaggaagctgcagcaatccgttcccgctcccgctccttctcccgctcccgttcccgttccctctcagcacttgcagcagctgcaaggtgtgttgggtgtcctgtaaaacataaacctgcagcttaaagataaaaatatcaactgactgagtatatcaaacaattccgaaattctaagtgactgaaaatttttcaaaaagcttcaaatttgggatataagaagtttgttttggctgggtgcagtggctgacacctgtaatcccagcacttcgggaggccaaggcaggtggatcaccggaggccaggagtttacgaccagcctgggcaacatagtgagaccctgtctctactaaaaacacacaaaaaattagccaggtgtggtggcgcgcacctgtaatcccagctactccagaggctgaggcacgagaatctcttgaacctgggagatggaggttgcagtgagctgagatcacaccactgcgctccagcctgggcaacagagccagactctgtctccaaaacaaaaacaaaaaaaaaacaagaaaagagaaaaagaagtttgttttattaagagtcctggataagaactgaagcataacataagcttttaaggcattcctaaggtatctagtgacagctggcacataagaactactattaaatgttaaaagaaaaacaagaaaccaaatgaggaaaaattgcccaagataccttaaaaggctatgttgtaaaaatgtaaacatgatggttctattagagaggtgtgtaactgtacaatctcacctggagacatggaagcagagttgtacggcctgggagggaaagtaatctgtgtaccaggaatataagtgattctgtccatgggaggagtgcttgttccccctggatgaggcactaaaattgttggaggcatattggtcaggtcaatgattcctatccaaaagacaatacaatttatgttaagtgttattctaaaggtacagaaccatacatgactttggattttgtctatctctgtgaatcaagggtaatttgtacataatataaataaaaatgtttactatcatcattactttttaagacattctttaaagaaggatattaaagactgtacttcacatcagtaacctcaaagtatgggcagattaaagagagcaaatttgtaagccatggattacaaatactcagcacaaggatttggtttagttaatttcagtattcaccaaaacaccttgtctcaatgtatgtctctgggctaaaaagtctacgggaggaaggatatagtattcttttctttctttctttccatcattcattcaacaagtatttactgagtacctaagaaacactaggtaaacataataaattctacgaaatctgaaatgcaaagacacacacctctcgttgctgggtatgggagacccagtggctgctctcttggggagagtcctctggccacatctggacgcaagttcacttgcatctgttgtgaggtaatgtaatcatttaagattgtctgtcttgtgttctccattgcgtaaagctgatactgacttgggtaacctggagttggtgaaagctgtctctgaaacaggtaagcagccgctgctgattgagagaatgaaagaaaggcactgagttttgtcctggctgaaatacatttgctaaacaccacgtacaaaagagtagagaaaaatcacatgctgagctagtgcacatggaacttttacttagctacaaggattaaggtggatttattttagaccttgatgtattagcaatagcaattctaatgtctaagatgtaatggaaaaggggaaggataacagtagctaaaaacttctcaagtagttttactttcaatctttgacatgtaactttatcatatttttacctggcatctgcaagagttgtgtttgaaaataaaattgtctttatagtactgatcatccagtacaaccaacagaaatgtatacgaaaatactttgtggcaatcagtaactttactctccagggggtgaaaatgattatagactataagcatttaattagtccatgtgtttggagcagagattggcaaacttttgacataaagggccaaatggtaaatatattttaggctttgtgggccatttcgcatttgtcacagctactcaactctgtcactgtagcacaaaaagagctacggaaaaaaagaataaatggtgtggctgtatcctaataaaactttatttacaaacacaagtggcaacaggatttggccaaaaagctgtagtttttagcaacccctaggtgagagaatgacacaagacacaagatacgaggaaggggtaggcgtggtaaaaagtagataatgtctctctcctcaaaacattataatccaactcaggctcaaaaacaagcaaaagaaaccactacaaaatgaagacaatgataaacactaaatagaaaccagaaaaattccattttgtctgagaacttgagtgacctattttatatgtatatgttctccctagaaaaacaagtaacatgttttctggaatatttgcttccccttcatctagaagctaggtaagtctgtcagctgacacaatctgggagacagtgccctaagtaataggtattgggctcctctgaaacagtgttgtcaaatgacaaataatttgatggcatttacacagcttttagataaaatatttcccacagttactttcctattattatgaaatgtaaataacccttagaattcttacttttaaaatttagcatactgataatgaaaaattcttctctaaggaccaaagtgaggcacaagtattctgtgtcctaatttgcacctgaaggatacttattaagcaaagagtttatttaggccagagaagaggtctcagcagaaaacacatgtgtgactgggctcagccaatagcggcaaggaagagcaaggactgcaccctgggaggacaaggtgcagccggtggtcctgcagattataacagcccagccaagcctctctgtaccaaccgatgtgactgctcctctcccctccctgtgtaaaacacaatgccctctgcccagcagactgctctctagaaacctgcacatctgcacctatcagattctgtctaccaatgtcagtggtgttctgaagtttcttccagctgtacttgttactagaattatgtaacttaatgacataatttgtaaatcaaggaagaatgaagagtggtttctctgaaaactaacagctttggaaagagttgatacagaagttgaatcaggtgcggactagacaacttcaaaggctggaaaaaaaatctagaaggattctgtatttagattgcttggaagtgtctttacttggaagttctagctttacttaaaaaaaagaatttcttttatataagacagtgagacttaatcacttgtttatgaaaaagccttggcattagatcagagttctggtaaatgaacgtctatttatgctgtaagttaacatgtttaggtatgcctctgtcattttaaaataattattcacattaatccactttttcaactagtttcaccaagtgccatcagataagagagcttttcatatactattctttttagttctttaccgggtgctgataagattttatttcttgatctgggtgctggtaacatgggagaatttagtttgtgaaaattcactgagctgtacattaatgatatttgcaattgtactatattgtacaacaacagaaagctgaaaagtcatactggtggcatatttatttgccataaattatcactatattttgtgtttaccaggatccaaagccctgtgaaaaggcatggctggatccaagtgcgtgggcaggtggctccgataaacctcgcctgcagtgctgcctctgtgatggggatcaaacggactgtggctcacgacagggtccaccccaggcactggagacttcgctgggatactttccctctgggtaggggtcagtgtcgatttcctttcatgattggtagacttgttagaagaaattgtaactggaaaaaaagagccaatgccacaagttcttaagaaacttgcaagtatgataatatttgtccatttctcaaccattcaaataaagactatattcatgtatttggatcttctctttccactcaacatttaacattcaatattgcaaaatatgaaaatgtaaacaacatatgaaaatgtaaacaactagtagaaactgagatttggagagtactgtcaccttttggatcatagcaccagtattttaccaccttatgtaacattaaaaataaaattcaatactcttctttaaatctcattatgaatcattttgttttttgtatgactttaacattctaaattcttttgtccccacatgtagtaaacttcagttttctctcattgcctgtgttatgcaacctccttcctacccattaatcactagtttcactaattttttccttgctctgttcttccacaatgactttctcattacttcaccaatatctatcacctccctactccagcctctcttctcttaaatgatgttattcaggatggtcagattgtcccaccaataaatatatattcaaacacttattagccatcatcctcaattttttttttttttttttgagatagagtctcgctgtcacccaggctggagtgcagtggcgtgatcttggctcactgcagtctctacctcctgggttcaagcgattctcctgtctcagcctcccaagtagctgggactacaggagcgcgccaccatgcacggctaattgtttttgtatttttagtagagacaggatttcaccatgttggccaggatgggctcaatctcctgacctcatgatccgcccgccttggcctcccaaagtgctgggattatgggtatgagctgctgcacccagccaccctcaattttttttaactgtggtgaaatatacataacataaaatttacaattttagccattttaaagggtacaattcacagtggcattaagtacaagcatgatggctgtgtaaccatcacatctaattactaatattttgatactataaactttaccacaatcaaacaaatctgcctgcccaaagaaagaaatcacactggtttatcacatccccttccaagtcccagcgtgctcaaatatggagtgcccttccctctgcagggcaattcgccatcaaaactaaagctacaagcatttggactcacctccccatccctaacaaggacttccccttctcctcactctgtgctacgcccctcacacccgccaaaacacacttgtacagctcacagtgcccagcccaggacgtaccatgtgagccatcaataaatttgtattataataaaaaatggtaagtggatgcatttttaagggcctcaggttgatagggaccacttggtaaaaatcacttctcaactgatgtagctgccagtagcatggggttatagtgacaacaataataacaacagtaacaccaacaggaataattcacatttatcgagcccttcgtaaatactcggcaccattctaagttctttacatgtactaccttatttgatcttcataacaatccagagaggtaggtcttaatgttacattatgattttacagatcaggaaactaagctacaaaaaaactaagtaactcatctgagttgatgcagtaagaatgttaattcaagcttatgcagtcttgttccagaggctacttacagctttcacaccacactgccgctgaaggaacaatgtcaaaactgacttccagaaaaccttatgcaattggctgaaaatccactctaaaaatatacttactctatagcatttctggactgcatcataatctgcacttgatttaaatatcaggtattttacttaaattatgcctacttttaaattagtagccttccatactcctagactcaagcaagacctgtagatcttgggatactctaaagctgacaatttgatatttactacttgacaaaggtttttttttttttttttaaatgcaataaaaagtatcagaccaagcaacaaaagtaacataccatcagaagttctgttcatcatgggtgagcctctggacatggtgttttgataactcacaggggtcctccgtgcactggtgtcatcataaatcccagggctcagttgtgctttgggagcttcatgcagtgtggacctaagaacggaggggccagagcttaccactgacgtgtgccgggaacgcacggtctcgcctgctttcacatcctcatattttccccgttctaccacttttatgttctctggcacaatttccagcggaggcattccacgggatagtttgctaggccccgtgattaaggatttgacattgtgtttgatggcagattgacctgagttgttgtcaaactttattggtgtgccctaaagggaaagaaacaaacattacaggtagcaaagtcatctggctacttttctatctcaggtctatgtctggcccatggcagttacagttcactgtggtgatcttttttggtctgtttacaaatctcaatcacaaccccactgatcccaagctgcatactttcccacattccacactctatgctatagacataagaaaacctgatgataagaagtacacaaggccaggcatggtggttcacacctgtaatcccagcgctttgggaggctgaggtgggcagatcacctgaggtcaggagttcgaaaccagcctgaccaacatggagaaaccctgtctctcctaaaaatacaaaattagccaggcgtggtggcaggtacctgtaatctcagctactcgggaggctggggcaggagaatcgcttgaacccaggaggcggacgttgcagtgagccaagatcgtgccattacacaaaggccaagcacagtggctcacgcctgtgatcccagcactttgggatgctgagatgggcagatcacttgagctcaggagttcgagaccagccttggcaacatggcaaagccctgtctctataaaaatacaaaaattctgggtgtggaggtacatgcctgtagtcctagctactcgggaggctgaggtgggaggatcgcttgagcccaggaggtcaaggctatatagtgagctgtgatcacacaccgcactccagcctggtccacagaggaaaaaaaaaaaaggtacaggaaactttcatgtttacttccaggaggtctgacatcataagaaccacttataattattaagtcacacttttttaaatgttccataaatatcagttactgacaaaaagagccaaaacttagttacctgggaaatggaaccctcaattatcggccgtgtgctctggaccacttctggagttttccgactttcctgagttaaaatatcttgccttggaatctcatgaatggaacgccccatttctttgatggtggtgatgccatcatatggttttcctttggtaatggcaccttcaaatgctcgtatgggaggactttcccttttaatttgtttgggatatttaaggccatcttcaaagctttcagttgttgctcttggtgtcccttgaaaaagaattcaggaaacattaaaataatgctgatggttgcacaacaatgccacggaactgtgcacttaaaaatggttaaaatggtaaattttgttacatatattttaacataatttaaaataatgccttgacatcttgtagtttctaattaactttctgtttacagtagatcctcaaatcagtatttatcaatcattatttctttagggttgcttgagatatgatattaatgcatcattcataatagtcacagaatggttcttgcataataaagatatctctatattaaaagattaagcaactatcatcttccaataaattatgtagctcagaggcagaaaagtaataaccaagactttaatatttcaaaagggaaaataacttgaaaagcagaaatacactgtaaattaatgtcaaactattttgccagggaggcagttataaataaaaatgcaaaacaagcagaaagtttaccctgcattatggagccagacaatacagtcctttctttgaggtcagaatgaggactccccctgggtaatgctcggcatatcagcccttccaaaacaagaaagcaattcaattattcaacataatgtatatgtcaactcacatatactgaatgctgttcttaaagtctatgtttttgataaatgctctatgaaggaaggaatgtcaatttaagtttgtgaactatccagaagtacctaatatgacatcacacagtcctttgtaaatattttcctaaataaaaaatggccaccaaaggcatctaatgaaaggttgaaaaggaaagataccttcaaagttaaatctaaaatcccaacacttctttatcaagaggaaagaagatacaggattggaaaccattgcttagctttgaaatatacttgtgataaagggaaaacgggaaatatggataccataaaaatagggaaaatgtattaaatgaaacatgcaaattgaaacgaaagagttgtaaataacctcctaagaagcttcacattattgttgctgataaatataaatcaagggttagaaataaccacacatatttacagtaaaagtgtgtgtttttaacatagagaaaaatacagctcttagaaaattacacaggacttaccctgcttttagtatttcatctagcttaaaattggttgaggcaggttaagatttaaacaaagtgggccattaacaaaacaaaatcatactgatcatgtactgaagccatatcacatgagcagcaccagttcagacacctgcctctaaccctcacacagtgttaggtacgatcccttaatttacagaggaagaaacaggctcaaaggaattttaccagggaagggtgaagctgaaatttaaattcatgtctttatccattacaccactttatctgtctcacaattcaaaaagaagttctcataataaactttaccttttttaactcacttagctgaaacaggaataatctgcaaattgtatgagcattcaaatatgaacattctaatagtaacctatgatatgaccaattacgcttaaatttgacttccttccattgttatgtgccactttatatacagatataaacttaatataaatatatatttcaggtggaaatgacagaaattgcatacaacttaatataaatatacatttcaggtggaaatgacagaaattgcatacaacttaattcaacaatgcaaaattactatataaaataacatgtatcaaaataacattctgaaaacaatgctttaccctctaacggtgctgatacaggagactccctcattgacatcccttgctttatatttccttccactgattcatagcttctctttaaactgatttcatgagctgttcttggactcctagtcccttctcgggcattcttaatatctacagaatacacaaacaagacttgctcagacggagcacatggtatacaatgtacagtaaataggttagtttcatagtctatcttataaaaataataatattaaaacttgtcttaacctacaataaaatatgtgtagatgattcatgaaaatattttcactcattcaaatgtgtttattgatgcctactgtgtgctaggcataagctaggcttgcaggtaagattaacaaattaagtccctttctgcatgaaacttacacaataatgtaggtacagattatgtagtaaaataagctatgaaaggagaagtataatgtgctatgaaaatgctaggagagaaacctaacacctccaggttcagataagcctgctcagaggaagcaatgtgtaagctgagaatgaaggatgaataagagttgttcaagtcaaaggtaataggaggaaaaagtacaggcagtgtgaacagtgaacacgaagaccccaaggtgagacagagaaaggtacaataaaagaacgtaagcgtggtaaccggctaatgtgtagagtggagttgggaggaagagtgtgggggaggtaaatataggggactaaagggaaaagtgagaagggaaaaatgtgaagagctaagctgaaagcagctcctggaggggttataaagctaaggtaggggtttgcagttatatccagggtgatggaaaaatcagtcaaggagtgacgtggtacacactttgaatatgggtgagactgaaggtagggagatgagttaggtggctgctgggttaaagatgatggtgacagtggtgaatacagagtaatggatggattctagacactttaggaaaataaacagaaatggcttagtgatttggtggatgtggaaagaaacagaggtgtgtagacttctgatatggacaacgtacattattaatttcttaaccccaaaaacaaaatgtgaatcataatatgccagacgtgtaaaggagagtgaaataagaatgctatcaagcattttgcagcatctggcactatgtacgcacatactttatttctttgtattggaagagaaagcatagctcatgactactccaaggtcacagagtcaggtgcaaataagaactcaaattcactcaaaactttggctaatatttctatcacatttgagtcattcttataaaatactactactgagaaaatataacaagaatacatctaaaaaaatgtacatagacattaaaatagttttattaaggagtatttaatattatcaagattatcagaatattatctaccttctaattctttttgtttgtttgtttgagacagactctcgctctgtcgcccaggctggagtgcagtggcccaatctcagctcactgcaagttctgcctcccgggttcacgccattctcctggctcagcctcccgagtagctgggactacaggcgcccgccaccatgcccggctaattttttggtatttttagtagagacagggtttcaccgtgttagccaggatggtctcgatctcctgaccttgtgatccgcctgcctcggcctcccaaagtactgggattagatagtagataggcgtgaaccaccgcgcccagcctatctaccctctaattcttaattcataaaacatgaatctcttcaaaataaaagtattccattaaagttcaacaaaggctctttacctaagctaaactgactgaccacagtcgacaatcttagctaccacctatgggacatttaatatgagctctgcgttgttaattactttttatcgactaagctgttattcacaaaattctcatgagacaagtattactaaccccatttactgagagaaaacataggctcagcaaagataaactgactcccagagagcagaaatgcgggaaaacccaagcctatgtttttagcacatattgtaatactggctttggtgcatacatacaatacttactatcatatgacaagatatgtccacttttgccttcataaataacatggcctttggatgcagcttcctctctgcctttctcaggactgctgtcttcaatgggcattctcgaaatggaccccttcaccaaagcctctgttggtatgccagtctggggcagagccggggtgccctgccatcaaatcaagcataaatagcagaggagtcactcgagtttagggaaaacacaagatgctcagaaaatttaacctatgacagagtcaggctaatctatagcttcaaagaagaaagcacacatacatgaaaggaaattagacattgaatttttatcaacatgaagacatcctgtaccttcatccttcaactcagccacataacacttaaaattatgacacgtacattaggtgaatcaactttgctctcaccttcatgtgaggactctattacaggatttaactctcagaagtttctcttaaggactaaaatcaagtaaatgtaacagcttttattaggttgttgcaaatgtaattgcagtttttgcgttgttgaaatttgccgtttgatactggaatacattcttaaataaatgtggttaagttcttgttttcttctgaatgtagttacgcaatatatcattttaatgtgcatttgtcactttttttgttaatgacttattacttggtgttttatatttattttagacgatgaaaattatgttatacaaaaagcaaattcaagtgattttcttattcaagttcaaaatgggttgtaaagcagcagagacaattcataacatcaacaacgcatttggcccaggaactgttaacaagcatacagtgcagtggtggttcaagaagttttacaaaggaaacaagagccttgaagatgaggagcatagtggccggccatcggaagttgacaacaaccaattgagagcaatcattgatgctgatcctcttacaactacacgagaagttgccaaagaactcaacgtcaaccattctacggttgtttggcatttgaagcaaactggaaaggtgaaaaagctcagtaaatgggtgccccatgagctgagcgaaaattttaaaaactgtctttctgaagtgtcttctcttattctaggcaacaacaaaccatttctcaactggatcatgacatccgatgaaaagtagattttatacaaaaactagcgacaaccacctcagtggctggactgagaagcagctccaaaacacttcccaaagccaaacttgcaccaaaaaaaggtggtctgctgccagtctgagccactacagctttccgaatcccggcaaaaccattacatatgacaagtatgctcagcaaatgaatgagatgcactgaaaactgcaatgcctgcagccagcactggtcaacagaaatagcccaattctccacgacaacacctgtgtcacacaaccaatgcttcaaaaattgaatgaattgggctatgaagttttgcctcatctgccacattcacctgacctctctctctaccacttattcaagcatctcgacaactttatgcagggaaaattcttccacaagcagcagaatgctttccatggctggctgtggtggcttgcgcctgtaatcccagcactgtgggaggccaagacgggcggatcacctgaagccaggggttcaagaccagcctggccaacatggcgaaaccccatctctactaaaaatacaaaaattagccaggcacggctgcgcacacctgtaattccagctacttgggtggctgaggtaggagaatcacttgaaccctggaggcagaggttgcagtgagctgagatggcaccactgcactccatgctccagcctgggcaacagagcaagactctgtcaaaaaagcaagcaagcaaaaaggaaggaaaggaaaggtaaggaaagggaaggagaggagaggggaggagaggggaggagaggggaggagaggggaggagaggggaggagaggggagggggggaggagggggaggagaggggaggagaggataggggaggggaggagaggggggaggggagggggaggggagaagggagggaaaagaaaaggaagggaggaagggaggaagggaaaagaaaagagaaaagaaaagagaaagaaaatgctttctaagagtttgttgaatctcgaagcatgtatttttatgctacaggaatgaacaagattatttctcactggcaaaaatgtgttgattgtaatggttcctattttgataaagatgcgtttgagcctagttataatgatttaaaattcacagtccgaaatcacatctttgcaccaacctaatataaattttctaataaaaataagatgataaagtagttttaaatttagagtactacaactttttctcaaattgtgatatgagggaaaaataactttcaaatatcaaactgactactaggttgttaggcctttggatgcctctgtgttttgacactgattcagtttaggtcaggttatctatattttcaccatcatcaatcctcctctggagttgccaatgaccatgattctttttacccttcctttaagcagcgagcccttccttcaaggaaaattgttcatagaatctaatacgtagagcattttgcaagagagagcagcttggtgtaaaataggagttagaggcctagactgagtttactcacatttagggtcaccactatactctgaggactgctaaaaccctagagagcacaatctgataccatatgcttaagaaaagcgataagagacatacacttacttgtccagtcattaagtgaactcattagtaagtgtctagaaatccttaacgcccacttcagaagtactcatgtcaagtgcacaaacagattttaaacagataaaatttagtctcctttggcccagttcatactctttcttcccacagtttggatgccagagtgaagagaaagaataatacatacaggcccatttactttcctctgtccatattaaagtattagcttgctgttaaaacagaaacacactgacccaatataaatggagactttttttttttttgagacggagtctcactctgccacccaggctggagtgcagtggcacaatctcagctcactgcaacctccgcctcccaggttcaagtgattctcttgcctcagcctcctgagtagctgggattacaggcgcacaccactatgcccgcctaatttttgtatttttagtagagacggggtttcaccatgttggtcaggctggtctcaaactcctgacctcgtgatccgctctccttggcctcccaaagtgctgggattacaggcgtgagccaccgcgcctggcctaaaaagagagattttaagagtcagtatgtaactttcttttcttctgtttttaacttaaccacaaggaagtagtatgtaaactacatttcagaaagaaatcacctgggaacctcagtaaaatggggattttaattcacatgatctagagtgcggactgacatttctgcattattctagcaagcatcccagtgatgccaatgctctggtgcacaaaccacacttggccagcaaagccctagctgaatcagctaagggcttgggaaaacacagactgccagtccccaccaacaagggttgggtttcagtaaatctggggtaagatctgaaaatttatatgtgtagcaattttctaggtgattctgatgctcctggtgtggggatcatactttgagaacaactgtcttagaggatagtaactagacaaataaaaaacttgtgacaatgagtgaacactttagaaaatgcaaggcacaggtttctgtttacaatgatttcccaaaacagaattttccctcttatgcatatacataaagaggctaagaacttcttaagtatcaagttaaaattaacaactaactgagagaaattttattaatcaaaattggtgatgtatttagcccaaaattggaaggcttctggtgcttttgttaataccatccacatttcctggtttagcattagattctaacaaggcagcccacatactgagattctacaactacatctccaccagggcaaaagtaagcaaataattcgtaatgattttcttctcaatttctatttaggctaaacacatggtaaaagcttttccaggaagacaataagagctgcatcaattagaacatatttctttttccagtttgcaaataagtgaccttttcaaatgaaccaaagtattcataatatagcttgtagtcaaaatgatcacattaacgtctctgtggagacagtttgcagatctaggttatgagacccagtcccataatgcagaaaaatgaacttaagccacaaaatagccaaagtgctaagaattatttatcattttttcctgagcttctgttgagtatatcagagatgatcgtgactaacctgagtgatagagccccgtagggatggaatgctctccactgaaattttgctggttggagttccccgagttatacttccttcttgtatggctcctgcggtacctgaatacaaacaaagctattagcaaattacacccccagcccctgccccaaaacataaaaaaacagcccctacttgggagagtactcaactaagaagaaaagaaaaaagcagcacaaaacccatcatgtttgttttattaaaatgtacttccaaaataatactaaagaactgctgaaacatggaacttcaaggttttaaaatgacttttacatggaaagaaaacaaatttagaatttaaagactatagttaaaaaagcccatcattaaaatatattaataacttactttaataaatttattggggacaaaagtttaacatttctgccaaccagcatattttacctctgactacaccttcatgttgggccctgaccaacagaccctcaggttgtgagttttggcttcggggagaaaattcttcctgcttgatgtagggcaaagtagctgtggaaaggcagagaaacatgaaacaatccagtactaaattactggctgtgatgctacaaacgtagatgcattatgactgtattaactcactgacctgatttggcagattcctgttgccgtggcagtccaagagagatagatcccactgacggcttgggtgtttcttgagtgtaggaagcctgattatgagaagtcaaataagtgcctggtgttccctaagaaaaaaacaaaaaaaaatttaaagattaagcaaacattgtttttttcacaaggtcaatttcacaaagtcagcattcccatttctgtttaaaaaaaaaaaaaattataccccttctacccaaaaccaagaatagtttttgtaaagcaagaaaatcttcatcgtagattgcttaaatataaaaaaaattttaaagggagtaggatatgtcttctaaaattaccatacattacatgtaaatagtatttactattaataaattacataaataaagcacttatatgttgcaatcaaaatgtaagctactattattaatattcattccgactaaaaatgctatggagagtggtatcagcaaatacagcaaagtaataaggacttccaaaaactctcttccataaaagcaacaagaaaacctggaaaaattttaagaatcaacctttttttttcttttcttttcttttgttttttttgttttctttttgtttttttttttgagacagagatttgctctatcacccaggctggagtgcagtggagcaatctcggctcactgcaacctccgcctcccagtctcaagcaatgtaagaatcgacttttaaagaaccctggaaattaaccaaaggcttgtagaaatctggaaatatttatttaaaaaaaaaaaaaaaagctgaatctaggtaaaaacaggtaaaaacaatgggctttgtggcattttaacttgttccattctcattctcctgatcaaactctatggaagtgttgaaaaccaaaagcactcaatcatagtgcaaacctatggtggctgcctggcagccactagaagggaaagagcaaggatggagctccttaaaagcctcattcccagataactgtcattgtttgacttctctgttggttctctgggagactccattcacaaagctgtctttatttgacctgactggagtgggagaggaggtgcagacttgtcaaaaacaatcagaggcaactgattaacttctccactgcctgagacagtagataacagccagggtaaacaacaggctaaccaaaacacttaaaaggaaaagccagggaatgagatgttcatggggtctgaaaaactccaacatattccctagaacctagaatgctacatgcatgtgcaaggctatgaatatgcctaggaaagacatgggaaggccccactgctctcaacttaggctgcccttaaggctctgcacgccaggaagtaaagactaaggcaaagctgttaagtgcccaacacataaagagcacccctcagcaaaggctgattttactgattttagacatttaaggaaatgtctgtctaatcattagctgatcactaagttaatcagacttcagtggctacacacaacaaataatacagactttacagaattagttaagaaaagtcactaagcaaataataacagccaaaagaaacaacaagctctgaaaagaaaagtgggggtgggggggatccaagttccagagttgctacattatacaaaatgtccagtttttgaccaaaaattataagatacgcaaagaaacatgaaagtgtgagccatacatatgaaacagagcagggaacagaaaatattcctgagctttgggctcaggaataaagactttaaatcagctattataaatgtattccaagaactaaaataaaccatgtctaaattaaaggaggccaggtgcagtggcctgccttctttaatccttacactttgggaaacccaggcaggaggatcgcttgaggccaagagtctgagaccagccttaacaagatattaagactctgtctctataaaaaataaaaaaaaaattaaaagccaggcatagtgatgcatgcctgtagttccagctactcaggatgctgaggcaggattgactgagcccaggagactgatgctacagtgagctaagatcatgccactgcactccagcctgagcaacagaattgttttaggagagagaaaaagaaaaaaaaaaagaagaaagtacaagaatgatacttcaccagatagagaacaccaacaaagagaaagaaatcattaaaaagaacaaaatagaaattctggagctaaaaaaatataagaactaggggtgggggtgggtctcagcaaactaagaacggaaggaaacatcttcaatctgatgaaagacatccatgaaaaacttaacattctgcctaacagtaaaatactgaatgccttccttctaagatgagcaacaagaaattcatgtccatgttcaccaattcactattcagtattcctgtatcaagaccatcctggccaacatggtgaaaccccgtctctactaaaaatacaaaaagattagccagacagggtggcgtgcacctgtagtcccagctacttgggaggctgaggctggagaattgtttgaaactgggaggcggaggttgcagtgagccgagatcgtgtcactgcactccagcctgggcaacagagcaagactctgtctcaaaaaaaggaaaaaaaaaaaaattcctagccactcggaaggctgaggtgggaggactgcttgagcccaggagttggaggctacagtgagctatgatcacactactgcaaagcaagactttgtccaaaaaaaaaaaacaaaaacaaaatttaaaggaatcaaatagccaaatataaatcaaacaaaacacatacaaatctctaaagtgaaaactttaaagcgctgctgagagatatagatatacaagttcatagattagaagattcgatgtaagatttccatttctacctcaaattgatctatagatttaatacaatcccaacaaaaatcccagcagatgggtggttcatggtttttttttttttttggtcttttaaaccttaaactataatttgaagcattctcagatgtttggggggaaacatcctcgtaaaatagttccctatgctcgccttctggggaggcagtgctgagcaggtgaatcgtaaagcatttatgcatatgttaaatgctcactgcacccacctcttccccacaacctttgcctcttgggtggtttgtgctactttccccttactttgctacatttctacagttaagttggttttacttaaatgattcatgtttggggggggaaataaacatcacccttaaaacatgtttcaactcctgcaaataaaataaatgaagtggcgaaagaaaagaaaaaaaaagagaagagaagagatcccagcagaattttttttctttaagtagactgacaaacagattgtttctgcctctgctgctgccaggtgcccatgaaaaagtgggggcaaaaaaagaaaaaaagcaggttctgaagtatacccttgactggatctaccccgcagatgatgctgccaattgtgagcagtttctccaagacagaattaaagtgaatggaaaagctgggaatcttggtggaggggtagtaactattgaaaggagcaagaacacaagcaccgtaacttctgaggtgcctttttccaaagggtatttgaaatagctcatcaaaaaatatctgaagaataagctatgtgattggtcgtgcgtagctgctaatagcaaagagaatttcggattgtgttacttccaaattaaccaggacaaagagaaggaagatgaggattataactcatttacctggaatgttttgtatgagttcttgaataaaacttgggaaccaaaaaaaggggggagacagacattgataagctgattatataatttatatgaaaatgcaaaagacatcaaatagtcaaaacaatcttgaaaaacaaaaacactgaagacttatactacatgatttcaggacttacaataaagctacagtaatcaagactgtggtactgacaaaacgatgaacaagtagatcagtggaacagcatggagacagtgcagaaacagacccatatatactgtcaaatgatttctaacaaaggaactgaagcgatcaaatgagtaaaagacgtttcaactggtgctatttttcaactagaaatttaaataaagatgaatgttaatcctgacctcatactatacacaaaaattaatttgagactggtcacatgcctcaatataaaagccaaaattataaagctttcagaagaaaacacaggcgaatatctcacaaccttggagcaggccaagatttcttagcaaaataaaactaatcataggagaaaaaagtgtgtatatatatttagactatataaaaatttgaaacttctcatcaaaataccagtaagaaaataaacagacaaaaaacagagaaaatatttgtaatacatatatctaacagagaactttcaaccataataaagatctacaacacagtatcaaaaagacccagtagaaacagataatcagacttaaatagtcacttcataggtgtacaaatggccaataagcacatgaaaagtgcccaacattgtttgttttcagggaaatgtaaaatacaaccacaataagatattactacacaccaagtatgactaaaatgaccaagacttgacaacagcaaatggagcaatcacgtctcatacattgctagtggcagcataaaattgtagaaccattctggaaaagtataaaacatacacaaacctagtaattccactcccaggtaattgtacaagaaaaataaaaacatatgtccacaaagaacccattacaagaatgaccagctttattcatagctgccaaaaactggaaatagctcaggttttcatcaacaggagaatggataaacaaactggtattactcagcaataaaaaggaagaaactactgattacataaaaccctggatgaattccctaaaaccattatgctgggttaaagaagacagacacaaaagagtacaccatgtttgattccattcacaggaagttctagaaaaggcaaaactaatctacaacaacaggaaatcaaatagtggttgcttcaggcagtggaaggggagatggcctgggaaggaacatgagaaaactttctgaagtgatggaagtgttcaataagttgacaggggtgtgaccactgatgtacagttagtcaaaactgatggaactgtgaagaccagaccatatctcaattttttaaaaagtaatgaaccagaaaaaagatttagtggccaaagtcagaataaattataatactaaccacctacaatttaatattttgagcctttaccatatgttagtgaacaaatattctactgtttgaaactaagtttaaaacttggtaagtttagagtgatgtaaattaaaccaagtggtatgccaagtgccaagtgtaattaaatgggtggtatgttatgaccactcaatctgggtacataactcactgaaagttctgatttgtggcaagagtacagtgactgctgcatcttctggtcattatctcttgaaacttcatattcagacagattattatttattacaactctgacaaatcagtgcgaggagggaggacaagttttaacaaagccatattcaacaagaaatctactgtaaagagaagtcgtttcacctgtgagatggagcctcccattataaaagatggtttttctgaagccactgtggttttggatgacgggatgagagggggcggtggcctggttggtcgagttgtcggaagccgaacgccttcagggagattagttatcacttgatgtggagcaggctgaaggacttttaaaaggaaagaaaaatgattttaaactagtccatttcctagtttacaacatgttacctctctcagtcattcctgaatttttaaatcactaattaaaaaatgtaagatgaaaccaacaatgaacatttctattttaaatttctcattcacgtaagcctgtatacatatttgtcacaaatactatttgtggggttgaaatattcaactccctttcaaaccacagctttcaagctgatgcttatttcaaacttctgcttagcatagcaaacatcagtcttcaaaaattttttctctctcgccaatcactcttagggtacttcttaaaaacagctgataacactacttcagagaatgcgcagacatgactgacaaccagttatacatcctttttgcatcttgcatattgagaaacacttactgattctggctctcacagaacacttgaattttggggatggggagatctcaagacttttacaaattcatgtactcttcttaaaggaagagccagtcaatgtcacagtataaatgtgtgaacacaaatttcccagtggcccagtgaactcaactaaatacaactgatgatggaacgcagagaaacaaagtcattctgaaacagcaaggacacgtcctggaagagcagttcattcacgagattaaaccacccacgtggaacatctgtgggtggatggccagcagccactgcacagaggagtgatatttacctggcgggacactatagcgggctgcactcatatcaggctgtggagcggctttactgacttctcttggagaaagcctacacggtgaggctgaccttgctgcagtattgtgcatctgtgcttcctgttctagagcacgtttgacctcagcataaggcatataggcgactgattttcctatgaaagttaaagttatcaaaataagggaagaaccccaaattaaaatagtaagtgtgaaaggaccaagcccacaccatccaggggctgatccgactataacattaaagtctaaaactcctgggggcaaaattcacccacagagaagttaagaaatcctgtaaatctaaatctcctgtgtatcctcaaaaattcatttacgagttttccctttaaaggaaaaagaacttctctttcctcttaaggagaatcaagtgttttcacatgcaataaaatcacaacaggcaaacatcagattatcaagcaattctgttaattcaaatctggcctgactggaggttattagctttgcgaggatttcacaagtcttataattagcctgttgaagctcactccttgctaatattcacagaaatatatttaattaagaaatggaagaagcctttcaaaagatgcagatcaaactaattcaaaaatcctacataagcttataaaaaccatgaatataactacaataatactaatgaaaattacttctcatgtaagttatctccacataaagcataaagaaactttaaatattttaaagggcacgccagaaatgcagtcatatttaagactttaaaatatatagtttctttttaaaatgaaacatctgtaatttttgaaaatcaaaaaagcacaaagtaaaactcatttgtaaccctgaccacttagatttgtagcattttaatgtctgtcagaataaattcccactcattttatttattattttcattacctagttgtatccatttatctttccaagtaaatctaaatttaaaatcattgagtacttcctctcaaaacaaagaataaatagaattttcattagacttgtattaaatttatgaataaacaggtgatgatattttataataatgagttttctagttgagaaatcttgtttttgtcagatagttccatcccttgcttgttaaaaattattcctagatatgtcatattggtaagaaaaccatctcttttatatatatgagtttatataaataaacctgattactgcagacatacaggaaagatgcggatttctgtgtaataattttttctgaaaaacctaatgaactttccttttagctctaataacttttcagttgattcttttaggctttctaggtgaataatcttatcctgtaaataatttgtcttttcccttcaaatacctaaacctcttatttccttactacactatcttttgtaaggtgcttttaaaaatcagaaacaattacaaaaatatcaactgatattcaagtgctaggcagtgtgcattacatacaatatctatttagccctcaagaccaatgtgattattaataccattttacagatgaggaaactgaggctcagaaaaatcacatctaattgcccaatcaaggtctaccagcgatttttttaaaagcagtataattccggaccgttagctctaaaccacagtgcaatagtgtctcactaaaggactgggtgtggaatttcagatgtctctggtgtatccatcaagacgatggtactttttccttctttgacatattaatataatgaattagagtaagtgtcctaatactgagaaaacagatttatgaaataaccaactccaaaagaaaatcactttcctagataatttaatatgataatgtattaaaaatccaatgtctgattattttaccatttccagtaagtttataactatgtttaaaaaaaaaaatccactggtcatagtagtggtttttttttttttttaaatgatggaaattggatggttctaaacacagctatctacatcaccatgtacccagagcaggaaaagaaaaacagcaacagcaacaaaataaacatgcaacaaactagggtcagttacatagaagcattaactcttattttaattggataattttgttaaatttgcattagaagttcaattctaactctacctccatatgcttaagtttgagttccttcactgtagaaaagaggcttaaaagttatcagtaaagcagaggtcaactcgtataaatgttactggtaagtgaaaacaattctctaaggttttttttcaaccttttctacagatgggaaaagctttaagcaacttaaaacaggcatacctacagtaattatttataccattcacattaagagaaataaatacaaccaaatagttggacaacaagtgctgcctgttacttgctaaaagagaccatgaagggaaaagtaaaaaccatggccctaattcaggtggactgtaccaatatttggtgatactttatacataaatccatactatcactattcttcacattctataaactgttctatgaggttaaatttaaaccatttttgtcaaacattctagacacaagcatcttaactgcaaacatttaaatgttatttgaaaggttatcctatacactgaactacaggatagactcaaggaaaaacttctggtacttgttaaacaaattacaggatgaatacactagggagattagctaaaacaaaacaacctttggataaacttgccctactttgtagagcatcaccttcgaccaaactgtaaaattcttaatgtcatactaatcaaaagtataattacaatttgattttaagatgactgaattatgattaaaaattaggataccactgagatctaaaccacgtgtagtaatgtgactaacacagagaaatacaattcacagtttggagtctcagaatttggggctccagcctggttcagtttcttcagttcccaaatacaactcattttataaagcagaccaataaaagatattgaggctttaaaattatgatatccatatttaaatgacccagatattactaacaatgatgttatgccttgtcataagttcaacaaatgataccatctgaatgtcatttttctaacttttactacttcttcacaaaatctatcctaaataataaatgtaaggaatacatccagagacttttattctctaaagtttcattttccactgacggatttcctcataattcgaatgttcaaaagacaaacacctgcgatgtccattaataccctgtagtgaaacacgataaggatatctccattatgtcattcatttataattcattcctttaaggtgtaattactgagtacatgttgtgtcaattacagaactagcgattaagaattccctagacccaacagagtaaaagcctaaaagttatcaatatttctaccttcattcaaggaaatattcatttagcgccttttatattccttggtggatattatcattctggttcacatttttcctagcacaagatttatgtttaaaaattaacaagtttaaatttaaaactctaacataagaggttcagtgtattaggcaactaataactcaatattggtgtgatctgggcagagtcagcaggatcagttaagtaccacagttcctattttatattaaataacccttggaatgcatggcattgtaaagctaatagctcttatttagctaaataaagtactgtaaagaatcttctgaatcattcagactatttcagtattctgatattctaagcatatcgtagcatataagtagactataaactcattcttaaccagaaacatgtgccaattcttctaaccatgtcagaagaatgtattaaaacataaaaaccacccctttcttctttttttaaagaaagtaaaagtgtatcacacaccaactaaaacagcaacggaccaactcaaatccatcacttgaaataaaaacagtgatgtaacaatgaaaacaggtacctccatagtatctactgtgtatatacagtactaatacactaattaatatgtaataacgtgctacattatacataaaataatgcagagccacctgttatataacaataccgaatgctccttccttaactttacaaccacagcaaggtagacgtgtactattattttcattttacagatgagaaaactaaagctatgaaaggttaagtgacttgcctgtggccacacagctggcaaatgccaaggtgaaggcttagccagcgtctgattggaaatatccactacacaaagttgtgtctctcatctaccagagaatgtgaatattacactgtaatacttgaaggtgatttgcttcaaggacaggacaacaattctcactctgaaaattcagatgaacggaacataaagcataactttatttataatgtcttccagcacaaagatgaatatcagaaaattcacattaactagaatgctattaaaaatgttactggcatcctttagtagttaataatactaacatttcttcatagtttaaggtcaatttaaggaactgtgtctgttaggacaaatataataatcagttgggaggctgacaacttacaaagcacaatggacactgcttttgggtttagctttatttcccttcataaaagttctcttggtgatagctctatctacctaccttcccactctctgtttggactcttggatgtgccacatggacttgtagaacttctacattccaaatctatctgttcttgtctctgccgctgctcctccaggagtgctgactcatgcattgctttaatgtgtcgctggtagagagcatagccgctcactggggttccaattggtatgttacatggggtgcaggatacctataggaagaaaataaatcgaaatatgcaaacaaccaatgtaataattgccatctcttaacaagtaatgtaatgcttatttctgtcatgttattggttgaattgattttatcattttttaatcaaagttatcttcaagaataatgcttaaggcattgcagtggctcatgcctgtaatcccatcactttgggaggccgaggcaggcagatcacctgaggtcgggagttcaagaccagcctggctggtattttgtatctttgtaccaaaaatacaaaaatttagctgggtgcagtgaggcatgcctgtagtcccagctactcgggaggctgacacatgagaatcacttgagcctgggaggcagaggttgcagtgggctgagattgcaccactgcactccagcctgggcaacacagcaagacctagttttctttcagaactgatcacaatataaatcacacaagctgtaataacagaaatcaaaaatcagaaattacaacacatctgtctgattctaatttatggcagccaagtcccttgtggccctaggtcccatccctcatctctctttcaccagggatcagatccatttatatatatatatatatatatatatatatatatatatatatatatatatttttttttttttttttttttaagacatagtctcactctgttgcccaggctgcagtgcaatggtgcaatcttggctcgctgcaacgtccacctcccgggttcaagcaattatcctgcctcagcctcccaagtagctgggattacaggtgtgcaccaccacacccaactaatttttctattttttttttagtagcgaaggggtttcgccatgttggccaggctggtctcgaactcctggcctcaagtgatccactcacctcagcctcccgaaatgctggaattacaggtatgagccaccgtgcctggcagatcacatccatttatgttgatttaaatgtcatccatttgttaatgattcacaaattttctacttcctcaagacactttctccaagttccacacttacataaaatggcctacctaacaactccacttgggatatctcaaggaagctcagaacttatgttaaagggaacttcccatttttgaaactccattcttcttcagttgctctccattttagacatggaaccccaggtgcttcagccagaaacctggcagccatccttgactaattaatctcctcctctcccacaaccaactcattcacatagccattcccttaggatagaaatggactgttccttaagataggccatccataaccatccaataaaacatggtgataccctccctgttttccttctcattgaggcctgttcactgctttcacagtacacagtatttgccagtttgaaactgttttatttttctgtctctctgactttatgaagaaaataacccaagatgttttgtccaatacttaaaaaaatagcccagaacacagtccaggattaaatacctcatgaataacaaatatccctagaaagccctagaggtctgacttttttttagaatctggtaacttaagacttccatagtttttcccctagcgtaagtagtattattcactgatcctaaaacccataactttcttgcctttgtgctttgtcttccatataaacatagcttttcctccttttgctataacgccaaatgagctgttttgatccaatgaaaatattatttcttatgcagtcttctgtaagtgtctaattaagaagacactccctcttctccaaaacatccatagtattttttaacctaatagagcatcgcattttaattcattttaacctttacgataattttttttaatgccttttttttgagacagtgtctcgctttttcacccaggctagagtgcagtggtgccatctcacctcaccacaacctcaaactctcgagctcaaggaatccttccacctcagcctcccaaccacaggcgcatggcaccatgcggagctaatttttttttgtttttttttggagagacagggtttcgctatgttgcccaagctggtcttggaactcctgcggtcaagtgatccacccacctcggcctcccaaaagtgttgggattacaggcgtgagccaccacgcccagcctctttgccttattatgcagaccggtccatacgttttttgaaatcagaggctataatatataaatactctccacaatattaagaacattatcttaaactaatcactcaataaatgtccatttgaatgagtcagtgaatgaacaaatgtttaatgatctttttgtggtaagtacacaattaaaaacttttaccacttattatttgagatagaaaacacatttttgaataaagcaagagctttaaatatttgaataaatagaaaataactaaagaaaagaacaaggtcattttctggtgcctaaagaaaaattgagagtgttggaggtgttcaaacaagagtgactccggctcccctcccctctcccctctcccctctctcctcccctttccatggtctccctctcatgccgagccaaagctggactgtgccgctgccatctcggctcactgcaacctccctgcctgattctcctgcctcagcctgccgagtgcctgcgattgcaggcgcgcgccgccacgcctgactggttttcgtatttttttggtggagacggggtttcgctgtgttggctgggctggtctccagctcctaaccgcgagtgatccaccagcctcggcattctgaggtgccgggattgcagatggagtctcgttaactcagtgctcaatggtgcccaggctggagtgcagtggcgtgatctcggctcgctacaacctccacctcccagccgcctgccttggccccccaaagtgcagagattgcagcctctgcccggccgccaccccgtctgggaagtgaggagcgtctctgcctggccgcccaccgtctgggatgtgaggagcccctctgcctggctgcccagtctggaaagtgaggagcgtctctgcccggccgccatcccacctgggaagtgagcagcgcctcttcccggccgccatcccatctaggaagtgaggaacgtctctgcccggccgcccatcgtctgagatgtggggagcgcctctaccccgccgccccgtctgggatgtgaggagcacctcggcccggccgcgaccccgtctgggaggtgaggagcgtctctgcccggccgccccgtctgagaagtgaggagaccctctgcccggctgccaccccgtctgggaagtgaggagcgtctccgcccggcagccaccccgcccgggagggaggtggggggtcagcccccgccaggccagccgccccatccgggagggaggtggggggtcagccccccgcccggccagccgccccgtccgggannnnnnnnnnnnnnnnnnnnnnnnnnnnnnnnnnnnnnnnnnnnnnnnnnnnnnnnnnnnnnnnnnnnnnnnnnnnnnnnnnnnnnnnnnnnnnnnnnnnnnnnnnnnnnnnnnnnnnnnnnnnnnnnnnnnnnnnnnnnnnnnnnnnnnnnnnnnnnnnnnnnnnnnnnnnnnnnnnnnnnnnnnnnnnnnnnnnnnnnccccccccccccccccgccagccaccccatccgggagggaggtggggggggggtcagcccccctgcccagccagccgccccgtccgggagggaggtgggggggggggtcagccgccccgtccgggagggaggtgggggagtcagccccccgcccggccagccgccccgtctgggaggtgaggggcgcctctgcccggctgcccctactgggaagtgaggagcccctctgcccggccaccaccccgtctgggaggaggtacccaacagctcattgagaacgggccatgatgacgatggcggttttgtggaatagaaaagggggcaaggtggggaaaagattgagaaatcggatggttgctgtgtctgtgtagaaagtagtagacatgggagacttttcattttgttctgtactaagaaaaattcttctgccttgggatcctgttgatctatgaccttacccccaaccctgtgctctctgaaacatgtgctgtgtccactcagggttaaatggattaagggtggtgcaagatgtgctttgttaaacagatgcttgaaggcagcatactcgttgagagtcatcaccactccccaatctcaagtaccagggacacaaacactctgcctaggaaaaccagagacctttgttcacttgtttgtctgctgaccttccctccgctgttgtcctatgaccctgccaaatccccctctgcgagaaacacccaagaatgatcaataaaaaaaaaataaaataaagaaaagaacaatacccaagattggaattcagtatcaaaaatgagtcaaattttacagattattaaggtaaaatataaataaaatatacttgaaatctgtagattattaaggtaaaatataaaaataaactagacttgaaattgtatactggagttagccataatctctacaatttattctaactattcaaaacctaattacatgcttaatgctactactgttttatggctccttagtgctgtggttacaaacaaaaacaggacttactaatatttatggctagagcattatatttctttttttttcttaactggaaatgaccgtttcaatcaatcatcacaagtcatttgaaaaagcaatgtactaaggatataacctttggttatctcaaagagtttactcaaagttagactcagcatcttcctacccttctctcccatatgtcttagcactccctaacccaagcccagcacaagaggatgtaagaaaaaccaaggtgctaaaatcaagggctgaccatacaggtactagtcacaatagtccagaggtggaagcaatccaaatgtctatgaatggatgaatgaataaaatgtgatatacagatacaatggagtattattcagcctttaaaaataaagaaattctggcacctgctaagtatacctggaggacattatgctgagtgaaataagcctatcacaaaatgacaaatactgtatgatttcatttatatgacataatgtggcacaataaaaattaaatatttggtccttctcccaaagactttttttgttccaaatccttagaatttccagagcagtaagagtgtcttttgtatgctaacaagatgactcctggctggggcctctagattgcctcaggataagggctgacagcccaaaaaaccacaaggcaggaggctagaacttctttggggattggggtaggatgtctcttaatattttgcccagactgggtttgaacttgcaatcctcttgcctcagcctcccaaatagctgggaatacagggctgggagtactgttgggcaccaccatgcccagcaagggctggaactttcagctccatccagctcaccccacccccaaccctccagggagaggagaggggctaaaggttcatgcacccatcaccaatggccaatgatttaatcattcatacctatgtgatgaggccttcataaaaaccccaaatgatggggttttaagagtttccaggctggtgaacacgtggagttgctgggagggaggcagacctagataggagacagaagctccacaccccttctgcacaccttgcccgatccatctcttccatttggctgtttctgagttatatcccttataatgaactagtaattataagtaaagcattttcctaagttctctgaggcattttagcaaattatggaacctgacgaggagagtcggaggaatccccagtctgcagcctagtcagaagcgtgagtaacctggggacccaatacctatagaactggcatcagaaatgggggtagccttgtggtactgagcccttacacttgtggtattagatgattacgccaggtagttggtgtccgaattgaactgaactgtaggaacctagttggtgaccaaagaggtggagaattcgttggtgtgaggaaaaagcccatacatttggtatagtaagtattgtgggaaagaacagttcattggtatctaaactgtgtgttaaattcatagaaccagaaagcagaacagtggttaccagtggcaagcggcaggaggaagagaggagttgtttaattaatttcgcattcgaaagatgaaaaggtcctggggatcattttctaaacaatgtcaatatacttaacacacttaacacgagtgaactgtatacttagaattggttacgattattaatttcatgttatgttttgtaccactatttttttaatcaagaaccaattaaagaacagaagaaatatgtctataaaggtctcagtttttcatatttagttttcttcctcacaataaaaacttaccattggtgggataacagcagctcgatgctgaagctgtggcagatccagtggatttggttttaacggagatgagacgagtatagatccagtggggtttaacagtgaaggctttgagtccataggaaacattctgcaattgcaatttaaaaaaaagataaatgaatacatttttaagactcaaacatataatcactataagttcttctaagttagtatgtacatacacatgcacacatggacacatggacacacatatattaacccatataaaatatttggacagttaaggaaaaaggaacctacaaagctgattttccagataaagaaactgaatatcgtactcacttcagcagcgcacatactaaaattgaaatgatacaaagattaccatggcccctgtgcaagaaaaacatgcaaatttgcaaagcattttatattagaaagaaaagaaaaaagaaacctaatactgacttacaggttgaaatttatctgtattgtctatatctaaccaacaaaacaatctaaacgaagtccatttaaaactgttcagtcctaatttaccacaaatatcctaacatgggttaaaaactagttacctgttagaggatgttttattgggatcacagagtatttttttaaatatttgaataagctgctgtgatttttaaactgaaaatttcatccaaaattccagacctctggcttctcatgaaaaatggaaagaaccaacaacatgaaatcagcactccccaacagcagcgacctgccatgcatccagcagccgccaccccgctcacatgagcacacactcctctgctcaccatagtccctgccatctcacactccaccggctgatgttgcccatacctacactcaagtttaggatgcccaatatataaacttgaggaaattttgtactagtgtcatgctttatgggcctggtcatatttcccagtgttgtcatggtcactgggggaaggtgaacatttaaaaatgtagaaattggtaagaaaatcagaatgtatttaaaaaaacaattcacatactatataaagaaagattatattaaagctataggaaattgaaagtgttatttcggtcatttgggagcagtgtagactttagtgtgtcattaagaaaccatcatatttttccaaggaatttctgaatttcaaaactactatcatgttcatctcttaggatgtttaccatttaaaattactgccatcctacctaatttttccttcacgtatagttaccaaaaccaacagtgcaaaacacagataatccttatttagatgagatgtttcaataaggaatgcttaaaaagggactacacagcttgaatccatttatgtttactgcagttaaagactgacaccattaaaataaaatctagattactctgaggtgaaagaaaaagagtgatagtcaaattttctggtaaaccaacacttaagcagaacacctattttatttcaattcatgctgatgaaaattctagcatctactatataaaacactctgaggaatcagcactataatgctccatattattattctagtatcaaatctcattatggagtacataagatataaaatatattggatatgaactgaaaatacagtgacaccaagacacactctgaaagataaactttgaagagaatttagctatctgttgagtagcttgtctctttattcttattaaaaagaaaaaaaaggagtggggtttaattgggttcggattaagtgatgtttcagtctaattcacttctagaatttgcaccaatttatcattctactaaaattataagtgattcaatgtcttttaaggaaaaggaaacaccaggaaataaaatatattaaataaagtaataactgtacctgtaaaatatatatcttttactgtaatttttacaaaaaccataaagatatgatacattttttgtataattaattaacctttaatgactaaagctacctgtaaactgcagggagcggtggctcatgcctgtaattccagcactttgggaggctgagatgggtggatcacctgaggtcaggagtttgagaccagcctggccaacacggcaaaaccccatctctactaaaaatacaaaaattagccaagcatggtggcgtgtgcctgtagtcccagctactcagaaggctgaggcaggagaatcacgtgaactcaagaggtggaggatgcagtgacccgagatcgtgtcattgcactccagcctggggaagaacgagactccgtctcaaaaaaagaaaaaaaacttgtaaattaatctgcattatacctgatattttaaattacaaatatgaacaatctaaaatgttaactgatacaaaaaagtggtcataattatcattactttgcatttaaattatgctttctaaaaattttcagaacactgaacatgtctctcttttcagcattttcttctacctaataagtaggggctggtaggccttgttttgaggttgcactgccttagagaagcgggagtgcctcaatgcctctagcctccaccttcttctaccacatcccactgctgccctcctcaggcacaacagttatctgtggtttattcacaactttattagttgaaattccctgttatgctatcatacagaatacacgtaacaagacagatataggagaaatgtataatctgtttcattaaaatgatcatacaatagtttgtggttatttaaacagaacagtatcagcccaatattaaaattgtacagactacctataacgtgccaatatttacataggagacatgtctgcagccagcaccaccctgtgattcagtcaccaaccagcagagtaagcacggggaggacttatggaacgagcctcacctctgcctctctggctctccatccacatcctcatcagcgctgcacgtggcactggaatcattgtctgactggggctcgggcctttgggcatttatttgctgagctaccaccaaatcttcatctctaggttccaccttctcactggctctatccaagtctctttctttggtattatcaccttcaactttagatgcatggttttctggcaccctcacttcaacgtccacagagtcagctttggtagcgggtgggggatcacaaacagaaccctcttcagcactgtgctcctgctgatctacatccatctgctctgctgtctcagcactgatgctgtcattcacctgggtctccacactttcatcttcagctggttttgtacttggaactgctaaggagggagatgtactgggtgcagtttccgtggtgggctcaagctcaaccgcaggttctgtgtttcctcgagaagtagcattttcaggactgtcctcgctgggcttgacagcttcaactggtgaaggagaaggagcactttctgtatcagaactattttctgcaccttaaagataatgatacagcataaaaatctgataatgaacatgtttcaggtggtgatagaaaccatgtttgaaagtagttgtttaggatgaattctactcctttgatgacctcattgaagtatttacagccattgagaaggctaaagtttcctacagagtataaaagtgaaagatcaaattatcttgaccttctgaaactaaaagcataaaggattttaatgtctgaaaataatttatatgaaattgaaaaagaacgaacaataaaactaaacaaaaaacattcctataaatgatgacattctggtgtatttctagaagcctcttcctgtgaatttccttttacccagctgaactgacactctagaacggctccatccaatagacatataatgtaatcacatctgtaattttaatttttctgatggtcacattaaaaaagtaagaagaaattggtcaaataatttaaactttttttttaatttttaattttttggagatggggttttgctcttgttacccaggctggagtgcaatggtgcgatctcggctcactgcaacctccgcctcctgggttcaagcgattctcctgcctcagcctcccaagtagctggatttacaggtgtgtgccaccatgcctagctaattttgtagaatttatttaattaacccagtatatgtgaaatatcattttaacatgtgatcaatagcaaaaaatcataagattatttttcctttttttgggtactaaatcttcaaaatctggtgtgcattttacattttctgcatatctaattttttttttttggaggcagagtctcgctctgtcacccaggctggactgcagtggtgctttcttggctcactgcagcctccgcctcccaggttccagcgattcttgtgcctcagcctcctgagtagctgggattataggtgcctggcaccatgcccggctaatttttgtatttttagtagagatggggtttcaccatgttgcccaggctggtcttgaactcctgacgtcaggtgatccgcctgccttggcctcccaaagtgctgggattacagacataggccaccgcacccagcctgcatatctaaatttaaactagccaaatttcaagtgctcaatagccacaagtgtctagcggctaccacactggacagaaggctgtagaatactatttcacagatttttaatttaatgttgtaacagatctttccccatatcgtttatattgttctataatcgtttatattgttctataaatagactttcagtgctttttgacatctttacctagatatatcaaaggcagcacaaattcagtatgtcctgtactagagttgtaataaccactcgcaaatcagattcttttctagggtttactatccaattaaacaaaacagagaccaagaagtcatcttttaaaccctcttctcatttaccccatatccagccttgacaaggctcactgattttctctctaaaaatttctcttgaatctatccaatcctgttcaacttcacagctagcactctagtccaaaaccaactctcttcactccacttcagaccattctttacaacaaagatagagttgtctttttaaaagccagattttaccacaataactcactctctcactctcataacttttcagtggacccccattactattaggataaagtcccaaaattgctggtatgatctgcaaggccttgcccagtgggccccctccagcctctccagcttgcacacagctctctgaattcaagtcacactggcctttatttagtttgttcaatgcctcatgcatcttctaccacagagactttgtacatgccattcacctttactgaaaggctctttcacctacttttcctttggtgatcaactcaaacatcacatgcttaaaaagccttctatgggctgggcgcactggctcacgcctgtaatcccagcactttgggaggccgaggtggatggatcacctgaggtgaggagtttgagaccatcctgaccgacatagtgaaaccccgtctctactaaaaatacaaaattagccacatgtggcatgcctgtgctcccagctacttgggaggctgaagtaggagaatcgcttgaatccgggaagtggaggttgtggtgagccgagatcatgccagcctgggcaacaagagtgaaactctgtacccccacccccccaaaaaagccttccatggtttccttaacaaagttatattttgctaatatagttctgataccacatgtactagttacagttacaatcttacatttatttactagaatgatttctggctatttcttccactaggctataaactccatgaagacagagatcatttattttgattatcacttaagtactagcctggtacacagtagactcaaatactggctggattataaagtacatgaatggttgtgaaaacctaagtaaccgtctgggaaaaaaaaatattttttaattgtatataatagacagcaatataaaaaaaacttctacaaattcatcctttcaaatatgatgaagtgtcaactatgtatgtgcagggagctgtctgaggtaccacggacacagcaatttaagaaaacctaagcagatgctctcatggagcccatattctagcgtgaaatagacaacagtaaatatgtgatataggctgagagtggtggctcacgcctataatcccagcactttgggaagttaaggcaggaagaatgcctgaggccaggagttcaagaccagcttgggccacatagtaagacctcatctctacaaaaaaattaaaaaattagctagtcatggtggcgtacaccagtaatcccagctattgggaggctgaggcaagagaatcacttgagcccaagaggtcaaggcttgcagtgagctgtgttcacgctggtacacttcagcgctgggttaacagagtgagaccctgtctcaaaaaaacaaaagaagtgatatatcaggtggtgatcagtgcagtgactaaacgacaaaactgagaaagaagtgggtgaggaggtattatagaaaaaagtgatatctgaacagaggactcaaggaaatgagagaatgagccctaggcacatggtggggaagagcatcccaggtagagggattagaaagcacaaaggctcctgaagtcggggttggtttgcccaggaacagcaaagaggacagtgtggttggagcagagggggccaacaaaaaagcagctggcagaaagttcacagaggtacaaaggtcagttcatgcagagcctcataaattgcagtaaggccttgggtctttatttttactgagatgggaaagtattacagaatttggactagagaagaaacatgatttgattcacattttggaagaattacttgggctgctgtggaagaaaaaacagaatggaccttgtctctacacaaaataaaaaagtacattagtcaggtgtggtggtacacgcctatggtcccagatacttggggggatgaggtgggaaaatcgcttgagcctgggagtttgaggctgcagtgagccacgatcgagccactgcactccagcctaggtgacacagcgagacctcatctctaaaaataaataaaaagaatggaacaaaaagaagcaagagactaatcaaaaaactactgcaatgagggctcctcagaagcagggtaggagcaatggagacaaggatccaattctaaagagactaaagaaaacctaatttattgatatagtgaaagaccagagggaaaagcagcttgtggtggtagagacacatgagtttgctttggctgttaacaacaagatggctcttaggcatccaaatggaaatactgtaggtgatcaaatatatgagcctggagttcacatgagagttcaagtctccaaaaaacaaacaaacaaacaaacaaacaaacaaagacagacaagcaaataattcagaagagtacctcacatgtagtaaggttttaatatatggcagccatggccaggcgcggtggctcatgcctgtaatcccagcactttggaaggccaaggcaggcggaacacctgaggtcaggagttcgagacaagcctgaccaacgtagcgaaaccccatctctactaaaagtacaaaaattagctgggcgtggtggcaagtgcctataatcccagctactcgggaggctgaggcaggggaattgcttgaacccgggaagcagaggttacagtgagctgagattgcaacactgcactccagcctgggcaacaagcgcgagactccatctctaaaacaaacaaacaaaccaacaaacaaaaacggcagccattatcattactgaaagatcctaccaaagcattgaaaagctaacaaaaagcccaacttaaccttcatttctgtttatatagtggtagaaagccccaaatccaagggcaaactaacaaggcatttatcttcaaaatattagaagacatgttagtggttatacagcagatgatatcatttgacataagcacttttccaattttcttcttccaagccacaaaagagtaggaaggtttccaaggcataatgtttcaccaagcagtagccaaacatgagtatctttttttttcctaaaaatacaaaaaaaaaccttaaagaatgatgtagaaaaagagaacaagagcaaatccaaattttggtgaagtttggtctgatttaattcttctaatcatgaaagatactcaaacactcagatgtgttttaggaaaacagatagaggaaccctcccttcagcagctgccttcgttcttcaattggcaagagacttgccacacaataaacagtgcatctgtgctgtctcattgagattaggaataagtatgagatcacaggtcacatgagctgcatttatgttctcttcttgacactttccaaatgaagctaagtcaacaggaagagagagcctacaattctactgggaaaatcatttcctcttaataggaaactcttctagatgattgagcagatgtgatggtgccaccctacacttgatcagacatatatatatatatatatatatatatatatttttttttttttttttttttttttttttgagacagtctcgctctgtcgcccaggctggagtgcagtggcgtgatctcagctcactgcaagctccgcctcccaggttcacaccattctcctgcctcagcctcccgagtagctgggactacaggcgcccgccaccatgcccggctaacttttttttgtatttttagtagagacggggtttcaccgtgttagccaggatggtctcaatctcctgacatcgtgttccgccctcctgggcctccccaagtgttggggttacaggcatgagccactgcgcccggcccagatagacatattaataccagacttgggctttgttatggactgcattgtgcccctccccaccaaaattcttctgttggagccctaccccccaatgtaactgtatttgaagacgaggcctttaaggagatgactaaggttaaatgagattataacagtgggctctaatccagtaggagttgtcttcatatgaggaagagacaccaggagtgcgcacacccaaaggaaaggccatgtaaggacaaagtaacaaggcggttagccatctgcaagccacaaagacagccctcatcagaaagcaactgtgccagcaccttgaccttgcacgtacagcctccagaaccgtgagaaaattaatttcagttgctgcagccacccaatctgtggtattttgttatggcagcccaaggagatttattaacctccagccttcattaacatttataaccccagggaatactagccaccagaaacaaacccattaaaaccaagagactctgacaacctctctagaagtgccattaacacaccaaactaccttccctgtttgcagcactcttaccctaccctcgggtgggacttctctaatactctctctactcttgtaaagatgacctcatttttcacaaaccctcccaaaaacaagtttaaggttaggggttgttcaaagccaaaacccatttcaatacaagtttaagtttaaaagacaacaagaataatctataggaaaaaaaaaacatggaatctaatattactaaacctggaggatgtacaacttttaaagcttatacaaaataaagaccctacacagaaaagagatacaactctaattacacaaactttaaacaaaagtaattgaaaaggaaaacaaaaagaaaatgatggaaaaaattatctgcatatacaaaacatgaacatgtttaatttataatatatgaagagctactaaaagcattataaaaatccccacatcagaagcaatttccaaaaaaaaaaaaaaaaaatccacagaaactttaatcagagtgtaaactgaaataaattaggtatcttttttcttaccaaaaaaatcaagaaaacatttacctttccatgaacttgtcattagtttaaatgacaaagatacattatttcttaaatttccttaagtttcgtgttttttttttctatcggtgcttctaaggtcactaattctttttacgtaaaaacattactacagtacatataaatctctgtaaaaatatgaaaataaatcaaacttaagccaataaaataaagagaaatgtaaccaactatactaactgaacaaataaatgtggcaatgacacagacacacaggtattttattgatgttggcacttgatgtctgaagcaggactgccatttccaagatcttctggaccatcctaggtgctacataaatatttgttgattaaatgaataaaaacattatgttcaagtttgaagtctccacaccatgaaaacactggcacactgtttcctcaatgaagcaactcctacacagtcaaatgactaaaaattatttattctggatagcagatgtcacaactaaatttaaaattttgagataccttcgctgtcttctggattttcttcttcattggaggcttcaatatcttcatcctcctgagcagaaacagtggaagcgacactttcacattgagacacatctcgctcttcacgaggttttcgtgaagtctaaaggaggaaagagtattatttgatttaaataactaaaaagaaaaaaaaattcatttctgaaataatgtagaacattgataagcacacacacacaccagacaaggaggtcacatgtttgacaatagttctggttaaagtgcagataaatacctctccataatcactaactggccaaattttgtgtagatggctcgcctttatcaaactaagcaaaagttacatctgatccacttttggaattactcaccactatacatgtataaaaagccaaaaatcacatacctccatgctttttactcactccagataatgttatctaataaaaacaatatatatatattttttctaaagataatatataccttgaaatgtggaagacataacactacaaaaatcactgctcattattccaacagtaagagatcctaaatataccggtacatttcctttcaatctttcagaggcatatacatgaatataaatatttatgtatacatgtaaacacaaccaggaaagccctatgtaattacatattcacttttttaacataatgtagccatgagcagaacatatcactgttacaaattcttcctaattattgttattaatgatcccatgaaaacattatgttgacataatactgacatatattatgttgacatataattaaaattctcctattttaaggcattttggtaattttcaatttttggtataaataatgctgcaagaaacttccttcactagcattaagaatcacgcaattttataagcaacaactcatcattgatattactactgaatttctttttaccactcaatttatttttcttttttgagacagaatcttgctctgtcacccaggctggagtgcagtggcaggatctcagctcactggaacctccacctcctgggttcaagcaattctctgcctcagcctcccgaatagttggaattacaagcacccgccaccaggcccagctaattttcatgtttttagtagagacggggtttcaccatcttggccaggctggtcttgaactcctgacctcgtgatccacccgctttggcctcccaaagtgctgggattacaggcgtgagccaccgcacccagccaataccactcaatttcttttactataaaaaagcacaaattcagctaagcataggagctcatgtctataatcccagcactttgggagactgaggtgggaggatcacttgaactcaggagtttgagattagcctgcgcaacaaagttggacacctgtccctacaaaaaataaaaaaattagctctgtgtgctggtgctctcctgtagtcccagttacacagtagactgagccagggagatcgcttgagcccaaaaggctgaatctgcagtgagctgtgatcatgccactgcactccaggctgggtgacagtgagactcgttcaaaaaaaaaacaaaaaacaaaaaaacaaaaattttttttaattcctttttaaaaaaaattgtatgctcccttctgcaaagtatgtttatgcaaaattgctcattcttctactggggtcgcatatacgtaagagtacatgtgtacacatttaactataagacgttagctatttacattatatttataacttcatgttactaaatagaaggcttaatatcttctgtgtttgcagacccagggttctggaagtcccagccctgatggtcctctgtcttgtgccccttacagagcctacgtttcacctcatatgagctgtcagcctctcccagtgagactcctcagaagaggaaaatatactactgccctgttaaaaattacccgtacatctactcaacattctcatgcggatgatatttaggatccaactaaaatattaattaactcaagagaaacaatcattttctaatatcagagtcacagaattagttgcaattctcaaggctaatatttctaagttcatagcaggaatgcaagagaatcccagagacacactggctacactttctaaaaagctttcagaagattctgtaaattttcaaggataataactacttttaatttatttgtttgtttttgaatatgaggtgttgctgtgttgcccagactggtctggaacatctggcctcaagcaatccaggtgtgacctaccatgcccagcagataaattattatatggatttttccagagcccagtgtatgtccctctctcaccactatcaacccattctgtttggtcctttcactagtaactagggaagagacaactttttaccctactacaacatccctctgttcacatgcaataattcactacgttgccaagcattttcttcaatatatgatagtattcactaattcttaatgtaaagtcaaatatatagaaacacaggccaggcgcagtggctcatggccagacccagtggctcagacctgtaatcccagcacactgggaggccaaggcgggcagataacttgaggccaggagttcaagaccagcctggccaacatggtgaaaccccgtctctactaaaaatacaaacattagtcaggcatggtggtgtgtgcctgtaatcccagctacttgggacactgaggcaggagtatcgcttgagcccaggaggcagaggttgcagtgagccaagatcaagccactgcactccagccttggtgacagagcgaaactccatctcaaaaaataaaattaaataaaaattaaaattaaaaaaaaaaagaagacattctgccaggaaaactgcctttggggtccaactgcaactcttcccagaatctccaatcaaccagcctactccattagacactggactcaccaaccctccacaatcacaggagccagttccttaaatctcaatctttctttctatatatatgcatacacacatcctgttaactgtgtttctgaggaggaccatgactaatataacatacatttatttatttatttttatttttatttttcagacggagtcttgcactgtcacccaggctggagtgcagtggcgccatctcggctcactgcaagctccggctcccgggttcaggccattctcctgcctcagcctcccgagtagctgggactacaggtgcccgccaccatgcccggctaattttttgtacttttagtagagaaggggtttcaccatgttagccaggatggtctcaatctcctgacctaatgatccacccaccttgacgtcccaaagtgctgagattacaggcgtgagtccccacacccagccaacatttatattttaaatacatatctgactcattttttacttcactttttctcaaaacattttggatgttacctcctgaagtcaagtctttatcttgtcagtagactttttcatgttttggttgctacagcatatttttaactctcacattcttattattaacctaaaggccgctttgtatacacacttttaaatcagtcaatgttatactttgtatactcttaataaattcaaatcttattagctttactatcacactttaataattctcaaattttttggtctaaggatgcaacactcttaaaaagtattaaaggccgcagagaacttttcttttttttcttttgagacggagtctcactctgtcgcccggctggagtacagtggcgcgatctcagctcactgcaacctccgcctcccaggttcaagtgattctactggcctcccgagtagctgggattaaaggtgcacaccatcacacccagctaatttttgtatttttagtagagacagggtttcaccacgttggccaggatggtcttgatctcttgaactcgtgatctgcccgcctcggcctcccaacgtgctgggattaaaggcgtgagccactgcacctggccaaagagcttttctttatgggagaaatatagacagccagatagacacttactatatcagaaactaaaactaagaaaacttcaaaattttaaattattaaaaacaatataaactcataaattattatttatttatttattttgagatggaatctcgctctgtcgcctaggctggagtgcagtggtgcgatctcggctcactgcaagctctgcctcctgggttcacaccattctcctgcctcagcctccccaatggctgggactacaggcacccaccaccatggccggctaacatttttttctgtatttttagtagagacggggtttcaccatgttagccaggatggtctcgatctcctgaccttgtgttctgccctcctcagcctcccaaagtgctgggattacaggcataagccaccgcgcctggccaagaatttatttttttaatgaaaagtaaccattttccaaaaaaaaaaaaatgacttactaaaacagtggcacaaccttccccttttggaaatctcttccatgtctgatctaacagagacagcacaattctcaaggtgcttccacatatgatctaatctgtggattacattaagtaatctaatgttttggttgaagtataagaaaacaatgtagcctcacacagatatgtcgttggaaaagggaagaatattttaacagatttttcagatacttatgcatactattttttgatactgtaccaaaactcaccaagtgtcacttcttatttgttagttacaatatgaaatcttataccatatcaaggaacccttcatactctgttaaaatctataatctggccaggcgcggtggctcacgcctgtaatcccagtactttggaaggctgaggcaggcagatcacttgaggccaggagctgaagaccagcctgaccaacatggtgaaaccccatctctactaaaaatacaaaaattagctgggcatagcggcgtgcgcctgtaatcccagctgctaaggaggctgaggcaggagaattgcttgaacctgggaggcggaggttgcagtaagccaagatcatgccactgcactccagcctgggcaacagggtgagactccatctcaaaaaaaaagaaaaaagaaaaaaatctgtaacctatcttacgtttggtatattaaaaaaacattatcaatcttttatcaatgcatgatccattatgtattagttcattttcacgctgctgataaagacatacttgagactgggaagtaaaagaggtttaatggacttacagttccacatggctggggaggcttcacaatcatggcaaaagggaaggaggagcaagtaacgtcttacatgatggcggcaggcaaaaaaaaaaaaaaaaaaaaaaaaaacttgtgcaggggaactcctctttctaaaaccagtagatctcctaagacttattcactatcacaaaaatagcatgagaaagacctgccccatgattcaattatctcccactgggtccctcccacaacacatgggaactgtgggacctacaattcaagatgagatttgggtggggacacagccataccatatcattctgccgctggcccctcccacatctcatgtcttcacatttcaaaaccaatcatgccttcccaacagtcctccaaagtcttcactaatttcagcattaacccaaaagtccatagcccaaagtctcatctgagacaaggcaagtcccttcccctatgagcctgtgaaagcagaagcaagttagttacttcctagatacaatgggggcacaggtattgggtaaatacagctgttccaagtgggagaaactggccaaacgaaaggggctatagggtctatccaagtccaaaatccagcagggcagtcaaaccttaaagctccaaaatgatctcctttgactccatgtctcacgtccaggtcgtgctgatgcaagaggtgggttcccacggtcttgggcagctccaatcctgtggctttgcagggaacagcctccttcctggctgttttcacagggtagcgttgagtgtctgcggcttttccaggcacacagtgcaaactgtaggtggatctaccattctggaggatggtggccctcttcttacagctccattaggcagtgcactagtagggagtctgaccccccatttcccttctgcactgccctagcagaggtcctccatgagagccccacccctgtagcaaacttctgcttgaacatccaggcgtttccatacatcctctgaaatctaggcagaggttcccaaacctcaattcttgacttctatgtacccacaggctcaacaccatatggaagctgcaaaggcttggggcttgcaccctctgaagccacggcccaagctgtaccttggcccctttcagccatggccagagctgctggggtgcagagcaccaagtccctgggctgcaaacagcaagggggtcctgggtccagggcatgaaatcattttttcctcctcagcctccaggcctatgatggaaagggctgccataaagacctctgacatgctgtgaagaaattttccccattgtcttggaacttaatattcagctcctcattacttatgcaaattcctgcagcaggcttgaattcctcttcagaaaatgggattttcttttctatcacgttgttaggctgcaaattttccaaacttttatgctctgcttccctcataaaactgaatgcctttaacagcacccaagtcacctctagaatgctttgctgcttagaaatgtcttccgccagataacctaaattatctctctcaagttcaaagttctgcaaatctctagggcaggggcaaaatgctgccagtctctttgctaaaacataagaagactcacctttgctccaattcccaacaagttcctcatttccatctgagatcacctcagcctggaccttattgttcatatcactatcagcagttttgtcaaagccattcaacaagtctctaggaagctccaaacatttccacattttcctgtcttcttctgagccctccaaactgttgcaacctctgcctgttacccagttccaaagtcgcctccatattttcaggtatcttttcaccaacaccctactctaccagtaccaatttattgtattagtccgttttcacgctgcttataaagacatacccaagactgggaagaaaaagaggcttaaagggcttacagttccacatgactggggaggcctcacaatcatggcagaaagcaaggaggagcaagtaacatcttgcatggatggggcaggcaaaaaaagagagcttgtgcggggaaattcctctttataaaaccatcagatcttgtgagacttattcactatcacgagaatagcatgagaaaaaggcctgccccatgattcaattatctcccactgagtccctcccatgacacatggtaattgtaggagttacaattaaagatgagacttgggtggcaacaaagccaaaccatatcacattataacatcatgaaatggccatttggaaagtagagttaaagcaagtttttcaaatttggatacatttcatcacacagtaacaactatcgcatttgctattattaccactgatctcatcagaaaatctgtaatgagaaggtgtgaagctcatggttagagaaacatattttccaaaattctcattttttgcttgaaaactcaaaattttaaagtggcaacaaacactatcagttattttatttcaaagacagcctcattcactaattttcaagaaaatgtctcccaaaatcccagtctgaaaacatagtttgtctgtcattctttcaatctaaaatgacattccatgaaaaaggggaggctggtgcaacttagaactcgaacaattgccaaagtgcttttccctgagagaaccatcatattttggtatagagcagaactttatgtttacttcccattacatgacacgaagtataaaaagacatactcaatgggtgagatttaataaaattaacttttactgcgtcatcaaggacattcttaagtgacattttaagaaaaaactgcaaatgctcagcgatgaaaaatacattgagtactagcaccgtttggttccctgccaagatttatgcttaggcatcagcaattttatctaccacagctttgacaccataaatgcaaatgtcatatactgaaaaaaagtaaataacatttgattgatatttttatgaaaacagtcttgacctcatggaatcatcaaaaagctctatggtctttgacaaccactacactggaacttacttattaaggaatttccaataatgttatactctctggtttttaatatttataccatggaatcttctctctgaaaaaatgtctaatataccaaatcaattcactcgatattatcaacagacctccaactaaagttttcaattcaatctccaaaaagtttgtatttttcaaatccagcctacagtaattcaagagtatttaattccctttactacaaatagaaacttcggaggaggaaagataagctggggcaggtcatgatgggccttgtttggactgttaggaatacaaatagaaactttactccttgagcaataaatagagaaacagctagcctatactaaaaatttagcataccttttacatataagtgcaataaataaaaatataagatacaaaaaggtttctcttaaaaccaatctctggagctcagaaaaaaaaaaaaaaaaaaaacatcaaggctagatgcagtggctcacacctgtaatcccagcactttgggaggctgagacaggtggatcacctgaggtctggagttcgagaccagcctggccaacatggtgaaacactgtctctactaaaactacaaaaattagccaggcatggtggcgggcgcctgtagtcccagctactcgggaggctgaggcaggaaattgcttgaatccgggaggaagagtttgcagtgagccaagattgcactgctgcactctagcctgggtgatagagtgagactccatctcaaacaacaacaacaacactctaagtaaaaaacagtaagtaaagagtcaccaccccaatatactcactttctgtttatgctgctgtaagaggttgtcaagattgtgtcgccttttatagttaaaatagaagtttttacattgagcttcacttttcgttcccaccattttagcaattgctgcccagttacgaccatgttctactagacctgcattttaaaaacagaccaaatgttaattgaacagtcacctgatcaagcaaacaagagaaataataaattaacttaatcactgtattcacaaccattgacactagaagtgtgctttcaattacttatcatatatactttgatacttataaaaatacttattgaaacaaaactcatttacagttctatatttttccccctcaaatttaaaacatgctcattaacagaagggctaaaccttgtccttcctatgtatctctcacagggctaggacaacattagacacattagtaatagctcaaatacttgcaaactaaatgattaggtacatctagatctctggacacaatatatcaagccaataagataatcatatataaatgataaacacaatttaaagacatatatatgactccacttataatccatatttgtcctcagtcaattcacaatcaagcaatgccatcagaaaaatactagccaatttaaaaaaatcctatggtaatacaatgcattacagaaacctatgcaatttaacacttctctaatcaatatatatatgcacacacataaacacacacatacgtgcaaagaatatgtatctatgcatttgtatacatatataaggggtgatacaaaaaaatatgaaatgtgtcactcaaatgtcaagctatttacaataatttatctttacaactgcaaggtaaatatttaaccaccaaaaattagctaatctttctcaatattaccaattatttatcctattagaaattttagttcaatttcaaattatagtacattaacaagcaacgacagaaaagcacaaagtccataaagtgccagagtaagaggaaggccacaaagctatgaaagtggcagagacaggactcaaaccttcgctggcctggttacaaacttcatgctctttcctctgaatcacagagcaatctgctagtggtttataattacatgacttaccaaatgcaaactgacaaaagtatttaccatcctatcctattaaatacaacttttaggtaatagaaatatagactttatatcaacattcattccagaacaatttcaatagcatagagtcataattattctaaaaaagtgaaaacgacctacttgttctttaattaaatgacattcaaaataaaactgcagagagaatcttaaatcccttaaaactgggcatcttaaacaaggcacactgggggtactttattgggtaccatactaccagaaaagaactcttaaagtcacttctgagtcctctttgcctttttgaaagaattttttttccaattaaaacaattagttccatctcactcattactaataaccctaaaaaacaaaacaaaaacctgagaaaccagaactactacaatttaccttttttagcaacttccatttcttcttctgtccatcgagaggtctccacaggctctgtagaaactaaaataaagagagaacccaatcaggcagagaaaaacaaagttaaatcctttattcaaaccaatcatataattatatctctttatctgacataaaagactatgtaaaagcatttggtgaaagaaactgcagaaataggatagtaacctctcctccaccaaactagaagaaacaagtcaacacttcaatattatgatctttttcagtgttgttaaaagttctcttcatgtctacatttttaaacattttgtttttttctggagaagtcctacctcacccagtagcttcccacttagtgatctccacctctcctctcctgcagtgtcaaaggaagaagcaaccctcctccttcctgtccaagcacaattccctctcctctcctctgagcctccatcttgtcctaaaactcctggagcccctttagttcatccccgagtgtctgacatccagtgggtaaagatggatcatgaactgaatatgttctcttttgcttcaggaaaaaaacaaaacaaaacaaaacaaaacctgagaacatcaggcctgatatgagctcctgccatattccctttctcaatttatagtaccagcattcacccagtcactcaagttaccaataggctccttagactgatagactaatttttgaatcttgcctcccatttaccactcacatccaatgacatgcatcaactctgaatccatcccctccttgcttgggccactgcatacatgctgggccctctgcctccagcctttattctgtctaaactgacctccacaattgctatcagttaacttccaaagacacaaatctaatcacagcattcctctatttaaaaacctctgcaagttccccacttcataatcaaagcaaaatacatttcaaacaaggcccatcatgacctgccccaacctatctttcctcctcctatctagttagtgcccctatctcattcttgccattccctaaactgcattttctttcatacttcagtaacaatgatacctctgaatcattaacagtggtactctatcattaatctagcctttttataaactaatgagacaatacttaatgagagagagaaagatgctttgactattagatccagtattcccttgcctaagaatttattccatgacaaataatttaacataaaatactatgtgaataaagatttttttattacagtgctatatacattggtttaaaagcagggaagagggcagacaacctaatcattcagcaataagagaatggttaaagaagtcatgcctcaatattacacagccattaaaaaataaaaatggtaattattagaaattagaaaatatttatggcacactagcataacaactaaataaaaaacagctatattggggtggcaagactgggtgatgttctttttcaaaaaactttgacattaaagtttaaaaaatttaaagaccacacttcaggattatttctaggttgtcaatattaaaagtcctttctaccctatcctagcagtgaaacagaatcccgaacaaaattatggcctgtttatgccaattgtttccactcactgggttctggtggcggtggcagaggtggtgggggctcttcagtagccgctgcggctgcagcactggcagctgcagcttcgtttgtcatggacctggtgatccggcccttacggcggccctgactgttggcagtctttcgcccccggggtgtggcttgctctctttcctcagtttcttctgctgtaccatctatcttgtccttttccttggtattttctctggacacaaaagcaaatgaaaacttgtgtgattccaaagtatacatacatcgaagaaggttttagttttgaatattatctaaatagaaattgaataaaactacctaatctctcactcaaaaaaaaaaaattatcaacaattctgccataccatagtttttaaaagttttgaccagctaaaattaagatattttataagacctattttacatactaatggacttaaaatttaaacacatttcaaaccaactgatttagaaaccagaactactccatgagaaagtaacaaatgacagcagaaaagccctagacctgcaatccagagacaacagcctacaccaaaaggcaggaattctggggttttatttgcctttagtctaggttgcctcatgtatgaaatgaagaagctaaaatagatgatcttcatgatagatgccttttctatagtaataatccacaatattgttttacagtaataatctacaatattgttttataaaatcagactcaatactctaaatcatgtctgatactaattatgtacaaattgggcagtaatggttaatacttaggaaacggcctctggagccaggctgcctgggtttgtaccacagttgtgatttactagccatgtgatgaccctggacaagctgcctcacccccatgggcctcagtttcctcatctgtacaatgagaaaaagtttatttcatgggactgttgccaggactgaaggagttaaataaagtacccagaacagtgcctggaacacagtcagcatcaagtaacagtttgctattattcaagctaaaactccctcaggatataaagtgcttaccatcgtctcaggcatgtagaaacatggtggttcctattaatagcaacagtactacatgtaatactggaagaccattttctgtactacttacctcccatggttgttatatttaaggaaacgtactcaatgtacatttttgcaaatgaatggatagatggcaatactcaaagactcaattattcttgcttaatggaagatgctgatttttttcaaaaataattctctccccttcagtcctaaattgaagtacaacatagtcctttccctttacttacttattcccttataaagctggcttctattctgaagcctcctgttaaaagatgttttctcaaaagtcaccaatgacttgcaaactgcaaaatcaaatgacctcttctcaattttccccgcaagtctttctgttacaactgacgctgcagttaattcttctttttatatcacttgaaactcagcttttgaaatatccctgctgctactctggctttccttcaagggacagacctttctcctctcatcctttcttttgggtttctgttttttgtctttgagaaagtgtctcactccgtcacccaggctgaagagcagtggcgcgaacacagctcactgcagcctcaatctcttgggctcaagtgagcctcccacctcagcttctcgagtagctgggactacagacacgtgccagcatacctggttaatttttgtattttttgcagagacagggtgtcaccatgttgcccagggtagtcatgaattcctgtgctaaagcaattctcccaccttggctgggattacaggaatgagccactgtgctgggttcctctcatccctttcatacggggatttcccaaggctctcccctagagccttagagctatgtaaggttacccattctcataagttctaccgggaggactccaatctctatctttggactcacaccccaactccaaagactcaggcttatcttcccaactacctgctggaacggccacctggattttccatcaatagaaactgaacatatccaaaatcatattcatcctcacctctgctccttgctccacgtcactctctaatcatttgttgttaacattcctaccatgttcatcatcattcaggtttacagatttgatatcatcctttgctgtctccctcttcccatacttcctacatgtgatctaatgccaagttttggttatttcatctcagaaatgcctctctcactaattttaccatctctatttctactaccactacacttactcaacaccttagtaccccaatcctggcctttcatactggcctccctgattcatatctctagtctattcattttatcttgccaatgaatcaacattctagcaggatagctttggcaataaaccactccatccattctaatccctttctaactattcccagacagacacacagcacagcctcctgaatgaagtctaccatttttggctttcattaaagctctacataatttaattccaatccaccttccacttctcttcttgatgcacactatgttaagtctaatgaaatcattatcttccactagctattcatgtgattccctctaccctacccacattaaccactagcatctgctaatgtcctccaaattatccacagagaagtagcctcgacctcttcttaatctgccaaagcacttaactggtcgtctgttgacttcttactgccaggcttttatttcttaaagtaatacttgtactttacctacttttcccctactaaatcatgaactacctgggaatagtatacatcttacgtattttcacattctccctaagacctagctcacatagataataaataaaagcttgttaaatagtttagaaattttaacaaaaaaataaaatcaagttatgacagagttccatgtgagaagaaccactggctacatggcccaaaaaatgtttaacccaaactaaaagaaaaaaatatattcccttagaggtatcttcctcaggtataaaattacaatgagaagaatatctgtctcttttaaaacatggcaagtgactagctactttagcttccacaaaactaggtaaatcttaaacagttccacaaggactatagatataacataataaatattaaaaaggaacaaactactgatacattcaacaacctaagtgaatctcaaaggcattcatgctaagtaaaagaagccatacatactgtatgatttcaatttttatgtaattctagagaaagcaaaaaagatacatgacggccagaggctggaaatgaggaaagagaaactgactgcaaaggagcatatgggaaccgtttggggtgatggaaacattctacatcacaattgtgataatagttacacaagtgcatatgcttgtcaaaacacatcaatgtacacatttcaaactggtgaattttgttccatgtaatttacaaagctagttcttggggaaaaaaacaaccaaaccaactgtcatgcccccactcctaccacacccctgtatgtccacaaaagcatcaacaataactccctgagtggcagaatcataggttaattttcactatatttttcttttcctgtttttctataatgtaattttataactaagaaaacagcagtaacaacaaacaaacccaaaactccattttatatgacgaagtcaataaagctggaatctaaaatataaaaatgaactcttcctgtcttagcatttttatactaatatatactacctgaggctcaaaaacagaacctgaggaatcttccaaatcaaaaattaaattacattcaatatatcctggaggaaagtatatattactataacccatcccttctgaaaagtaataataactcatgacttgcaaataagttcattaagtcaaaaattacatttactgtaatattctattccttaatcacatcaacttaatcatgtaactattagatgtttctaaaatttcggccaggcgtggtggctcacgcctgtaatcccaacactttgggaggctgaggcagctggaccacctgaggtcaggagttcaagatcagcctgggcaacatggtgaaaccccatctctactaaaaacacaaaattagccgggcgtggtgacgcgtgcctgtaatcctacctacttgggaggccgaggcacaagaatcacttgaacttgggaggcagaggttgcagtgagccaagattgcgccactgcactccagcctgggcaacagactgaggctctgtctcgaaaataaataaataaaataaaatttcagcagattaaatttcattatttaaaaattactaggctgggcgcagtggctcacgtctataatcccagcactttgggaggccaaggcagatggatcacgaggtcaggagatggagaccatcctggctaacagtgaaaccccatctctactaaaaatacaaaaaattagctgggcatggtggcagatgcctgtaggcccagctactcgggaggctgaggcaggagaatggcgtgaacctgggaagtggagcttgcagtgagccgagatcatgccactgcactccagcctgggcaacagagcgagacgccatcacaaaaaaaaaaaaaaaaaaaaactatacttttgcagcaacatggatcaaactaacggctatcatcttaagtgaaataactcagaaacagaaggtcaactatcacatgttctcacttataagtgggagctaaataatgtggacacatggatatagagagtggaataagagacactagagattcaaacaggtgagagggtgcgagggggtgggtgaggtataatgggtataatgtacactatttgggcgatggtacactaaaagcacagacttcactactatgcaatatatccatgtgacaactgtactccctatatctacaaaaataaaaataaaataaaaataaacatttaacttattatataactaattatttaactcacttggagtcttctttttcatctttttcctcttcatctttcttttcttcttcttttttttctgttttttctgctttatcctcttctttttcttctactttttcttcttgcgagggtcgagcaatttgctgctagaatgaaccatcatttgtaaaattcaaaggcaaacagaaatagctccttatagtgtgataaattatgtctatctaaaaaaattttaaatgattgttagtcatttacaatgtaactggtgatcgtgtgttaaaaaccagtctagaggtttttaatgtattctatatgtactgcttgaagggtcctacacgcagacacaaatgctcatagcatttggacccacgagaaagtgaaaatgttaagattctactcggaaatctggggttggttcccttttttggcaacctccacatttaatctgtcactcaagcattccaattctaccttaaaatttgataacccatacataatttatcatgttttagatacttaatatgtttccaattttttcatcactatctataatgctataagaaacatcttcatgcatttatacttttgagcgaaagtctacttaatggaatatgtaaacagctatggtcgttactaagactgaagtaatttggaaaaatactaaagctataataaggtgaaaagaagtaaaatgcttaaatatttctaagctaagcagtcacactaggaatccttttatctctgatgtctcatttgcaaaacctgtgactctaaaagaaaaaagtgaaactaagtgtgcaatgaatgctactacagtagcccccaccatatcaggagtttctctttctgtggtttcagttacctggagtcaactgcagtatgaaaatgggtaagtgtagtagcgtacagtatgatatttgaaaaaagaccacactcatgtaacttctattacagtatattgctataactctattttattatttgttactgttaattccttactgtgcctaatatacaaatcaaagtttatcataggtgtgtgtgtgtatatgtatatatctgtatgtatatatacatgtatgtatatatctgtatgtatatatacatgtatgtatatatctgtatgtatatatacatgtatgtatatatctgtatgtatatatacatgtatgcatatatgtatgtatatatgtgtgtgtatatatgtatgtatatatacgtgtatatatgtatgtatgtatatatacatgtatgtatatatgtatgtatatatacatgtatgtatatatgtatgtatatatacatgtatgtatatatgtatgtatatatacatgtgtatatgtgtatgtatatatacatgtgtatatgtgtatgtatatatgtgtatatgtatatatacgtgtatgtgtatatatacacgtgtgtatatgtgcatgtatatacatatgtgtatatacacacgtgtatatatctgcatgtatatatacacatgtgtatatatgtatgtatatatacatatgtgtatatatgtatgtatacatacatatgtgtatgtgtatatatacatatatgtatatatgtgtatgtgtatatatacatatatgtatatatgtgtatgtgtatatatacatatatgtatatatgtgtgtgtatatatacatatatgtgtatatatgtgtggagatatatatatatatctctcatagtatattagggttcggtactatctgtggtttcaagcatccactgggagtgttggaacatatcccctgtgaataagggggaactgctttattttgcttttaagagacaacatctcactctgtcacccaggctacagtacagtggcatgatcatagcttactgcagcctcaaactcccaggctcatgcaatcctcccacctcagtctctcaggtagctggggctacaggtctcaaactcctgacctcaagtgattctcccacctcagtctcccgaatgctgggattacatgcacgagccattgtgactggcctgcatttttatttaattcagaaatcaaaactgtataaccaaattaaaacagaactccaacacatctttccagcacagcaggctggcccttgcacacctccctccaatcaccatcctgccacatcatcttcgctgttctggactcacctaaacatgcccagcacttgcatagctttctacccttccctttcctgataaagtcccacatagtctctacaattcaggtcaaaatgctacatctcctgtgaagcctctcttgatttccacagaggaactctggggccatgtccttccctctccaccacagaccacacctgcttgtagcactgtcactaggtggcttagtgcctgcttatcagcatccatctggctctctgtgttatcatctcatcaagaacaagaatccaatcttacttctctaagcatccccagctcccaggagagtgtctggaccatgatgataggtgtatgcatatgttggataaaacaaaaatcaaattcctttattccagttatctgaaaagtttttaccctccaatctcgactgttcattctgatccaggctaatgtcaatcttgcctcatagcaactctacctgtcctcttacttgtttttaccagacaatatggaagtaactaattaattttaagaaaaatttcccttcttaatagcgctccaaagtcttttacctattcatcaaaaccaacacttagctttttccttaagataatgaaggccttattcacctccccaaaagaagtcccatccacattatgcctccttctaatccaaggggcaaggaaagaagaaaatgaatccttcttggtccacttccagaacattgctgaactgtgatattttaaaaataattcctttttcacgtttcataaaatctccctagatcaacattctcttttggtgttatggaatgacttcttaaatattccctagaacatataagtgattgcatcacatggctcattatgccttgacattatttttcagatttcaaaatgcatgtcaatggcttttctaacactcgccactcaatcaacataacatctcacagttaaaatacttttaggtcatggccattaaactccccacatgcaaaatcacaattgcctcctcattagcagtgggcactgctttgcctcctagatcctaaaatcagaaagtcttctctccaactacaaccacccatcgcacaccttcattgtgtctgatcctgctttgtcctcattgtgacctttgaacccttattctatcaaattttcacagtccagtgagaactgtacctactattctacttgctaaagcatttcaataccatgattccttcacttgctttatctgaccttcctaacttctcaccctggctaactgccagttcctctttcttctggatatttattgctagagaaaactgataaactagggagattttaaaatttaaactttcaaaccatgagtaggtctgctttataattgggcaagttttactcagctctgactccctgggacactacagtggtcacaagacctgtttaaatgctaataacctaaccctgtaaccaatgtagcatccatgtgtcactctgaaccagtaagatggcatagtaaggacaaatcatgccctttgcctagcaagtgagctgtgtaacccagaaaacggtttatggcctaaagatacgacggggacatgtcaactcagcagaacgtaaggaaagaaattcagtatccccttagagttgggtaacacatgctaatcttatttccccaatacttttctgcttctaatgccaatcagagcttcaaagtaatcccacgcattccctgctgtctaaaatccaaccaacagataacttcactcccctttccctggtgctagggaataagaaacaactgcagcacctgcttaaaccaatcagtgtaaagaaggaaacagctcctggctctgcatagtgtggaaatgatccaaagaaatggacagagttgctgcattagagtctagagaagtgtttggtacctgtccagcagaacctctcacccctctgtatactgaccaggcagtggtgagcggagaggaagtgcagtcagcagcaactggaggacctcacctttgtgcaatatgcataaagacctatcataacaactgccactgacattcaagagagtaaggaattacctctaatttaaacaagagatgcttggaactacttttgtttcaggcaaatctgtaaagagaagtgccagtcaatccacatggtctaggatgaaggttacaagttacatccctcaactccacagggtggctggagcaaaagaggtccaccccttcaaaagaaacccttctaaaagttccctacacagacacaaatattcgcaatggctcgttgtccaggtttttccttttctccccttctttaaactcaatacttgagagccaataaaacaagtttaattctgtcagggagttaatataacatgaaacatttctgtcaaataacaagctattcactatgaatgaatattctagaacacatataaaacaaaatgaaaattcaaagaaaaaagtaaaagttaagtgtatttctttttatttttatttttattttcattgtgagacagggtcttactatgtcacccaggctggagtacagcggcgcaatcttggctcactgcaacctatgcctcccaggctcaagcgatcctcccacctcagcctcctgagtagcttggactaccagcacacatcaccacacctggctaattttttttttgtattttttgtagagatgaggtttcaccatgttgcccaggctggtctcaaattcctaggctcaagtgatttgcccacctcagcctcccaaagtgctgggactttaggcataagccaccgcacctggaattttttttttttttttttaagactggatctccttctgtcgcccaggctggagtgcagtggcgtgatcacggatcactacagcctcaactcccaggctcaagcgatgctcccacctcagcctcctgaatagctgggattacactacagtgcacgccactgtgccaggctaattttttaatttttttgtagaaaatcaaatttttcagttttttaactttttgtataaatttttaaagtttttgtccaggctggtctcaaacctcccaggctcaagcaatcctcctccctcagcctcccaaagtgctgggattactagtgtaagccacaatgcttgacctggtaagtgtatttcaacataatttaagaacaggattcagtttcatatgggtcccctttggcaagatcaaataatagtttatgctaagattcattactactatatataaatgaatatctaactatatatatgtgctaattatatttgttttaaatgttcaccttttttagaaaagagaaacagacaagttcccactcaacagaaaataagttgccaaaaaacgaaattactaaatttaataacaagcagcaattgtaaataaaaatttacacgaggaagaaaatgaaataccgtttcactactggacaatattttctttaaaaatatacttcgggaaataaacagacaatatcttaagcctatcttatcaaaatttattaacaattagtgctcctaagccaactgaatttcagactaacttcctgaagagtgaaagctgtcaatcaccaaaaaacacactgtggcaatggcaataaagataacagtggctaccatttattgggcactctctgtgcctgactctgcactccagggactttacacacatacccagttcttattaaccatgcaacctaagtatcactgaccccactctcatgaatgtggaaaccaaggctcaccaagtgaaaggacccacctagagtcacataggtacaattgggcagagcactctggggctagagttcttgctgatataataaacttcttaacttgtctaaaataatctttctatctagtgactagctaacagtttagtcagaaaattcctccaatttcaaaattgctatatttacctaagtatatgcttctgaatacctttagggaataaaaacacactggcataaaggggaaaatggtgttagcataaaagaagggcatgaattcctgtggaaagtaatcaagcatttggaaatgaagaatatggtttctaacatgacttgctttactgcaggtaactagcaagtaccacagtaattctacctgcacagtgacagacttaccagatggcagtttatgttggaaaaatgcagcatttactaggggaagaaactcttactgctagcaagaacaatgtacatagaatcaaactattacgtagggcataatcctagatcctaaataataacattcaacagtggtttttggcttccaatctccaatatgtattcattacttcaacaaaaacatatagagaaccacactcactctccatggaatggtaacaagctgaactataaaaatgggttggggtagtctctatcagaatttggagagaagagttaaaattcctgccaagaataacctctgaacacaattttaacaaaaatataaacatctgtctcattttcctatgagtctaagattaaaactcattttcagagtaaacactactaagcttccctatagcaacaggttttaaaaaatcaaactttgcaaacttagaatctatcaatagcaaactacacttttttttttttttttttcctgagatggagtcttgctctgggattctaggcatgagccaccacgtccagtctggcttttcttgctttccttccttcctttccctccttccttccctccctcccttccttcttcttcttcttttttccctccctcccttccttccttttctctttctctcttctttcttttttttccagacggggtcttgctctgtcacccaggtgggagtgcagtggcatgatctaggctcgctgcaacctctgcttcccaggttcaagcgatttttctacctcagcctccagaatagctgagattataggtgtgcaccaccactccaggctaatttttgcattttcaatagagacagggtttcagcatgttgcccaggctggtctcgaattcctgacctcaagtgatccacccgccctggactcccaaagtgttgagatcacaagcgtgagccatcgcacccagccacacactatacatttatctgctgaataaaaattacttcctacaaaaaggaggctgggagtagaggatagggagagtaatcaaactcatattgacaggatcaagcataaacttcagcagaactttaaagaatctttaagtaaacatgccataatggctgtgagatcacctgagctaaaccctcctgactagagcttggttacatagcagagaagtaaagtgattttcaaattagttggatctctgtatccaccagggtaaaatcaagggagttgatacatagattttgaaaatcttaaccttgcaattcaattctgtttttaaaaagaagtattctaaccttttttctatatagcaaattctatatctttaacccagatctttttcctacactccagacttatatgtctaactatccactttacttggacctcatttggatctctgcttagacacctaataggtatttcatattcagccatgtcctgattttcccctcaaaacctgctcctccttcagtcatgcctgtcacagcaaatggcaactccacaggtcaaaacttgttttccttgattattgtcctttcctcatccccacaatcaatccatcagcaaaatctcgtggttttaccttcaaaagtacatccagaaactaatccgttctccccgcctcctcactgtagcctagtccaagtcaatgggattattaaaacaacctcctaactggtttctctgcttcttctcttgtctccttacaaactattctcaacagagcaaccagagtaatcatgtcacaactgaaatctggcagccctcttttgctcaaaaccccagtggcttcttctctcacctggtatcagctcaaaaggccttcagttttacacagagagcccttaaactaacaccacctaatttctgaaaagctgcccctctattttgacacaaataaatggaataagtatacaaacaattaagaaacaatggtaaatctggtggcatgagatgatggtctaaattcatttaactcacacctctcccaaattccccgtgaaacaaccagagaaatgtaaaattggaggaaaaatcttcaaagcaataacttaaaagctaatgagggcagagctagcctaccagaagtgctgaccaacccaaaactgagcctacctgggggtaagcaacctaaggctcaggtcaaggtgagggtatacatggcaattctcacatctgcaaatacattctgagacaggtactttgaaacatgcaacaagaatgtacagaagagaacaccaacatggctggatcttaacaaggatcggtgtgccacagagaggagtgaaactgtgtcccagacaactttaggaaagaaacgactgtttcagaataacaaacatccgtgccccatagaacttcctgctagagctctctcctctatcatcatgggcaactggctgctaatctggcaaaggttaaggtacactgtataagtatcaccttatctcttacgttaatgtaggactgaacattttaaacagtaacatatataatttctaaagataaagttataaatactatttggcaattaggaacaaaactgttagaaatttgcagctgaggccgggcgccgtggctcatgcctgtaatcccagcactttgggaggccgaggcgggcagatcacgaggtcaggagatcgagaccatcctgactaacacggtgaaaccccgtctctactaaatatacaaaaaatgaaccagatgtggtggcgggtgccggtagtcccagctactcaggaggctggggcagcagaatggcatgaacccgggaggtggagcttgcagtgagccaagatcgcaccactgcactccagcctgggcgacagagcgagactccatctcaaaaaaaaaaaaaaaaaaaaaaaactgtagctgaaacttgtttaaaacatagatggtccctatgatctctagctaaaagggtattacaggaccttgattccacattctttaggggaagcaggaagaaaagccctggcaatattcttctctctggtggaatagtgcttcctatttcactgtcaacactcaatttattccttttctgtcagtacatctttatgaagcttggcaagcacccatcctttgtcttacggtactgcacccatcagtgtacaagtatgccctttatcctcccttctctgatcctcattagccctaccgacccatttcactattccactttataaaaaaattttaaaaacaaggttgcacttgtactaatgccacttcctcaccttctgtatcttcttcaactctgtgtaaccgtgtttctgccccctcactaattcactgaaaatccacgtctaaggcaccttggcttactcaacctctaacagcattttacacagttgactcatgaaacactcgctatacttttttaaacaagaaatactgtttccaaagagcatgtaatcacatcatgtggggtggtggtgttctgtgggaaataatgacccagaaaacataaaaaggttatagctgtgaatactgagagaactgggtcaataacctatatctggtaaccaggggctatcaaacgaagaaagggagtaagaccccaccccaacaaaagggtggctgagtgggaaaaccagaagagatttaataatgctaatgaatcgttgcagtgtcggagctcatgcatgcaagtccttattgtaatatctatccgggtgtagacagcaaaagcctccatattaactgtggtggtggcagtagcgcagcagtctctctggtaagcacctgtgagctatggcagctgctgatcagttatttggggaaaatcattttgaaattactgaattgcaactgtgaaaactaacctttttcagttttatacttctggaaaactacctttagtaaaagtgccttttttattttttggagacagaggtcttgctctgtcactcaggctggagtgcaatggcacaatcatggctcactgcagcctcgactttccaggctcaagccatcctcccacctcagcctcccatgtatctaggactacaggcatgcaccatcatgcccggctaattttttctattattttgtaaagacaggatgggtctcgctatgttgcctaggctggtcttgaactcctgggctcaggcgatgctctggccccagcctcccaaagtacggggattacaggtgtgagccactacacccagacagaaaaagtgctttttagaaattaaattatctaggctgggcgcggtggctcatgcctgtaatcccagcaccttgggaggccaaggcaggtggatcatggaagtcaggagattgagaccatcctggccaacatggtgaaaccccatctctactaaaaatacaaaaacttagccgggcgtggtggcaggcgcctgtagtcccagctactcaggaggctgaggcaggagaatcgattgaacccaggaggcggaggttgcagtgagccaagatagcaccactgcactccagcctgggcgacagagcgagactctgtttcaaaaaaaaaaaaaaaaaaaaaagaaagaaagaaattaaactatctgaactccacaaatgaagttaatatgaaacaaaatcaggttccaggtttttgtaaagaatctctaatcaaggtaccatgttgtatttctctcccttactctacctgacccctcctcagataaacagactggctaaagatagtgtattaaaagtattaatggcttcatatttaattacatgattattgctgacactgaaatgcatgactcagatgacagaatggtataaaacttttctaattaattttatcatagtagaaacttaaaatatatttgaaatacaagatttaatacattaaatatataaatataacttcaaaataattataacatcctcactaatttaacagaaacatcaatgtttaaactacacactaagggcaggacttctgttttaacactttttgcttgcctatttcccccaatcctgaaatatcttccatacaagtaagaaaacacacctggtttctgcctctgcgtttcccataattccttctgacgagggctttataattctcatttttcttggttaaatagtaatacaaaacacaatcaggaacactctgtaagaaataaaacaattatttttgaggatccaatgaaataaagaaattttttaattaaatattacttccaaggaaaatctctggtattctgaaagtaaaattaaagaaaaagaacaacatacattgctagcattttaaggcatatctaggctctaaaattatttacattataggtactattttaatagacagttacagttgttaatccaaattatgtgaaagatgccaggaactatcagaaacattcaaatattttcttattaacaagtaaattccctttctgattacatacatgcaaatttttaaaatgtctttaaatattttgttcaaaaacattaaaatcaactttatattaaatatggaatgattcacaaatttgcttgtcatccttgcgcagaggccatgctaatctctgcatcgttccaattttagtattatgtgctgctgaagcgagcacgagactgatattttaattagaaatttaatgaggctccaaaagcattgtaatctatgtgttttagggaaataaacatcaggtcatctttcattaaccatttagttctgtgttctgtgttacgatttctctaataattgtaattatcattacattaatcacatgagactcttcgcagtctttttaaaatcggttctagttaactacttatatgtgtcagagcacaagaatttcaaagtaacaaccatcacaaacctacaaacactcccaatgcaaaccatgtcttaccttcctctccaagtatgatgcaattagtccaaagttttttggatgctggataaacctgagtgaaaacgaaaacaaaaacacacttgcgtacaaatatttcaacaactaaaaaaaaaaaaacttgggaaaagaaagactatgtataggctgggcgtggtggctcatgcctgtaatcccagcactttgggaggccgaagaaggtggatcacttgaggtcaggagttcaagaccagcctgaccaatatggcagaaccccatctctactaaaaatacaaaaattagctggggatggtggcacatgcctgcagtcccacctactcaggaagctgaggcaggagaatcgcttgaacccaggaggcagaggttgcagtgagccgagatcacaacactggactccagcttaagcgacagagcgagactccgtctcaaaaaaaacagaagagaaatactatgtatagggctttctaactgccaatctgaggaacaattgtagaatcactggagacttttaaagggcacagatttctgggcaccatacaccaggaaatgattagtctacggtaatacatagaaatctgtactttataaaagctccccaaaagttcagccagcacccaagtttgggaaccactcttaacatgactccataaccccagttcttatctgttacctcttttcccacctataaacttacaggaagatcaatattctctacttttcacagtattgattcaaacaccaaaatgggaccaagtttttgtgaaaacagttcaatttacaagtaaatgccaaatactttttactaacttatgtagatgtctattagagaataatttaaaatataaattacttgtccttaaagatctccttttcatggtcagtccaaacattcataaactgcctatctttatacactttcatagggtcctccataagcccattcatgttaatgaacttgactcgtctttgttctgcatcaaacatcataggtggaatcacagagagctgccgcatttgtttctcattattctggaaaaaaaatacaatttacttagaataaaacataaactagaaatttaaggagggccatggaccaatgctcttaatgtgcactaaaaaaccatgtatgcagtttaataacaatagcagtgtataccacagcatctaacatacaataattactcatatatctaataaatattcactgtatgaattacagaggcagagaatatccatatcgttttttaaataatctactcctttgagaagaattcttttcttaaactaagctgatacttaacataataaaattttagacctggaagataaaaagtaatgtcaagttcactgaagtggtgaccttatggagcatttaattatcatattagtctcattttttaaagtctcaacatcattttatagaacaacttttaccgtcatattacagaacaataaatagaaaaataagcaaacaggcatcaaaatttaagtcagcgattttaaattaaactcactttactattaaacgcttcttgctaattttacatcatctttccattgaaaatttaaggttgttattcttagaaatgaagcttgtttcaactaaaactttgttacacgtgcagaacttatttttcccaaagtttaactgaggaaatttttaagtacaaacttctatttaaaagcttttacccaaattacaagtatttacccaaatataagaaaaggtatttccctaaaaattttcctcataaaagtggatactgcctaatagtcaagtccttacaaagtctctaatttcctgggacactctcaatcagtttgaacactatagtgtttagactgaaattacacattagattgaaattacctcaatacataaactaattttagatgcttacaaatgtttcctcatggaatcagtcaaagagcaaataaagaaatttaacagagatttactcatcattgtagaaataatggctacatattccaagggctgaatgtcatttcaatcatgtacttacagatgtttcctcatggaatcagtcaaagagcaaataaatttaacagagatttactcgtcattgtagaaataatggctacatattccaagggctgaatgtcatttcaatcatgtactttagaggtaattttaaaagcaatatagagtaagtggttatgttttaaagctcttgattatactgctacaaaagaaatgaaaaattgctgggcacagtggctcacgcttgtaatcccagcacttttggaggccaaggcagaaggactgcttgagcccaggagtccaagtctaatctgggcagtatagtgagaccccatctctacaaaataatttttttaaattagctaagtgagaggctgggtggggtggctcacacctgtaatcccagcactttgggaggccaaggcaggtggatcacctgaggtcaggagtttgagaccagcttggccaacatggcaaaaccctgtttctactaaatatacaaaaattagctgggtgtgctggcatgtgcctgtagtccctgctactcgggaggctgagggagtagaatcgcttgaacctgggacgcggaggttgcagtgagccaagatcgtgccactgcattccagtctggctgacagagcgagacgccatctcaaacaaacaaacaaacaaacaaacaaaaagttagccgggcgtagtggtgtaccagtagtcccagctattcaggagactgaggtgggaggatcacttgagcccgggaggtgaaggatgcagcaagccaaggtcacaccattgcactccagcctgggtgacagagtaagaccctatctcctatctcaaaaaaaaaaaaaaggaaaattcacttgtcctgatattatgcaatagtatgtgcaatatgtatttagggcttgagataaaatttagcaatgataacatcataaatgtattccaaaagaagtacatctccgggaatctgggcacagtgaagctggtatgctctggaacactgataactcaaaggtgtctctagaaatggctaagatcctgaaatcatataacaatgcactgaaaagcttgagtgtgggatatacctctgactaaatattgtaattgtccctaaagagttatgtatttcaatgcaccaaaaatcaccttggaatcctctctttgggaaaggagaatatcagaaataagaaaggaaagaaaaaccacctgtagaagtctattttgatcagtataagaacaatctgagaagtaaaatggtttaaggaactctgagatatagtttatatagttctatacctcctccagggctagtttaactagaattctgaaacacagtaacttataagagcatactatatacttttataagagcatactatatacttttatttagttatgaatgcaaaacagggtatcataattaaatactgatagaatcctacaacatatatcaacacaaagacaaactctgtacaaagaggctattttttcatcctggagaaaaacttactgcaactgtctcacaagtaatttttcatgagatcaagcaacttgatggtttaatttaccattgtattcccaatgcttaaaggaaagtttggcacataataggctataaatatttgttgaaagaatagacttgattgaatatagatatggaaaagaacacacagttccagagtcagactgcctgggttgagtatctggctccactatttattaatttgtaaccttgggtgaattatttaacctgcagctgggctttagtttcttaacttgcaaaacagccattaattatagcctccatttcacagaattttcacagtttaaataatacatatgaggtgcttatcacaattggcaattttaagtagtaactacccctcaaactccccctcctcaaaaaccaaagatgtagttagtccaccataacctaaaccaacaatacccatagaaaaaggagaaaaagtactggctaggttaactagtagtaaagggtagagcagaggaagtcataacactgctttttacttctaaatgtgctaagtagtatgaaaacaggaattttacttatctaaattatttctaaatcattgaacattttagattaaatccacttcacctaattttgcaaatcgagtattaactgtatatttaagtctacttaacatttattttgaagtatacagcatggtaaaaaatatctttgatcattacttaaggccactatttcaaataaacaagactctcagaattttgagatgaggtttaagaaaaggcatataataaaatcaaaactagcaaaactcagtcaatactagatggcttttggaacaatcttgagagtttgaacagggctaaaaagattcaatgttagaaatggaaatttattcttattctgcatttatttattaatatccaattaaacactaggcaacaggaactcaaagatagcctgacccaaaggtttaaaataaccgcactcatgaagatgacactttagctgatcataaatatttattaaacagaaagagaagcacaatagaaataaatgtaaactgagactagacattgagttctgttttgggaaagtgagtgaggaagcttcacaagggaggaaatactgcttttgggtctgaagatatatttgtcaaacatataccttggtctctactacctgtttcataattttattaattctgctctttatacaggcaggaaatgcctgaaaaacaaagtaatgccacttgctacaacacagtatcttcaccttaaaaattagtgaaatggcgttcttgttcatagatgaatctcctccatatataaacttaatctctatattctcattcacctgcccctttcacttcatgttaccatacttacctgggactatatcacctgcagacagatgactctgatatctaaccatccccagttcaactctctcccaggttcacttgctagacaacaccctttgaagaacatactgccatttgtaaaatacatgctcctttgctactttaggaaacggcaccaccagcttactcctctaacctagaaacaagggagtcacattctattcttcctctttctcatctcccacatcccatccatcttggcctgtccattctacctttctattacactcgcctatacatccctaccactgttgccctgattcagaaccttatttttatcctaacagcctcctcacctctctccaggtctccttgctgccaaagccatctttgtaaaattccagtatgatcgtgtgactgcctcgtttaaaaaccctttaacagacactcaaatctttgacagtctaaactctagcactcaattaagttcccacatttacatacaaaaaaacccttagctcctacagagttaaaatgctttaataattaacgaattaacttgaattaaatttattttcttacctcctgctcagagagcccatcaataatttcagaaatctcatgctcactcctagcaatggtggctgaaagaccagctcccctctgcccaactctaaacatgagggagaaattaaaaatatatttaaagaccttatataaagacatatcaattaaattaactatagattacttttctgaatggaactttttaaccaagttaagagaagaaacataaaatactattgagtatatacttttaagtaatatgctgtgtcacctattaataacaatttaaatgttacgattgagatttgaaggttacatgttcatgttcaaatggtggaactagttagggaaaacttctagaaagtcataattattgatgccaattccatttcaaatggcattctttgtatgccctgtagtagacttagaaaaatacatgaaacatttttaaaaggagagaaaaaactcaaccaacatcccttacaaaaatttaattgtgagttaaggggcttacatgactcttacatgagacaataaaaaagaaaattaaagcttttaaaatctttgtaaaatatctgtttgctaaaagtaaaacaaatcagaatctatcaaagaatttcttaattggccatcagctgaatatagtttgaatatgttggtaacgaaggactaaaggatatttaggtctgttcttactcactgtcatgtccaaaggatgtaatacttttaggaacttcagaattaatttcaaaataatcacttacatttagattcaacaggataatataaaaattaaatttactaagacataatgtttactggttgataataaagttttcttttcaacataaaagttcttttaacttttaagttagtgggtacatgtgcaagtttgttatataggtaaacctgtgtcatggggatttgtcgtacagattatttcatcactctgctattaaacctagtacccactagctatttttcctgaaccctctccctccttccatcctccaccctccaccttctaataggccccagtatgtgttgttccccctatgtgtccacaacataaaaattctttataaactttcttcatgatcagtttcaagaaacaatagctctccctctccctctctctcctctccctctccgcttctcccgctttccacgatctccctctccctctcctcccgctttccacggtctcccctctacctctctccttctcccgctttccacggtctccctctgttgccgaagctggactgtaccaccatgatctcctccctctccccttctcccgctttccacggtctcccctctccctctccctctctccttctcccgctttccaccgtctccctctgttgcggaagctggactgtactgccatgatctccgcttgctgcaacctccctgcctgattctcctgcctcgtgcctgggattgcaggtgcacgccaccacgcctgactggtttttgtattttttggtggagacggggtttcgccgtgttggacgggctggtctccagctcctgaccgcgagtgatctgcccaccttggcctcccaaagtgccaggattgcagacggagtctcgctcactcagtgctcaatgttgcccaggctgcagtgcagtggcgtgatctaggcttgctacaacctccacctcccagccgcctgccttggcctcccaaagtgccgagattgcagcctctgcccggccaccaccccatctgggaagtgaggagcgtctctgcctggacgcccatcgtctgggatgtggggagtgcctctgcctggccgcccagtctgggaagtgaggagcgtctctgcccggccgcccatcgtctgggatgtggggagtgcctcggccccaccgccccgtctgggatgtgaggagcgcctctgcccggccacgaccccgtctgggaactgaggagcgtctctgccccgccgccaccctgtctgggaggtgatgagcgtctctgcccggctgcccagtctgagacgtgaggagcccctctgcccggcagccgccccgtctgggaagtgaggagcgtctccgccccttccgggaggtggggggcagcccccgcccagccagccgcccagtccgggaggtggggggcagcccctgcccagtcagccgccccatccggggggtggggcgcctccacctggccgctgccccgtctgggaggtgtgcccaacagctcattgagagccggccaggatgacgatggcggttttgtcgactagagagggggggaaatgtggcgagagtagagggagatcagattgttactgtgtccgtgtggagggaggtggacatgggagactccattttgttctgtactaagaaaaattcttctgccttgggatgctgttaatctataaccttacccccaaccccgtgctctctgaaacatgtgctgggtccattaagggttaaatggattaagggcagtgcaagatgtgctttcttaaacagatgcttgaaggcagcatgctcgttaagagtcatcaccactccctaatctcaagtacccagggacacaaacactgcagaaggccgcagggtcctctgcctaggaaaaccagagacctttgttcacatgtttatctgctgaccttccctccactattgtcctatgaccctgccaaatccccctctccgagaaacacccaagaatgatcaatacatactaaaaaaatttttaaaaaaaagaaacaataaatatttgaagaaaaatatcacagtcattaaacatcaaactactcaccgctgaaatctttcttgctgttctctttgttttcgaatttctggaaactgcttttcatagtattcccttgttttgctttctttagctttcctccgaggattattttctattctgtccacttttttctcccatgcctccatgagctgatcataacgctggcagattttttgttcctattaaatatccgtagcaaattaataataattaaactaaactctgattctgacaaacctaatactttaaaataaatgctacttcttaaggttaagtcagaagtacatttggcttatgactcaactgtgaacgaaaagcacaaagaggagagaggaaaggtagctctgtttcctactaagatcaacacatagagcacaggttggctggattttttagttaacattaagactatgcatatttataaactacttgacacctactactagtagtagctgaccagttacttttattttgcttaaaacattatgtcattgttgtcccaaaaaaatggaaaattaaaaatacaaacatgtaaatagttcataatctgaccaattacccaaaggcaaccatatgaacattttgttgttatccttccaatctgcgaaacaaaacacacacgctttaaccgatctattattggaggttctggttgattgccattttttgctataataaataatgctatataacaaacattttgacagtatgaaaaaggcagaaaatggttggttgtgctttatcataaaaagaaatccaggctgggcgcagtgactcacacttgtaatcccagcactttgggaggccaaggcaggtggatcacaaggtcaggagtttgagaccagcctggccaatatggtgaaaccccgtctctattaaaaatacaaaaattagccaggcgtggtggtgggcacctgtagtcccagctacttgggaggctgaggcgggagaatcgcttgaacccaggaggtggaggttgcagtgagccgagatcgcaccactgcactccaacctgggcaacagacaaaaacaaaacaaaacaaaaaacagaaatccagtgaactacgtgaaattgagaattaatgcttttagagaagtaagtgaattatgataccattttctaaatagagaagaaaagacagacgaaccctccattatggacaaagaactgtcaacatatctgatgacacatggacagaggaaagtgaggaagggttcatgaaaaactgctaacatggtcatcttaagaaagtggcattggagaacagaatattatctttctcacattccacaccacaccccactcccacttctcaattactcctatatgtcttctgtgtccttcatcttttctcctttctactgctacccttataatccaggccaacaccatccctcacctagatcaaaacaatagctcccatgcattcttaatgttgtagctaaatgcaaattcttttttttttggaaccaagtttcactcttgttgcccaggctggagtgcagtggcgcgatctcgctcactgcaacctccgcctcccgggttcaagttattctcctgcctcagcctcctgagtagctgagtttacaagcatgcgccaccacgcctggctaattttgtatttttagcagagacggagtttctccatgttggtcaggcgggtctcaaactcccgacctcaagtgatctgccctccttggccttccaaagtgctgggattacaggcgtgagccattgcacctgccccgctaaatgcaaactcttaaaatgcaaacccaaacattatgcaacctccaggacagtatacaacctggctctggcttccctcagcagcctcatttctcaccacactgccagctcagtctacactccctctggctcccagaccttcacttaagccactccctctgcgtatacaagtttgcagagaattggttttcccctgaaatgtcccctcataattcctatctgccttaggtgtcctcctcagtcatccgtagtccatgaccacggtgtgatccaatactaggactgacctgtctgacttccatcaccttaggctccccctaattactaaaaccatatggctatcttgctcacctttgcagaataatatatgggacagagtacacagccaagtgatatttaagcaaatcggtgaaaatacaaaccttacagtgtttgcatcaccagtgaacttatttagtgagtaccagaattacaacaaaattacttggaaaggaaaaaaaaatacatgagctaatttcttacttgatatttatatgttcttggcaaaaaaaaaaaaaaaaaaaaaaaaaaacaactcaagaccagtaatttaagacagtatctgatcagactggcaaattagaacattagacgttttccaccaaataaagctgctgactcttgagctttacaactcaaactgtcaggtcattaactttaggcacaaagttcatttttgatgtcgatttaaagagtagcatttatttagcagacacttcagtttaaatgtattaacagtgtatctgtaaaattagtataaacatattatgaaaataaaatcactggcattatattttctataatttaattcccatgaaaattatataaccacaaaacttttggactgcaagtcataaaaaaatatggaaaaccatttgaatttgaaaaagctgaaccctagctgaccccgtttctaataaaagaaagaatagtaatgtctcatcagcatgactgcaacttacctacaactgtttgaggcttaagaaactaaattatctttcatattcttttaaactactcaccgttttattttgactaaatgaaaatgttctagaaagatgaccaatgaaattaatttgataatattaaatgtaaggtatggtatcaaaatgttactagaattagatttaagtcatatatatatatatatatatatatggttactttctaaatcagcacttatcctcaaatggagtcaaggaccactctcattaacagtaggaaagtgaatgcctaaatgagcatgaatgggaaagctgtataaatttcagttaacaaggataggacctcaccctttgttttcttgcatgatttcttcttttaaaaaataaaatgagtttt

SEQ ID NO: 7717 - DNA, 1372 bp, Homo sapiens
tgtaaacctagtttgatatactgaaccattcttttattcctggaataaatgctgtttggtcatcttaatacatctgattattccatttggtaatattttgagtaaaaaattctatagtgaatcctgtttgcttcatggactgagtatagtagcgtatctttttctgtgactagaagttatttatgaaagagaatcatttatgtttgaagaagtaaatatgcctcagtttcaaatggtcctttaagggctctgtataaacgattccaatatatttctcagttgttattaaagtacttgatttttttcttgtctaacttttagcaatttttatattaatatttcaaagaaccatgtttaagtaaattactagcaaaggaactctttgggggaactttatgaaattttctcttggcagttgctaaaagttttcttacgttttctaaaagttcagtaatagtacatttatctttagaaaagtttgcttttcagaaagtgtttccatttttcttgtggtcagaatgtgctgtgaattttaaatgtatttttaagatattatagctaaattgtacctcactgttttctctaaaaagttttactgcttttgcttccactccactattcagtgataacaagggtaacaagtttccactagaattgcttgtcactttattcttgtacttttgttttactactgaacatctttttaaatcgttgccacaaaatatctcgcttttatcattttcacattgctctagtatatcaactttggaaacaagacatcattctatttatagcattctgtttttagtagtggtatttccatttacaaaatacagtaattcttgatcgctgaagacgtcaaatcctagaaaacatagcatgcctacgcgtgatgttaacatcattctcgaatagttgttggttgaagattcatttgatgaatccgatttttcagaaatagacgagtctgatgatacagacgattctggtgttagttctctgtagaaataactccaagaacacttttaatagtttattttcacattgaaaatcagatttgctccagcctcaaagagtatatttatgtaaaattaggtaagcgatatagaagcaagctgcactttttttctaaatgggaaggtattaaaaaagaaaagtctcattttagtaacatagtcttccttaaactctatgccacttgtaagatttctgaaaactgaagacatagaagggaacgggcttgatatgaacgacagctttgctggtaaataaacccaactgaacctaagattatctaaggtaacctctttttctagtcttttattgtgtgaacagttacctcctgctgagttgttggcagaatttccatata

SEQ ID NO: 7718 - DNA, 39567 bp, Homo sapiens
tcacctcattagtgtccacctggcactgactgatcagcacactataacatcatgagaaagatggcgggaagatccctggtaattatacatttttacttacgtagcaacaaaggagagagcgggaagctagaaggcagcaggaacgtgaacagcgaaggagagaacaagaagaaaagaggcgtctagaggagttggagagaaggcgcaaagaagaagaggagaggagacgggcagaagaagaaaagaggagagttgaaagagaacaggttagttcacagataacatagcaggcatacacttgtgaagtttgttactttgcagagctgggggatttttagaaagtatacacacatgtgatgcatacacacatgtacacacatacacatatacttagaacttcagatgtatgaacgtggtgaaacacagttggaatgacaccaataaattcagtctcttgtcttaaaaagggtttataaatcattacactttaggaacctgttgaaaccagttaagtggtctctaaatagtataatacctgaaagatgtctgcatgtatcttctcaggcttggcttaaatgctgtagaccccaaatatatgggtgataattaacttttaaaaaaaaaatgaaattaaaaaccaacagtaagaaatttcttaggagaaatatttgaatatccagtggctaagtgaatactgtaatatatatcagcatgtaattctgtatatacacagcacattaaaaaaactaacattgatgagttcaaccaaaaaagatcaggttttaataatatttgcagcattttattaatgtcaggtatgattttatttagaattatttttttgtttcctgaaccacctgtacaaatacaatttgcccttagcccctttgcctttcttgtctttgaattgatctctttgttatgagcttggaataaagaaaaaaatgatatgtgaggaccaatttaaatagcacttggtatctgtattttaaacttataaaccatggtgttaactttcaaatgtgactgttcagctgccgtcctttatgcttatcatgtgtcttgggctttctaagcttgggtctgcatgctcctcggtgttttcccaggaatttcagtgacgctttttatgttacctaattgacgttgtcaaccatttaactgtgtagcgcgtgtgctttaacattccacttatgtttatacctggggtctgcaaagaggaaaacattcaagcttttaagaattaaatcacctagaaataatgattacagttcgatcatgagaggagggtgtgatggtagcaattcatctttaatgctctagtggcagtcattaaattttgtgaatagcaagtatttggcaccacttttaaaaaaaaaaattctaaaatcggttttattctgtttttccctgttctattgtgaaatagtaattcccatgttaacagtgctgtaggacgcatttcatttcagcataagtgtgtatgtttgtgtagatgcgtgttgtgtattgtttgttcattgactatgtgttaggacctttgtggtttggagaggacatgatttttccagctgtccctgtgttgagggcagaaaacaaatgagtgtactgacttgatctttcgagttaagatttaattctgttttgttcaaaaaagaaaatgagttgaaagtcaggttcctttgctccgtcacagttgggttaaggccacaagccttgctagggtaggtattgctgtagcatgtaccatggagggtcagacatagacacaagagacgtagatcccaggtcagaaccagatatgtttgtcagtagccttctgactaagtccgccccacccctctgcccacacccccccagttggcttttttggctcagttttctttgtaaagtaaggttttctaaggatttttatatgctgtaatttcaatattctcccagagatattggttaactaaaacttctgttcagcccatattgatggctatttttgtttcaaggtgtgcaccatgacacaaggggatggtcagcagtagacactcttaaaagggaatctgaatttcaggataaaatgtctcctcgtagtccttcttagtctattcctcttctagagcttttttccctgtccaaaaaaaggaagcctctttggcttgtaaaatgttttatgcttttcaaggttatttcatatcaatctcatgtctgaaccttacaaaaattcctgagggttgggagaggagattttggatgctcatttctcaaatgaggagactgagaaaaggggagctttagagcatgctagggatcatagagccagtcctcagtggaacagggactgaggcctcctggtatccctgtcctttataatacgcatgcagctttgaagtagggttttacccctctctataacatatttgggatgtgtttacttgttttcattgttataatgactaatcattctcttctcattgaaaagaaaaaccaccccatcctcacttcctgctgtctttctctccccttgtccttgtctgtctctgtctgtcacacacacacaagctcatcatggagcctgggtctgttcatttgaggagagttgcccaagtctggaatgtagtcattccaggtgcctttggaattgttagtgaaagcatgaatcatgtttgttgtattttattattaagcaggttttggttttaggtttcaaaaattggtgatctgtgcttgttacaaataatgactaataagcagatgtttactaatcagaaccctctgatactttttaattaaaatcttgatttctctggggtttaccaaccttaagaggaatggcatactgttttaaaattctgtatttgtttacaacagctgtgttctaacagaagtactcttagatcccttcgtgtatattatgggaatgcatatcatcatttgttagactccttaggtcttactggccaatttgaagttcttggagaaatctttagcaatagattttcttcaggtatttaccactaagtgaattgtcactaaaggtgattggagcaaatggttcttggtgctccattcaggtggttctgatgcttttctttgggataatttgattgctgggtgatttctgtgtgacaggagtatatcaggcgacagctagaagaggagcagcggcacttggaagtccttcagcagcagctgctccaggagcaggccatgttactggtaaagccccgcctctgtttcattctgtagcatcagggctccttcatccgtccccaaagttgagcaagctgtggtggtcaccagaccattttggttttgctgtgggcagccaggctgaaatagtgatgcccattttgtggtcctattgctagcacattgcaacatggtctttatttatttatatctctttaataagttaattgttcttgtttggtagaccaacaaggttttgaacagaacttggcactcagtgaacacactagaatgctgagggcagtaggttgaaagcacatgtcacaggatttttacctagtatctataccactaaaactcacatttaattgaattatctcttactctgtccaatgataattatggttagcaacagctgtgagatttttccacaggtaatgtgctatttaaaatcccagccattttgctttcttacaaaacacagagggaaaatatatggtcactttttttaaaagccgaacaaatccagagaagaggcgagctctccagtgtcccatagatttagtgttatcctctccctctccaaggagtgccgatggcgggagatggaggagcaccggcaggcagagaggctccagaggcagttgcaacaagaacaagcatatctcctgtctctacagcatgaccataggaggccgcacccgcagcactcgcagcagccgccaccaccgcagcaggaaaggagcaagccaagcttccatgctcccgagcccaaagcccactacgagcctgctgaccgagcgcgagaggtatcctctttcctttgtcacttagacattgccctggaaagtcgtataacgactcttcagaactgtgtcatatgagttctagaacgggccatagagtttagctaattatctggtttcttcattttctaactaggaaattgaatttcagaggagtggagggccttgcccaaggtttcatattcagtcagtgctttttccataaaggaccagagtgcctcagttaacatatcccagaagaacttgaaactgaactaaactaaaagattacatgacacagtcactcttaaaaatgtggatgagggaaagagtggtctgatgaactattctgccaagctagtataaagctaaagtgtgcctgtggctcaactttctgactttgcagatgtcaagatgccctgctagattggtgcattagggttacccagagcctcagagtaggctgcggcagggactgctcgggggtgcaagatgggcgacaggtgtgcctccagaggtgttgaatcccggcccacaggtggcagcagccttctattgtgtctgccctcacaggcagtagattctagaaacaagtgttctgtttgttctggagtgcttttatatttggtggagtgaaatgcattccggatttctgatgatagttttttagtctgttggtttagttgcttgtgacagattaatttttttctacttcatcatcatatacagtcttagaattctgagcaaggaggagagcttagagactgccttgctaatttttatcttcataaatattttctttttcctgaatctaatcctagcactgctttatgtaccttcttttttccagctacccctctcttttctggtagcagaagaaaacagaaaacttacctttagatttcttccacttttagactttctttgatatttctgcttttcccctactaacactgagttatgtcttctaattctctgatgcaggtggaagatagatttaggaaaactaaccacagctcccctgaagcccagtctaagcagacaggcagagtattggagccaccagtgccttcccgatcagagtctttttccaatggcaactccgagtctgtgcatcccgccctgcagagaccagcggagccacaggtagcgacagccagctttgctgtggttgaggagactcatgcaacggctcgctgagccgcaggcctgctgtaatatcacagtttagtttgtcaccacactgaaaaagaggagagattagcaggagtgagtttagactaaaagaaggcatagactcagttgatagggaaatatctttttctttctttttgagatttctatgtactcattaagagtatctagagtgagtgatttcttctaactttttgccttccctaactcaggtgttaagtgcctcctttttctgatacaaagatcttttagtttagtttttagagaactgggattataaatacatagagggagagccaggaattttctttgaagtattttaaaagtaagcgctttactgtgtgagccctggctcttggccagtcctatgaatgggccttagatgatgcccctgaaattgcatgcaaaatgtctttatttgctcaaatgtgtattttttgtgggggtggggggaatgaccttttatcagattctcacagggttcaagatccaaaaaagtttagatctagtgggttaggtgtggatttctctgaaataggccagggaaaaggctgtgacctctccttgggtctgctgcagcgttctagccttggctaggtgaggggaactgttgggccgatgctgtgtggctggagcagaacccacagtgctgtccatagaggagaacaagcaacgaagatcatggctaaagatcttagagatccttaaaatgccgattcctaatctcttgctgaaaactactgacttttagatattttcccgcttgccactctgtaatccagaatattaggaacaagttcttaaactcgagtttacttttcactggtgtttgcatgtgtgggggacaaaagtttatgttcttgtggcaggaaactgtgggatctgcagcatggaggagttaaaaaaaaaaaaaaaagggctggggcacagtggcacgtgcctgaaatcccagcactttgggaggccgaggcaggcagatcacctgaggtcaggagttcgagaccagcctggccaacctggcaaaaccccatttctgctaaaaatataaaaatcagccgggtgtggtggcaggcacctgtaatcccagctactcaggaggctgaggcaggagaataacttgaacccaggagtggagtttgcagcttgcagtgagctgagatagtgctactgcatgccagcctgagtgacagagtgagactccatcttaaaaaaaaaaaaaaaaaaaaaaaaaaaaggaacagctaggactgaggccagggctgtgtgagggtgagtgggtatttccatgggaccagcagttttttgagtcccaggagagctagcagatgggtagctccagagaggagaggatagaaaggaaagaggaaagcaggagagggtaactggacacaattaaaagaggatgagaagagagactactagaataggtctgaggactcgtgttctttagcaactttgcactgcttgaagattaaaagttttcacactgcaagttaaacttcgcataaatggacaatctttggccactaatagtttagaaaataggagtttctgaattatctaatttttgcatttgttatgaatttgtgtagtaactagaaagagtctcccatttcctcctcctgttcattctttgggggagacttttctcgtgtaggactctattttaaaactcatttttgattataatttcaggtaatactttgaattacatgctttatctctgaaaatcttaaacattttagaagtctaggattataccaatatctggtattatacaaatctcacctgtatattgtagaaatcatacaatagaactaatttcacatcttgtatttggaaaggttgaacaaattgattcagtattttcagtttatgtcaagtacattgatgtaatagatatgtagctatcattttttcagttgccatattgaacaatcattttagaacagtaaaacataatttaatgaaaatattttatggattttttcagagatcattttcccaatttagaagcaaccagataaactcagttgacaagtaattgtcatatttttgtaatttcccaagtggaaggaataccccaacaatagtcaattcagggaatccatggtactgaatatttttaaagaaatcacaattctttattttcatcactaatatgaaagtatatggagatacctgggttatgggtgtttgtagacttgggaaaaataagaaaaattgttggtatatttgaaaaattagctgttcttgagatattatagtctcaaaacgtggggtttgtctttgctcgttgaacgtgccattttgttactcgctctggtgtaaaatgtgacactgcaggtaatgtgaggatggctaggtaggtttgcacatttggcagtgcgctttatcttacaatttttctgcctctctctgcctttccagtctctgctttgacatggatgtgcatgcaacacatcataacccctttgggctctgagagcctctttgtggggaaaaaaaaaataaaaatcttcacattaactgctatctgtaatgtttgtctggatattaaaaagagttttccttgtaaatgtacatttgttcttttctacatactgtgttcccagaccacttcttcactttgaagtgtaactgtttcactgcgtggctgacctaacactgtaccaccccggtgtgtattccgcctctgccagttcctgctttggatttggtattgaccagaaaagccagttttatgcagaacgcattgaatgttttgtgttttgttttcttgtaaggtacagtggtcccacctggcatctctcaagaacaatgtttcccctgtctcgcgatcccattccttcagtgacccttctcccaaatttgcacaccaccatcttcgttctcaggacccatgtccaccttcccgcagtgaggtgctcagtcagagctctgactctaagtcagaggcgcctgaccctacccaaaaggcttggtctagatcagacagtgacgaggtgcctccaagggtaaggagcagaaagacagatgtgtgctgcttttttcctttttgttatttttttttaaagattatttattttaattatgggtatgcaacttgaccaaatttaaaggggcattgaaatttcaaagggactttttactggtgaggataaagttccatagttaggcaattctgtttagccagtggtcagttagcgttttatttttgttaaccctaaataaggtagcaaaatgatgtaagagtaagtctacaaagaataggcttcttaaacaaattcataatctattttagcagttttttatatgtttatacagaagctatgcagttttgcaatattaatgtcaaaatttttagaaaaagtcctataagaaaaattttattttctttttaaatgtaggggattttgttttgtttttgtgtttacataatagtgaaattaaacaaaggagcccatgtcaatttatttttcctcatttggaatttgcttcctctgaatattttcttgcttcctgctagtctttgcttcctgctgatccatttatagaccattgtttggtttctttgagcttattttcctgattctcacattatctcagcaaatgctttgtatgtccctgctaccaagcttcagtccaaacatcatttaaatgttacaggagcatagaaagcctgtttgtactggcttcttggatgcttgtgactaaattttctctccgattgtatcagtgtaggaccagggaaggagttggggtggggagtggaggtgataggaaggactgcttttaaatattaggactgctttaaaaatatattttggtagggaagtattttttttccttttcatgttttcaataatttaattgctatattttctacttaaaggttcctgtgagaacaacatctcgctcccctgttctgtcccgtcgagattccccactgcagggcagtgggcagcagaatagccaggcaggacagagaaactccaccaggtaaaagacaagtgagcactgagaacaggccttctgtgcagtctaccacagccttacattgtctgtttcataaaaatgctcttaaacacagacgttctggggctaagagattatcagttataaaaggaaaagctgccataaaatccatcaacgtggatggcatcaagttgatgtgtagtaaaaagtgggtttgaatccggatgtgtattatagcaactctgaaatttaaactacttttctctgtaagagtaaatggagggagcagcaaggaagggggagaagttctaagagaattgtgatcggggggagcttttcatctaagggatgttgtaaggcctgtggcataaaacagaaatcacaaacaggttactaaagaagtcactggttgacttcacagtctgcagtaaacaagtgaattcaccaaatactatcctttttaggttctagagctgctctgtccagtacgattagctacagaagcttccttatatttaaattaaagtttaagtttagttaaaatgaaatacagtggaaacttcattccttagtgcactgggtatattcatgagctctatagccacatatagctagtggctatgatattatccagctcaaatatagaacattttcatcataacagaacgcttcattgaccagcactatcatagggaagaaaagatgattatgttgaatgttttatatcttgatcatcactgaacctctaaagttagccttctgcgcatggaaccttggtctgacttgaggtgtcagatggatgatagcccaaaagctgcacagaatcctcagcactgctaatggcagggggactgtggtgttcttccctgaccaagtctgtgtcattaattcttacctagcacatgtgtgctttgggtccatccatggcaggaaatccatcccagctcatgctttctgtaccgtttccaacagcccatacaaaggactattctttgtaagtgtcagtttttgagaacagtaacaggcaggtgagagcagcagcctagaaacagaatatagttttgtgtataattatacaaatacggagtgttttcctaatattaagaactgacttgtagctgtgacagaaatggtgctgcttctacactgaacagtagcattgtatctcacacctgatgattttagatctactaatggtaggatatcatttagcatacaaactaaaaatcgataaaaatccatgaacaatgtcattatatcttttggtgaatttaatgttgagtgctgtttatagactgttttttgtctccctacactttaaagacattggatgggcacaccatgcacatgttggtaatttggtgctgcatctagagatgacacattagctgttctctcttcttcttttctaacagcagtattgagcccaggcttctgtgggagagagtggagaagctggtgcccagacctggcagtggcagctcctcagggtccagcaactcaggatcccagcccgggtctcaccctgggtctcagagtggctccggggaacgcttcagagtgagatgtaagctgcctttcctttcctttttccctgctaatgttttgagctgtgatccatatcttggaagtttgtcttaatctgtagtttgcgtgtagccacacgtcacaaaacaatgttttagcataggttgctagtgacaataatagtcatcctgattttaatcataaaggagctaaattttgagagctttatatatacctagcactgtgagcgctttacaatttagtgggattaactaactttcccaaggtaattggctaatgtgtgagctaggatttgaacccatttctttcggtctgggctccagagcctatactgtcatcaatattggttattttaatgtactcataatagatgagtgaatattccctctactgtattattgacataccatgacaaggtatatattgtgaacacgtgtcaaagtgagtgtgatgatggagggtttaagtaaagagtcaggaaggctgctggagccctccttgggccccctctgctctgtaattcagacctgcaggtggagagcctaccatgagtgggcagacaggagtgggcggggtgggcagggcagcttcataatacacatccatatgttgatatgtgtctgtccatcttgtcccttttgaacccaacagcatcatccaagtctgaaggctctccatctcagcgcctggaaaatgcagtgaaaaaacctgaagataaaaaggaagttttcagacccctcaagcctgctgtaaggattgtgcaggatcagttttacttatttcagacttgaatgagatctttctattaaaaatatgtggttgagaggcctgcagtcttttctgcgagggcccctcacagatttgaggaattataaggaatgacctaaaccccagacatacttgttcccttccattggtatcgtctgctttccctgtataaagtctcaagtgagtaaaaccttttttctgttgttccagccatacacttggtgtacagtcagccttacaaaattatgcagaacaaagtatagttcttatttaatgaaatttccttctaaggaaactgatgctttaaaaaaaatacaaaagaaagaaaagcctttttatctctttcttggcattaacctttacttattcttcgtgagttcagcatttacaatactggcttttagactaagtttttaaaaatcaccttcttaaactcactggttgcctaccttctgctttttggtacctggggtgatagttgtgactgcttctcacccttctcttttaatccctctgatgttacctgaccatgtaattgtgcacgctttgtggaattttaagcctgtcagagttttcatttcctgcttgaactgatttctgtacttctccctctccccttctttctcccgcgcttccttgtactgtgcattcctcatcaacgatggcttctcggactccacgaaactgcgctgtactgaagggcgaagtggtaagcgccatctctgaaaagttccacttcagagcagcactccgaccgcctgtcagctcagcttgtattcgagctgcggtcctgctccttcctcaacttgacttcttgttcttttctagaatttaaaaacctcaaactttactccagttttcttaacataacatttgctgtatttattgttattaaatgtagcttttttgagtaactgtttaaaaagcttcagctataaccacgaaatactaatagcaagactcagagcccatcactgttatttcagtggctcaagctcaaagaaaagaaacattctcaactatgaagaaaatagaaaaccaagttggaactgctagaaattaaagacagaaagagctacatagactgcgtttttaaaaagtgattacttttacataaaattccccaaaaaagatgaatttggagttttatatgaaaatgtggagtataaatagtaatcactcttgaaaattatatttggtggattgattgagtcttagagtatctcagtgtggaagagtaaagggaaactaagccttttgaacaaattccactattgatttctttctgatgttcccttttatacgtggtgtcacagggtgatgtgggtaaggcttgaaggagggcgttagggacgcccacagcctcctgcccccagcactcagggtcgcagtgtctcttcatgtgtcacagacttgtccatgaatgtggcaggttgtgaacagtcggtgaagtgagatgtcagtggcatcctagtgctcacttcactcctttcattttaatgtaggtttgaagttttttttttttcagtatgaggtaaaattctagatcaacaaatgtatatacacagatccttgagctttggtgtaaagacacatgtctatatgacaaagtcttctttaaaggggtcagtccagaaagcaagcctctagttaaataagcctgatttaaagagttttgggagggaagttatgtttctacaacttttattaataaaatattaaacctaaaatgttgattttagtaaaatattaatatttattactaaaatttcataaatatcctataactagtaaataaaaacattaaatattaaaccttagcgctttgaagtttttaataataaaagttgaagtaaaataaaaatgtgtctctcaaaaccttttttatgagtctaaagaagactttgtcatgtagggagatctccttacaacaaagtccaagagtctgtgtatatacatttgttgatctagaattttacctcatattaaaaaacaacagtaatactatcagcttaacataagcagatcttttttttattgtcatgggatttgaactgtatatgacatctttgacttttttttggtgtcttctattttttttttttaatctctctcttgactttatttggtcttttctatcaaaagccataggagctcactttctcatgaaactgggtaactataaaagtcttacaaaactgacattgtggcaatttatggttaaagaacttctcatcttctcctgtccctgctcctgcttgccttactctctcttttctgtcctttgctttaggatctgaccgcactggccaaagagcttcgagcagtggaagatgtacggccacctcacaaagtaacggactactcctcatccagtgaggagtcggggacgacggatgaggaggacgacgatgtggagcaggaaggggctgacgagtccacctcaggaccagaggacaccagagcagcgtcagtccccggtctcttttagagcggatgagagtattctctcagagcctgctttccactgggacctagttgttcctagactattccgtgaccccatgagcacttactatgtagttctcgtggattcagcagcaggtcgccttgtgtttccccttctcttcgttggtgtgtgcatatgtcagtgcttcccccagcaccccagcgtgtactttattttttccttttgatttgaggatatatgatccaggggaaatttcagtttggtataactactttaattagccataattattcattctaagtttttgctcagaaacaaatggcactggaaagaaattctttgttaaagggagaaagctaagcagttgcttttttggaggaggctttatatcggtagcctcatctcatgttttgattttgagaaggcgaaaagcctaaacaggatctccttgactccagagattaaggcctttcacgtctggattttttctccataggtcatctctgaatttgagcaatggtgaaacggaatctgtgaaaaccatgattgtccatgatgatgtagaaagtgagccggccatgaccccatccaaggagggcactctaatcgtccgccaggtacccgtgtcttctctgttgtcagaggctgagcttctcctgtggtcattaacccacttgctcattcactcactcatgctgtttctccatcatcatctgttttcatgttaacaagtcccagagggtcaagtgtcgagtgtcgggggctagggaggcaggtgtgtactgcatgcccagaaggtagcgagtagtctccaccccacatcgctgctcctctgcatgtctgcggcagccctcattcaagcaccgcgctgagtctcacagtctatgtctgagcgggagagaagccacagggagtccttaaacaggctcacagagtgaggaagcaggtctggagtctggcagagcagccaccatggctctgcagagcacgctgggctctgagtgtctgcagtgccacagtgggagcgggtgaggcaggcaggacgagcctcatcacaggcccagagactcggagagcagaagggttcgggaggtttctcttctatgttccaaaatgttagttttctcacttgttgaataattaaatgtgtgccacccagatatgctcagtttggatcactaagctttataactgtctgttcatttcttagcttagacttaattaaagtgatacgcttctcatttaaatagaacagggcacctatttagtattttggactttgccctaagtgtgtttcatgctatggcaatgcattcggatggaaagtaggaagaatgtggaaaagaccaggattcagagaatccacaggtactttctggagctttgcaaagaaagatttaaaaagaaaaaaaaaaggatactggttttggtaacagaagctagcgcaacagataaaccagattaaacactcactgctcgagccgtgcagccaccagattaggtactttgaattctgttggcacaagttaggcatttggtgaggaagtgtgagcagttcaggctaatttctttggtttttccttggtaatttagcagagtttataagtcacacagcaccttaaagcagttatcaatagggccataggcaattttagcagcgcttgagcgagacaagtgtgcctgttttttctacagagtacagttgaccaaaagcgtgccagccatcatgagagcaatggctttgccggtcgcattcacctcttgccagatctcttacagcaaagccattcctcctccacttcctccacctcctcctccccatcctccagccagccgacacccaccatgtccccacagacaccccaggacaagctcactgctaatgaggtatgtctcgcaccacagctggctgctttcctggggttagaccagcactgcctaggagttagtttgcaaaggagacctttccaacaccctcaccccttcccttcccaccctgctttctctgtcacctacccttctccccaaccccaagtaacatgtttcagatctgcatataaaccccttaaccctagatcagctcccccaaacttgccagttcactgtttactgttctgtagataagtatagttgcatggctttatctagtttattttttaaaaatctaaataaaatgattgctctgtcctcagaccggtattatgtatttggcatgaaattcttatagtcatttgtggaatctgcctttttcattctttttatccaataaataaaatataggaagattcggttcagcaggcttggccttatctggacaaacttattatcctgtacaggaatctctttcaaacagaactgattttttttttttttcttgtttggggggtgggttgttggctgattactcttacttgttttcaccaaccctgttaaggagtttgttctttgacatttacaatcactcagaggtttagaagccaaattatttttgggaaacctagaaaaaattaggatgttaagcaagaaggacaaaggtttgagcttgtttttaatttaaaattttgtgtgggaaatctgtgtgctcctttgaaggcttggttgtggtgctcggtctgggtgttagctcagtctgggtgattctttgctctttgaacagggttatactccaggtgtagtgacatagcccacttgagcacccgtattgaattaaacaagtgatttgattccacagaagatttggtttaagtgtctttatctaccagttgagggaggttagaaagaatcagaaaaatcctctcctccggaggagcagtggcaagtcaactgcttcctagacaggcttggcatcggctagactggctcctgactcatgggacagggagggaagctgccaggggacagatgttcaggtgggaagcttaggggagggcatgggctctaggacatggtgaccctcaggtgtccatggagggggtccaatggtacaggacaaaagcacttgatcagacatgttccttttttctcctgaggtatatatcccacctacactcacattcttccttatatttatattttaaactttgctccatttcgctctaatgtgcagtattttactataacccttaactcactaaaccggcaaatttatttttctgtttgttttgtttttaattgtcattacatttccacttaacaatttgtttcacttcctttgtgtttttttgtcttaagttacattattaaccaaaacactagtgctcctaaaagatcaaaaagatacgccttcttttgtcatttgcacctttcactaatgagtcctcatttggtatgggtttaatggtgatgcacctaaaacaacagtagccaaagcttctgtagctttctggcaagaggctcaatttaaaataactacaattattaacaattgccaatattccagcatagattatttggactcttgggtaggagaataaattcagaagttggtgaattgagatcaagacatttcagacctcctttaggagtttcattataagtatttacttaatttttttttaaagctaggcacatgaagtctagatttcattggtagcttgcagcactgctttgtaagtgagcaatgtctctggtagagatacggctcctgcagtggttccaggtaaagctgccctgaggggtgctatgccacgtggaagctccccgcagagcattttttgggggaatgatgcaaggcaaatagagcaaagtattgggaaatagtgcaatatagaagtgaattgaaatgtgtatttttaatgttcatttttaaaatgccagttgtattaataacattgaaatttacattgcagactcagtccgctagtagcacactccagaaacacaaatcttcctcctcctttacaccttttatagaccccagattactacagatttctccatctagcggaacaacagtgacatctgtgggtaagtacagtagcaacaagaaagcagctgacaaatgggactttatctttgagttgctcttttgggtggcttaggtgtagctggttgttcacaggcacagacctcgggtacagaaacttcccatcccagttgtatgccttatttgcaatgagatgcagagtccatttcctttttccatatacattgcttacagatttcttctctttgacaaagtgttggttataccacatgaatatttacttgaagtatactggggaagggaggcaggcatagtgtgtgtgtgtacagaaaataatttcaaatatattgtgtttcagtgggattttcctgtgatgggatgagaccagaagccataaggcaagatcctacccggaaaggctcagtggtcaatgtgaatcctaccaacactaggccacagagtgacaccccggagattcgtaaatacaagaagaggtttaactctgagattctgtgtgctgccttatggggtaggtgtctagccactactccaacactttcatttttgttctgagtggtggctggtcttctagagaagtactgcattgaatagtttgtggatagacaggatggaagacttctatgatgtccatctcctgttatatgcagagtggtatattagcagactggtgtggcacatgtatatgattgcactcattttaactgtcaaatattggcatgattaatctccattttatttttattaaacaaatttttgtagtagttttgttacgtggatatattgtatagtggtgaagtctgggtttttagtgtaaccatcagcccattatactcaatagtgtacattgtacccctgaaccctgaggttgactgttctcactataaaattcaatcatatctagcagtggaaatgttggagaagtatatttataaaaacttactgcaacatgcaacccagtgtttttcatttttcatgcttgtaatttccaagtactttacagtgactattcttttgactattagcattcagtactttataaaattatacaactgtacaattatacaacttggaaatatatcatggagaagtagaagatagagtgtaagtgccacaatacctgcagcttttgtgttttgaaaagagtcttcagctttatcttgttactccctcattctttctcactgtaaaatcttgaggttgatgtttatatgttagtttttagaaacacacataataggatttcttcacaaggcccatattttgtgtagttattaccagattcttgacataggagtttaaaaaaatctacttgatactgaagattgaccaggaaaatatcaaaatattgtgtaaaatagaacctttgaaatggtatctgtctggcagcagttctatcaataaatatctgtcttttctaccaataatttctaagctgttttagatcaacttgcctagatatatgcagggaaacctaagcataatattcaaataagttccaccttgacaaggatatagtcagggcagaatggccaacctcaagaataaaattatatgaaaatgaatcacatattacatatttaaatatttttcttatactgataatctttttagttgtacagcatttttttttttttaatctctaagggttaagtcactatgcccacaagcattgcttgggtagatactgtcctccaaatgttgggataatcccaactcaatcaactctataaggaccaggcatgaacagagagagggctgtaggagcgttgttctctcaatgccgtcacaattatttatttcagattatctggaaatagggtgtgggtgggtgtgggcatacatgtatgtgccatgatattcttccgcctcactccctctacacaaatactttattccttgtcttggtgagtttatgactgaggaaatcagtacacacagatatgtgcccaattccctaggaatgtagggtcatctgtgctacatgttacaaaggtgattctgacagtgaaggttctaggtcaaggaacaagagcatttggggaaatacatgaatgatcaagagggagaagtgctttggccaaggggcaggcagtcttagatgccagtccaaggcttttggaacaatttctacatggaatgtgtagtttttgaagatagtcatgacgtgagtattttagcaagattaggattgattggatgtacatcatgagaaagtggagagaagctcctttaacaaccttaattaaggtctctatccgtcacttaaaaggttgccaaaggctgaacaattgtgagagcagaggaaagggaaaggagggacagagaaggggttttctctggctctagtggccagttttagctagtttggcagagcagcttgggagctgttgatagaagcagccaagtcgcgaggctagtttcagtagagatctgcagtgggtggaaagcaggaggcaaagtagcagcgtggaattaggagttactggttctgaggcacactcatgcacaggtgggtgggtgtcaccagatggacagcagtggaaatgtctccactgaggaagcagagggcaggtgtggaaataaggaaggaggcagcagaagagtgtggagactgtgacggtacaaggttagagaagtagggtgagtcaaatatcaaatcacaatattttgatagtcctaagaaatggaaggacaagagaactgactacagttgtttcttgatgatggtggaaagtgatctttaagaaaagcttaaatgtgagtgatggaagccgaatcataagctgttaaggatttgagggctgcatttatatggcccattccagagatttgccaatgaaagatgaggaagcacaaagagatcatggtatcagatgaaggtttgttcaaatgtgtgatgtggctaattagacatagaatctgtaaagataggaaataatcagcatataacattctcgaggaactgaggaagaactagaaactaatggattattaaggaaattgatgggatgagggtttcttgttctttcccttatcctttcttatgtttaaatatgtcagcatcattgctacatggtgatgtattgcaggattggttactttaactgtttaacctttgactattttaaggatttctgcttctgggtgaattaaggaagctacacttttttccaaatagatgatgttatcctttctatacaacctggggatttgccaagcacagcataaaattgaggcctttctgtgtccctgaaacaggagtgaatttgctagtgggtacagagagtggcctgatgctgctggacagaagtggccaagggaaggtctatcctcttatcaaccgaagacgatttcaacaaatggacgtacttgagggcttgaatgtcttggtgacaatatctggtgagtgtttgttttgtaaaccagaatatgtgacaccatcttaacaatattgtagctttacacactaaacttcagttagctcattcactgatgtactggctaaataaggtacaaccacattgagacttgacaataatgtgagctgaagacgtattcagaggtgacacacacgcccatttgatctctggctcctccgaaagcagtcttgagaagcgtatgaatgtgctctttctcactggcatctctcactgccctctctgcccagttgcttgttagatttcatttgccttgtccaatatgtaggtctgtgtccactcctttccaccagacttttttttttttttttttgagacggagtcttgctgtgtcgccaggctggagtgcagtggcgcgatcttggctcactgcgagctccgcctcccaggttcaagcaattctcctgcctcagcctcccgagtagctgggactacaggcaagtgccaccaagcccagctaatttttgtacttgcaaaaggaagtattctttgccattattgtaaaagtattgtattatggtttttattatgtgaattaacacaattatgtctcttttttacttatttatttatttatttattttttgagacggagtctcactctgtcacccaggctggagtgcaatggcacaatctccgctcactgcaagctccgtctcccaggttcacaccattctcctgcctcagcctcccgagtagctgggactacaggcacttcccaccatgcccggctgattttttgtatttttagtagagacagggtttcaccatgttagccaggatggtcttgatctcctgacctcatgatccacccaccttggcctcccagagtgctgggattataggcatgagccactgcgcccggccaattatgtctctttttaagaagagcatttttcttagtataaattgtgtaatataaactagtacaggaaaacaactacaagaaataaaaagtagaatcatccagagatcatatcttttaacttttataagtttttaaattccagttttttaagcatacaccacactcactgtatacttaagggaaaaaatctgcataaaaatggttatacaatatttcaaacataggataatggcacccaagtactaactataactagccagtttgaacagttgttgcagtacactgttgtacatacagtcagcatccctgttcctcccatatctacctgtccatggcaacctctttcctgaagttagggtgtatgccatccaggcctgattgtccaaaacacgtagtctgctttctccatgccattgaacatccttccatggcctccattttatatggctagaggatgtttccttgcatagatgtattaaaatgtatttagttatcttctcttgctgccctttaggtgtattcccttttttctctcatgtgaacatttttcacagatatccttgtagcttacttaaccttcaggcacataccatgttgcatagatcataatttcctaataattagtgttattccttggtcagatggcatgcaaaattataagactttaaatgagtcttatataccactacttacagtcacttatgatattataatcacttatgataccaccagtgatttttatttaattatctgcttgttagtacaagcttgttatgtaacatatttgcttgaagttattttacttctaatatatgctttggttgttaagtaaaggagtttcttgaaatgcaaaaatttcactatttatacttaaatgaggaaacagccatttaaaactagagtgctgatggatggtagttttttaagttggagaaaacaaatctgcatttagtgatccagtgaaacaagacagttcatggggatcaatactcagctgagaccaggtgcggtggcgtatgcctgtaatcccagcaatctgagaggccaaggcaggaggattgcttttgcctgggatatcgaggctgcagtgagctgtgatagcaccactgcactccagcctgggtgacagagtgagagcctgtctccaaaaaaaaaaaaaaaaaaaaaaaattaataattataatcagctgataccagtaatcattttttggtctacttttctgttttttttttttttccttccttattaactttcagtggttttcacaatcataaatgtagtacatgtcaattgtaggaagcttcaaaaatagaagaaacttaggaagaataaaacaaaatgtcacccccatctcagagataactcttgttaacattttatatttccctctccttttctctgtaagtatatctcacaagatggaaacaaaacattatatataaaactgtgtggtctttttcttctcttaacatatattgaatattttcctgcaaacaattccccaaaagttaaaaggattatactgaagtatgatatacagagaaagtacagataagcatacagctcaatgagctgtcacatgcagaatccatccagatagccccaccctggtgaagacatggaacattgccagcaccccaaaactgccctgtgaagccaccctgggactgcccccagaggcaagcactgtccagactttgaacatgttaggttgattttgccttcattgaactgattttatataatggtaaaacagtatgtgttctagtgtcagctgctgcttttttttttttttttttaagtagactttttctaaacgttttttcagtattttgcagtttagccattctgaaggggtgtaggaattaataggtgtatctcattttaatttgcaatttcctaatgatgtatggtacatcttttcttatgtttgtatatcttctggtgaagtatttcttctatctttaatccattttgtaattggattgttgcttgcttattgttgagttttaagagttcttcgtgtattttggatctaagtttctgatgagatatgtgttttgcggatattttctgccagtttgtggcttgtttgttcatgctgtggaatgatgtcttttgcagaagagaagtttttattttagtgaagtccaacttactagttttttctttcatgaattgtgcttctggtattgtatctaaaaagtcattgccaaatccagagtcacttggattttcttctgttaccttctagaatctgctttacagctttgtgtttcacatttaggtccacaatccattttgaattgatatttgtgaaagtttcaaagtttgtgtagatttattttcttttgcctatggatatctagttgttgcagcagcattcattaaaaagactaacctttctccattgaattgcttgtgctcctttgtagattactgctatatttgtatagttctatttttttttttttttgacacggagtctcaatctgtcatccaggctggagtgcagtggtgagatctcagctcactacaacctctgccttccgggttcaagcaattctcctgcctcagcctcccgagtagctgggattataggcatgtgccaccatgcctggctgatttttctatttttagtggagacagggtttcaccatgttggtcaggctgatctcaagctcctgacctcatgatccgcccatctctgccccataaagtactgggattacaggcgtgagccaccgcgcctggtgtatagttctatttctgggctctattttttcccatttatctatttgtctctttttgtgctaataaccacactgttttgattactgtagatttatagtaaatcttgaagtcaggtactgtcagtctttcaactttgttcttttttaatgttatgtggactgtgttgggtcttttgcctctagagtcagcttattgatatgtacaaaataacttgggattttgattagaattgcattgactctgtggatcaagttggaaagtactgatgtcttgacagtattgactgttctgtccattaacatggaaatctctctccatttatttagttcttctttgatttcatcagaatttgtagttttccttaagtaaaactagcaaagggctaattttattagatttattatacccattttgtttttttaagtactagtataaatggtgttgtagtcttaatttcaaattctaatgatttgttgctggtatacaggaaatacaggaaagtgactcacttttattttattaggcttgtatcctgcaaccttgctataattcttgctataattgcttattagttccagcagggtttttggttggttggttggttttggattttttttggttgattcttcaggattttctacctagacagtcatgtcttctgtgaagaaagacagttttatttcttcctccccagtccttgtaccttttatttcccttttttgtctaattgcattagctaggacacccaatataacatttactaggagttatgagaagggaaatccttcacttgttctctatcttatgaggaaagcatctagtttcttgccattatgtatgacgttagctgtaaggttttatggtagatgtttcttgtcaaattgaggcagttccccctctattcctatttccctgaaagtttttattataagtaggtattgggttttgtcaaatgtttttctgcatctgttgatatgatcatatgatttttcttcttagcttgttgatgtgtgtggctgacgttgccccccatcatttttgttgttgttgcttgtagctgtagtctctttgttcctttagatgactacaccacaatgtatttactcattttactatccattcagacattattgtttcctgtttggagctattaggaaccatgctgctatgaacattcctgttgttgtacttgggggcatacatatacatttatattaggagagagattaccagaccatatgtaagatatgcacatatcctactttaatagatagtgccaaacttacaaaaacagttctaacagtttacaacactagtttctgaagtttctagttgttccacatcttgcctacctttgatattgtcagtcttttgaattctagacatactgataggtgtatgaaatcatcttattactgttttaacacacgttattactggtgagaatgagcatctttttgtgtgtctgtgagatcacttcttttccaaagttccagttatagtggcacgtccagtttttctattgttatctcctgttctatttgatttataggagtttttttacatattctggattatgactcccttgtcagctgtttctgtggtacacatctccaacttgtgacttgcctttcactaggtttaagtgctggccttaagtgattgatttcttttggttactattgttattaatgatgagacctacttctggatatgcatgtaaaatatttatatttattttgctaggcaaaaaggataagttacgtgtctactatttgtcctggttaagaaataaaatacttcacaatgatccagaagttgagaagaagcagggatggacaaccgtaggggatttggaaggatgtgtacattataaagttggtaagttctagaagcgtcatattttgtttttccagagtttgattagagtttgaattttaaactttaaattttcacaggttttttgaagtttgtaataataaacttgtttctgaaacacgtggatcatttctggtgttctttctgtttccaaggcacattctaatcttgaagtctcatctagacattgtcttactccctctgtgcacctatatgcataacagagttcgtccctgcaactcactccgccctcagtctcccccacgctgtgcatcttgtgagagtctttccactcctcctctttgacagtccacattcttctcctctgtaagatgtggttcacagtaacctctttaaggaaatcttgtcagtggaagccagctgacttgagtccttttttacatgccaggcttattctccacttagaggtctggaggtccttggcaggcactgataagagtgtttgagagtttgactcaagggcttatggcctgccattttgaattaagtgcctgtgcacagctactatgctccttactagtaagtgagcccagctggccagtcagtgttttatggcaattgtattgttttttctccttggcatgaagcagtgattctcatgaagtaaaatctcacaggaacaaaaccaaaactctttttttttttgagatggagttttgctcttgttacccaggctggagcgcaatggtgcgatctcagctcactgcaacctccacctcccgggttcaagcaattctcctgcctcagcctcctgaatagttgggattacaggcaccttgccaccacgcccagctaatcaaaacaatttttttttaaacatgaaaaaaccaaaatactggcactaatgttagacatacgggagaaataatggaccttagccaaattaaagttttataggaaagatgttatagtctaacagaatttaaacaggaagtttttctatatacctaaaactgattaatgttacgggcctattgaatgtttgtttctgcttgtgtgttttcttttttctatgtttatgaaaatatatacatcatcagttcctctgttccgagggatgttgtcatgcttggcattgtcttgttggtgtagtttgtctgcacccctcagctcgtgggttaatggtgattgtgggagctgcctcagtatctctgacagttctaatgatacgggaaagtagaactatctgcttaggatagattttaggattagggttttctgtgtttatgtgaagtatttttatgtgttgaggtataactaaaatcatctaaggctaaatgtaatgaaacagctcataacagatgaaatgtacatgaatagattatcctgcagggggagcaagaggcagacgggttaaaagtctgttgggcttttccccagaacaaaacagtaggccttcaggcctgtcactcatacagaatgaatcacaagtattttcaggagataagtgtgggtaatatcattcattcgttgtcattatggttgccaccaagaatagggagctatttaaatgtatattaaattaataaaaattaaggaaaccttaaaatttagctcctcaatggcactagtacattctaagtgtgcaatagccccatgtgtgtggtggttatattagcaatacagatacggagagtttctatcatcgcagaagtctatgaaacagtaccggttttgtcagactgttataaacctttgtgtcttaatgttcgtttattgatttatttaaacagtggtaatatatagagtttaacaaggggagttatcagttaacaagttcctgctcatgcacaaagaagaaatcaagtagcggtgtgatgttagcttgtaaagaaatcatggatctgcattagtaagtcacaggtactcaaggacccctgggagtacttgttttggcagagttgcctggcagtaagggcaccaaaatagctatgggaaggaggcagttttactacttctgtagatcaggaaatggtcttagtgatacttggacttgttcacagatacttctgttggtagaattcaggactcatgaatattttagtataagccttttttcttcctcagtctgtgtgagccccatgcaggactagggaaagttgtaaggaggacctcggtctctgtgtgtttcaggagtctcttggctgattaatcatgttgttactcatttggagtaatactaagcccttgaagacttcagggtggtatacctggcattgtccttgattttaaaatatcttggaatctattataagaagattaggatcattagcgaaagtactcattgatggtcaaaatacattaaagagctggaaaaggaaactgtgaggtgtgatctctctctctgaatttttcccctgcttgtttggatgaatgaatagaaggcatatttataaagtttgcagaagacaactaaaacagtttagagggctatgttgatactgacctgtgcttctcttgcttttttatttgctgcttttcagtaaaatatgaaagaatcaaatttctggtgattgctttgaagagttctgtggaagtctatgcgtgggcaccaaagccatatcacaaatttatggcctttaaggtaacaacatcaagtgaatttaaaagtagtattggccattcaagctgcaaccaagagtcagggaatatgtttaaaaagtctgaatgttaaaattgctaatataaaagctatgtgctaatatagcatataactttatcataaaccatttctaatgtaataagcttagttaagctgctttctaagcccacagtgagaaggagagagagataaatgttgggtagacactttaatcgatgtggcaatgtgttcacagaggaaaagagaacagtacttccacccttcagttaaaaaggtgaccttcacctgagtcatggaagcgtgtaaagatttagatgtgtttttgataacaaaactgtgtctatcgggcagttttaagatatatctgttcataaaatactaattaaaaattaaattacagaaattctgatgacaacattatatactaagtgaaaaaagttaaaatatttcatatgattccatttttgtttcaataaaaaactcagctataacatctgaactaatgtacaaattaagatgtttttgccattttgcatgtatacagttttaggaaagtaaatgatggagtacttagtcttaaaattaggactgttttcatttgtgagttcacaaaaatactcatgaaatttacaaatatacctcacattgcctggtgattggctttttagaatagtttttttatattttattgaaggggtaggtttcatttatttgcaaaatttgtgtttttggattgcttactgcttgatttcccagtgaagcaggatagatggagtcacaatattcgcttaaaaaataatattcacttaaaaaataaatccaagtgttactgaataaagagaattggttatacagttatattatcttctgagatctggccttaatatcctttatataccaggtaccgtactagttggttttatacatattaccttatttaaagctgctgtttcattatcgtagtctcgtgaactgtgggtagtgatgtcagtgaaaaatggagaccaccagcacaatccaggctgttgtagcacatacagccttttcaccattttagtctagtcagaaaattagagaccttatgctactagtatgataatagtgatacaattttcagtgtgtgactcctacaactcctctcgctctactgtgcatttgaatagttgagtagcatttttaggaaagtcctcactattttactttgcatgattttctgatcaaggcagccaaaagcacagtaaatgacagagcagaaatcttgatctggaaagggagatttggaacatatcttctggaagaagtgtcttctagatgctaattaacaggcaaaaacgtaataaagactaattttgtagagtattgttgccttacggttgttgccagtgtggctcagtaattgcataactgagtatgttgggtcttctctagtttgatctattagaagtaagttctccggccgggcgtggtggctcacgcctgtaattccagcactttgggaggtcgaggtcaggagatcaagaccatcctggctaacatggtgaaaccccgtctctactaaaaatacaaaaaattagctgagtgtggtggcgggcacctgtagtcccagctactcgggaggctgaggcaggagaatggtgcgaacctgggaggcggagcttgcagtgagccgagatggcgccactgcactccagcctgggtgacagagcgagactccgtctcaaaaaaaaaaaaaaaaaaaatgttctccttcatcttctcacttctcttatggcttctttgcagtcatttggagaattggtacataagccattactggtggatctcactgttgaggaaggccagaggttgaaagtgatctatggatcctgtgctggattccatgctgttgatgtggattcaggatcagtctatgacatttatctaccaacacatgtaagaaagaacccacactctatggttggttgactggcttcattttgttttgactttcttctttactctgcttagtgaactaacacaagcagggattcatttccccttggtgtgggggtgagtatttaaatgatacgcaattttcaatagctccatgctcttagacaagtggaaatccgccttcctggctctgtggagcccttgtgaaaacctcttagctcttgctttgactaacatgggatggatttggggcagttgctgccaggccagaatatccctgggttgggagtggttctcaattggagcccagcatccaatgtttcatgggcctcaggagatatgagtcagtagagtatattactgggaaaaagcagagttggggatatatattgcatgactattctaaaatgttaatctaattgctgtatttatcttcagagatatggtaccagtgcattcactaagagtcttactgagcacttgcacagggctggaaataaccacagacgttcttccctgtactttgttcctgttctctagatccagtgtagcatcaaaccccatgcaatcatcatcctccccaatacagatggaatggagcttctggtgtgctatgaagatgagggggtttatgtaaacacatatggaaggatcaccaaggatgtagttctacagtggggagagatgcctacatcagtaggtatggagaacttggggaaaggcagcatttgtgaaaatggagccgtgtctgagactccatttatttatcatgctgattttgtatgtccttcagaccttttgactaccattgaacagagtagttggcagtagatggtggaaagttagattgtaggccgtggaaatagtcataggtctattttagaacaaaatccaagtaattattttctactttaaaaactctattatcataatctctcatttaatccttaaaacatccagaggaatatcggacatgtttttgttgaccactttgtaaagggagacagagaattggtaaagagacagagaattggtaacgaattggtaaagggagacagaaagggaagttatttgcacagaatgctagagccataactacaaacagccttgtgcatacttttctagtttgcattcagtaataaagaccgatatttgacattttcatgggtttctattccaaaactattttggttttattgtaattaggtcactgtctctgatcactcatgatttctcttccctgccgtctctcatgactggattgataaaaatctgtgcactaaactctaaactcagtgggtaatttttctagataggcgtgaaaggcctaaggaaaatgaaatagatcaaccactgatgcaagtaactacttcacaggataggcaaggtggttacaaaggcagagttccttgaaaacaaatccttaaatgctaggcatttaaattttaaattttaaaaagatttagaagtataaaaatatatttttattaagtaagcaacatcttttcagggctgtttcctcatctttaacggtttgcaatttttccctccccaaaagcatatattcgatccaatcagacaatgggctggggagagaaggccatagagatccgatctgtggaaactggtcacttggatggtgtgttcatgcacaaaagggctcaaagactaaaattcttgtgtgaacgcaatgacaaggtaatagttcccttatggattctttttagttgctctatcttttaataatggcttgttttccatggagtttgatgattaatttccttggagttttgataaaaataatcaaggaactttttaaacgttgctttttagtcatgtttgtgaggattggggaatgttttgctttttgctatgaggggatagagatatttttctctgtagaaattaacatatttgggttttgctttgtatatgtatttttaactctattagatgaccagtctaggctataattagagatagggaagataaaagctgccagttcagttggctggaattcttttgtgagtggaaggaaccgccgtgccatttgggtacatcaaaaggttcctctgacctaatgtgtgtcaagaagatgccccttgttagtctgtgagtggtgaaattgcttcctaggtttgcatgacagaaatgttgcacagtaaaaatcatcttatgcagacataacatacctcctgcaccagagaccccatggcatgacaccccctttgcttttcaaaactggccatatcactccagggacgattcctgtggcaccttcctcccaggaagtcccttttaaactggctttggagttgagcagatagatggccaggggcgttgacccatccctgtttgccaagggagaaggcatcgagggtggaactgatttttactaagcctaccctttctttcttctgcccagtcagacaaaggcatgtctgactacctaaggcaagacaccacgacctttgaaacttggccctgaagaacgtttccaccttttgcgtcacattgacagactagcagtcagcccagttctcagatttaaacatttagtcatttaatgcaagaaagaagaagctacacatatgtccttggcagctggtcctgcttgcccgatacatcccaaacacaaagtcacttcacctctacccactgtcttctgcaaccctacaactcagtttcaagtggagttttgcctacagattatctcccaaatctgtgaccttgaaaatctctacagctcagacctaatccaggattttgtcagcttgttggcttatactttcctaagtatgtttaccatagctgcaactatagcattctttgaatttcaggcatttaaatatttttatcatgcatgtcatgtcctttaagatttattaataaatggcacaaaaattctatttatgggttatatgaagtaattaatacattttttgttgatttttaaaaagaaattaggttgttaaggagtcttccgtgatgctcattgtgttttttaaagacatttatttattagaaggtgttaacagtagaagtggaaagaaataacttcagaaacatccatttttttcctttgttgtctcacaatatgccaacgtgtaaggagttagtagtaacaagcctgagttgtaataaaaattggctgcagatggtcactccttacaaattataaattgataattgccccagaggtttttgtgggttgtttttgtttgtttgtttgttttggtgacggagtcttgctctgtcgcccaggatggagtgcagtggcgtgatctcggctcactgcaacctgaacctcctgggtgcaagcaattctcttcctcagcctcctgagtagctgggattacaggagcccaccaccatgcccagctaattttttgtgtttttagtagagatgcggtttcactatcttggccaggctggtcttgaactcctgacctcatggtccgcctacgtcggcctcccaaagtgctgggattacaggcatgagccaccatgcccagcctttttatttatttatttattttttgagacagagtcttgctctgttgcccaggctggaatgcagtggtgtgaccttggctcactgcagcctccacctcccgggttcaagtgattctcatgcctcagcctcctgagtagctgggattacaggtgtgtgccaccacatggtatttttagtagagatgggttttgtcatgttggccagactggtctggaactcctggcctcccaaagtgctgggattacaggtgtgagccactgcacctggcctcagagtttcttttgaaaaggctctttgggagtctaagcttctcgtacttgacagtgttgaggatgatggtggcttagattccctggctggaagtgcttcatgaccatggtaaccattccctctcttttcttgcttttgcaggtgttctttgcctctgttcggtctggtggcagcagtcaggtttatttcatgaccttaggcaggacttctcttctgagctggtagaagcagtgtgatccagggattactggcctccagagtcttcaagatcctgagaacttggaattccttgtaactggagctcggagctgcaccgagggcaaccaggacagctgtgtgtgcagacctcatgtgttgggttctctcccctccttcctgttcctcttatataccagtttatccccattctttttttttttcttactccaaaataaatcaaggctgcaatgcagctggtgctgttcagattctaccatcaggtgctataagtgtttgggattgagcatcatactggaaagcaaacacctttcctccagctccagaattccttgtctctgaatgactctgtcttgtgggtgtctgacagtggcgacgatgaacatgccgttggttttattggcagtgggcacaaggaggtgagaagtggtggtaaaaggagcggagtgctgaagcagagagcagatttaatatagtaacattaacagtgtatttaattgacatttcttttttgtaatgtgacgatatgtggacaaagaagaagatgcaggtttaagaagttaatatttataaaatgtgaaagacacagttactaggataacttttttgtgggtggggcttgggagatggggtggggtgggttaaggggtcccattttgtttctttggatttggggtgggggtcctggccaagaactcagtcatttttctgtgtaccaggttgcctaaatcatgtgcagatggttctaaaaaaaaaaaaaaaaaaaaaaaaaaaaggaaaaaaaaaaagaaaaagaaaacgtgtgcattttgtataatggccagaactttgtcgtgtgacagtattagcactgcctcagttaaaggtttaatttttgtttaaacctagacgtgcaacaaaagttttaccacagtctgcacttgcagaagaaagaaaaaaattcaaaccacatgtttattttttttttgcctacctcattgttcttaatgcattgagaggtgatttagtttatatgtttttggaagaaaccattaatgtttaatttaatcttaataccaaaacgaccagattgaagtttgacttttattgtcacaaatcagcaggcacaagaactgtccatgaagatgggaaatagccttaaggctgatgcagtttacttacaagtttagaaaccagaatgctttgtttttaccagattcaccattagaggttgatggggcaactgcagcccatgacacaagatctcattgttctcgatgtagaggggttggtagcagacaggtggttacattagaatagtcacacaaactgttcagtgttgcaggaaccttttcttgggggtgggggagtttcccttttctaaaaatgcaatgcactaaaactattttaagaatgtagttaattctgcttattcataaagtgggcatcttctgtgttttaggtgtaatatcgaagtcctggcttttctcgttttctcacttgctctcttgttctctgtttttttaaaccaattttactttatgaatatattcatgacatttgtaataaatgtcttgagaaagaatttgtttcatggcttcatggtcatcactcaagctcccgtaaggatattaccgtctcaggaaaggatcaggactccatgtcacagtcctgccatcttactttcctcttgtcgagttctgagtggaaataactgcattatggctgctttaacctcagtcatcaaaagaaacttgctgttttttaggcttgatctttttcctttgtggttaattttcctgtatattgtgaaaatgggggattttccctctgctcccacccacctaaacacagcagccatttgtacctgtttgcttcccatcccacttggcacccactctgacctcttgtcagtttcctgttcctggttccatctttttgaaaaaggccctcctttgagctacaaacatctggtaagacaagtacatccactcatgaatgcagacacagcagctggtggttttgtgtatacctgtaaagacaagctgagaagcttactttttggggaagtaaaagaagatggaaatggatgtttcatttgtatgagtttggagcagtgctgaaggccaaagccgcctactggtttgtagttaacctagagaaggttgaaaaattaatcctacctttaaagggatttgaggtaggctggattccatcgccacaggactttagttagaattaaattcctgcttgtaatttatatccatgtttaggcttttcataagatgaaacatgccacagtgaacacactcgtgtacatatcaagagaagaaggaaaggcacaggtggagaacagtaaaaggtgggcagatgtctttgaagaaatgctcaatgtctgatgctaagtgggagaaggcagagaacaaaggatgtggcataatggtcttaacattatccaaagacttgaagctccatgtctgtaagtcaaatgttacacaaaaaaaaatgcaaatggtgtttcattggaattaccaagtgcttagaacttgctggctttcccataggtggtaaaggggtctgagctcacaccgagttgtgcttggcttgcttgtgcagctccaggcacccggtgggcactctggtggtgtttgtggtgaactgaattgaatccattgttgggcttaagttactgaaattggaacaccctttgtccttctcggcgggggcttcctggtctgtgctttacttggcttttttccttcccgtcttagcctcacccccttgtcaaccagattgagttgctatagcttgatgcagggacccagtgaagtttctccgttaaagattgggagtcgtcgaaatgtttagattcttttaggaaaggaattattttccccccttttacagggtagtaacttctccacagaagtgccaatatggcaaaattacacaagaaaacagtattgcaatgacaccattacataaggaacattgaactgttagaggagtgctcttccaaacaaaacaaaaatgtctctaggtttagtcagagctttcacaagtaataacctttctgtattaaaatcagagtaaccctttctgtattgagtgcagtgttttttactcttttctcatgcacatgttacgttggagaaaatgtttacaaaaatggttttgttacactaatgcgcaccacatatttatggtttattttaagtgactttttatgggttatttaggttttcgtcttagttgtagcacacttaccctaattttgccaattattaatttgctaaatagtaatacaaatgacaaactgcattaaatttactaattataaaagctgcaaagcagactggtggcaagtacacagcccttttttttgcagtgctaacttgtctactgtgtattatgaaaattactgttgtccccccacccttttttccttaaataaagtaaaaatgacacctattttatgtggcatgagtttcgaatatgttctgacccttcagaatgtttccttcctgtgaggatccatattttatgcatacctgcctaccctgagcttcccgtaccagagcaggctcctgtattttgctatttcagatgacaggggcttgcccaaggccaggtatagattacaaaagtagcaaatgtttgtctaaagacctcagagatgaagtgggagatgaacctccatcaccaggttcctgaagacagtatggagtaaagctggtccttaaagaaatgtcacatttttgcagttttgaatttggatcaaaaaatacaacagcatgatgtctgtaataggtcaattaaagtagctctttctcagtttggtgcataaatactaacttgggtttaataattggagccccttcaatgtaaggtcattgtgtcttcagcgctggggttccccatcaacccccccataggcctggtaggcatgatcgccgtcgggcaaatctggggccatgctctcagtgttggcacctcgccttagtctccagggctgcccgtgctgcatcatcatcaattaggcatattaataaaccacttcgtgtttcatcctagaaacatgctattctctctaaagggaaaatataactccttaggctgtcagatgagtaagtttttttttttcctacttggtgtgttgcagttggtggatgattatgaataaaaatctggtggagttttcttgggaccatcatgcaatc

SEQ ID NO: 7719 - DNA, 654 bp, Homo sapiens
aattcttcctgaaacagtctcatctttgcctctgtcctgcccagcttctttgctgttatcttgttcactatttcctaagggatacatagcctgcatattagccgagattgtttctcaaatttaaccacttattaaatttaaactctgctcctcctgaactaccaaacatgctggcacagagcaagcactcagagtccctggctgtttgcttaagtagcatgaaataactcctatgttaatccaagggaaaaccagcctgcctgtgcagtgtgggacgggcaaggaagtgctctggtcttcctcttcttccaggtcttccttccaggaagtgctggggaagtgtagtcccaggagggctgcagagctccattgcactgggcatgggccatcctgtcccataacaggttcctagtacttaccagtccctccagctggagcttgggtgctggaataacactgcaaggactcttgatttctgagaccaatctagtttgcttgtttctaagaaatttggattagatattccagcacaaagtgacttttaaaaaatactcatttctattttggccaaaagtgtaaaattcaggcaagttactcaccagagttctgtggagggatgcggacagagctgaccaaggccattctgctcttacc

SEQ ID NO: 7720 - DNA, 511 bp, Homo sapiens
ataaataaagatggcatagccattaaagttgtagtttttagatactagagcaggagcatcattcattttatgaccccatctccacccatgggaagctgatgagttttgtgtattgaattcgaagagcagagaatgggggaaaaggagattcccccattgaaaacctagataatgagagaggcggaaccaaaagcagactcagaacttcactgagaataatgggggtgtagtagtcaggtgagagagactggactaccaaatcatcgttgctatccagttattccagatgaaagatactactttacatttcttagggcatcatttttaagtgttggctttcagattaaatactagttgagagtggtgggaagacccagaaggaatacttaaactataataaatatgtactttgtgtatccattataaatatgtctaacatccctgatagctttaccctaagctttcttgtttaatggttaattttagtgtcacaaataaagtttgtgttaat

SEQ ID NO: 7721 - DNA, 9740 bp, Homo sapiens
ttttctgctacaggattatagctggacagacatccgctgcccctttgaaaaacgaagagatgcagcatgcgtgttttgggacaatgtagtatacattttgggaggctctcagcttttcccaataaagcgaatggactgctataatgtagtgaaggatagctggtattcgaaactgggtcctccgacacctcgagacagccttgctgcatgtgctgcagaaggcaaaatttatacatctggaggttcagaagtaggtaaggacttcttaagtattttggtttggggcatatgctttaaagccaagtatcttggctttcatatttaaataaacagctggtattatttgtccagatactttcttggtaatttaaatatgtgtttgtcacattttagagctcatctccctgaaggtttatgtcgttgctttacaaaccattaaattacagaactttagcttcctagattaatggcccattttttttatcataatgaagcattagttgacattatctgaattatagttctaaattatttgggctgcataatattatttgttttaaagatttcagagttcaacttatagactctttaagaactcgttactatattcaggcttttaaaatttgtattatatttgctttctttttattagaaaaaagaatgctctttttcatttgttttattctttaagtttttaatgactgtagtggtatttatgcttattgagcagaatgggatgtgggtgtggatataaaaaccttattggatagtgtgttagtgtccagtagtgctctttttctaaatgaataatttttctaaatgaataggtgcaggctagatacataatagcttttgtatgctttcattttcaagtaatttctttagcttaaataatgggctaataaagaaaactagggagaccgtaaatggttatacttttggtctgcatacttatgtttttaccctcaactatatgtcaaatgaatacaagaaaaatcactatttcctaaatgtaaccatttcctctctttaaaagcattcttcacagactgttataatgtagaatatttcaaatacaataaatcctaaagatgatagacggtaactgttctgtggtactgcagataacttcatttcttcagcctttgctaagtgtgtttttagcttaagtagtagtttttttttaatctactatatactatatattttcctatagtgtccacccactgaacctaccaaatcaggaatgtttaaaaagttaaaaataagttatttttggtcatgaccattgcttcttctagttgttattttctgatctttacttttcacagaccttagttgcaacgcagaattataaaggtgttgtcgtttttaaatcatttgatattagcccagaatggtgggagatgagaaatagtttggtaacttctaaaattttttgtccttgggaaggaaaaaaaaaagcacttaaactttaatagtatcatttctaaaattttttattgaactcctacagtgtgtagaagtttcaaaacatgatgaatgtatgttttgcctttaaattgtgtaatcaaaatacatcagaaatatacatcaatattttgagaatatactcaagcagggaccagtgtgatttcaggatataccacactaactgagaatagttaggaaatataattttgttaatggtgctgtagctattccagaatattaaataagaatatgatcagatagtagttttcatattttaaggtatgggtctaccatctgtaaggaactattatgcttttccactttatataaacatttgaagtatggataattcccgtcatgcataatggggcttgaagacatatataaggcttcttatttaatttttcttttgaaatcaaatttatttttctaaagtttaattaccaataaataagtatttccaacagatccttttaaggatgttttccagggtctatacaaacaggattattagcgttttcttaaactattcctacactttgttgttgttgattgagtatgaaaatggccgtatgaccctaaattcttccttccttaactaataagatctacagtcagttctttccaaacccccgcacacactaaagttaagcatgatggggcctttttcttttacaggaaactcagctctgtatttatttgagtgctatgatacgagaactgaaagctggcacacaaagcccagcatgctgacccagcgctgcagccatgggatggtggaagccaatggcctaatctatgtttgtggtggaagtttaggaaacaatgtttctgggagagtgcttaattcctgtgaagtttatgatcctgccacagaaacgtatgtatctatttaaaatttattttacagttaactgtattctataagctctgtaggagatgtcaaaagaccagaggaacccaacagaagaattttgtccttgagtgaagagtgtatataaacttttgagtgtgctagggtcagtggcatatttatgacctggacctttcccttacaccagaaatggcttgaacttacaccccatgggaacctctttctttctggttctgcgtgcaataaatgcctatgaatgagacacatctgattgattcgtcaactcataaaatgtttttgtttgagcggtcaggaaatgtagaggaggaggggggagtttatgaccagcaataaatttatccttaagtagaaatattagatattggctcatggcattaataaatcatgcctccctagttctttttaggtgtaaacttcctaagtacatttagattcatgtttattaaataaaattattcttaaatcaactgcttttaaaaaggcaaagtgtgtcaaaaaggtaaaatgctaaagaaataactggttagccagtttttctgaccttgtagttaatgatggaacacattcaatgtagccaaaggaaatgtgctaatcattgaataatggagagggcatgagggcacgggttgtgagtagtgacattaaagctgatgaggacataaaacagatgataccctagtcgtaccttttatggaaacatccaaagagctttgataagaaaagtcacttgatcatatggctggattgcccatcgttcttcccttactagaacaagttactgggtgaatacgttcactaaaatgctatgccagagttgcatcaaaactctcgtgcttaaagttttatatttaggaaatattgccaaactacaaaacatggaagtcttcaactccagctactgctttttttaaaattaagaaataagatgccaggcatggtggctcatgcctataattccagcactttgggaggctgaggcaggcagatcacttgaggtcaggagtatgagatcagcctggccaacatggcaaaatcccgtctctactaaaaatacaaaaactagctgggtgttgtggcgcgtgcctgtaatccactactggggaggctgaagcaggaaaattgcttgaacctgggaggcggaggttgcagtgagccaagattgtgccacagcactccggcctgggtgacagagcaagactccatctcaaaaaaaaataaaaaataaaaaaataagagcttaattataaaatatgattaattatgtgcatttatctatgattcccacatatttttaaaagatttaaggaagcataatcaataacttctttccagtgcaaataatagaaaagcaagttgtcttgaaatttgtcttttgctaaagatgtttaccaactttgctcccttttatgtgaacctctaccttacttcccataaaccctaggctcaaaaagtgttacagcatactagttggaaaactgattcattctgctaattattttttatttctaaaaaatctcttaaaagagaagccataaccataaaaactctaggtttctaaatttttacatctttattcaggcactatcaatgtaaattaatattgattttttacttacttttttgttcaaagtaaaaatataaaggagttctgcagcttctgtattttttaaaactaggtgaatattcagtttcaggaatatttaaaaacttacaagacctagcatttctttcattttatatatattgagcttaaatttgaattctctatgttcccttcaatgcccttaaattttcacaaatgaaaagctagtgtgaatataattatccaactctcaaaataaatgttatattatttccttttaaaaatgttacctagtccaggtgtggtggttcatacctgtaatcccagcactttgggaggccgaggctggtggatcgtctaaggtcaggagttcgagaccagcctgaccaacatggtgaaactctgtctcgtctaaaaataccaaaaaaaattagccgggcgtggtggcgcgtgcctgtaatcccagctattcaggaggctgaggcaggagaatcatttgaacccgggaggtggaggttgtagtgagctgagatcgtgccattgcactgcagccagggcaacaagagcgaaactctgtctcaaaaacaaaaacaaaaataaaaacaaaaagttatctagccagccaagttttttttaataagaatttcttcccaattttgacattttaagtgtttgataattagaatgtgtttaattggaagctgaaaaactaagcctatggaccatagaaacacaaataacacatgttgtcactcatgtgggagctaaaaatgttgatctcatggaggtagagagtagaatgatggttatcagaggttggttaacaagtacagaaatacagttagataggataagttctaatattcagtagtacagtagggagactatagttaacaataatttattgtatatttcaaaatagctagagaagaattggaatgttcccaacacaaagaaaagatattcctcagcagcaacatgggaggcctgggttccttccctagcccaaaaagaaacaaaaggaaagataaatgtttcaggtgctggatatcccagttactctgacttgatcattacacattgtatacatgtgtcaaaatatcacaggtaccataaaaatatgtacatgtattatgtatcacatttttaaaatcagttttaaaaaagatggagaggagcagaagctcataataaagtaactgaagaaagaaagaaattatgtctatggaaacaatgtgacacagtttgagcggtcagaattttaagaaatgactttttttttttttttttgtgagacggagtctcactctgtcaccatgctggaatgcagtggcacgatctcagctcactgcaacttctgcctcccaggttcaagcgattctcctgcctcagcctcctgagtagctgggattacaggcgcacgccaccacacgggctaatttttgtattttcagtagagacggggtttcaccatgttggccaggatggcctccatctcttgaccttgtgatctgcccaccttggcctcccaaagtgctgggattacaggcgaaaaaacgcttctaaacattaaacttcagattgcagatagcggggacctagtatgtactctgcatgtgaattataggaggaaggggaatttgtgaaagttttttctaaaccttcaggagatttagatatacataaagacatgctgtctttttatatcattaacattatatttggagaagaaagtggtatgtaaatggaatttttccaagtcaaatactgtgttttaatgcatgatgatagctgagtctataaatctcactacgtgcagggcagtgaagacctagtttttactgctgtcccacttccgagctgtatgccggtcacttcacctggatgagcgtgtgtgtttttcctaaaaacaggagccatgctgtccacctcaccttaacagagaactttgaaaatgagagtggtgactgtcaaaccatttttaaaacaatacataaatgtaagacaaaagaattgttaatacttcagagttaatcattgtgccttaattatgttttataaagttgaattcatcaaattgttttttgttttttgagacggcgtctgcctctgtcgcccaggctgcagtgcagtggcgtgatctcagctcactgcaagctccgcctcctgggttcacgccattctcctgcctcagcctcctgagtagctgggactacaggcgcctgccgccacgcctggctaattttttgtatttttaatagagacggggtttcaccgtgttagccaggatggtctcgatcgcctgacctcatgatccgcctgcctcggcctcccaacgtggtgggattacaggcgtgaaccaccgcgcccggccggccatcaaattattttaaagaagagatataaacaataattatagagagttactcttatgccaagtttcccttttgttgttgtccttactgttgtttggcgtctcttggtttaagttagctgctgaaagcacaagcctgtgtgccagtaccaccttcacaatcacaaatgtcagtcttgggagtgtatgcagaagaatgtattaaatctcagaaaaaaataactaaactcgattgtctgtgtatatatgcataatgctgcaacctgtgaattaatatcctttaacacttgggtccacatttatattctcagtttcattatttatatattagtggctgtgaacagagcaacatgaggtattaaacttgacagaatgatagtacttttttgttaccagagcagcataaagttcttagtgtagatttaaagatggacatgtgaatagtaacagatactattaatttcctgattgcctgaggcccattataagtttgtgttttacttacgcatatataaataataattaaagctaggtgtgatagaactagttaatatttcctgccagcagaggtgtgaagaaagaaaaaagaattatttatcttcgaagcatcttcctcttcttttttgttcccatattacaagtttttatgaacctcaggaaatggatttcctctaaaaacgtgttttttaatagatatcctcattttcttatatcctatcagaattgaaaggaataaaatccatgttttccccgtgtattaataaattacccataatcattgttcaacttttgttttctacccttctagacattttgtgcgtatatgtacacatatgtgagtagtaaatgagcacttaattagaataatagacctttctcattagtatgagttcttttacttcctgtaaacaagcacactaaaaactttaattttttcagatggactgagctgtgtccaatgattgaagccaggaagaatcatgggctggtatttgtaaaagacaagatatttgctgtgggtggtcagaatggtttaggtatgtgatgttaattcactgttccactttcctgatgagtttgctgatacttccttaaattattgaagcatttttaaaaatctagatagaagcatttaccatgtatattattatatctatttttatagtttctgggaattaacatacttgataaaatatcgcaggatgttaaacattcctgtttatgaaatgtcgcagtagtcaccagtcattgtgacaattttagatggctcctatacattcccagatacctcctggggaatgatgtcgcaccagcttaagaactattgagcaatagaaatatttgaactttaaaaaacctttaaaaactttttaaatacaagttttaaggcttgtatccaggtcctaaatggtaaagtttcctaaatatttttaaacattgcatgaaaatatcaatattgtaatttttaaatgactaaatttggcattttgttttcataaataatgtactaaagaatcttaaataattgtcttaaatgaaagggagtcggaactgaatctagacacaagcttcaatttagtcagtactttaagcatcacttaagtgtaccagtaacttcttttccttcttctgtccctgtccattgctattttccataaagtgctaaaaggaggaaaaagaaggacatttgagtaattataatcaaagttaatcagaggggaaatcaccgattggtttattttgcatttttccagaatagataaaacatgtttaattttgtagaaaaaaatcaatatttaaaaagaaatattaaatgtctattgtgttaagagtaagaatttaggtggtggctatgtggacattcactgtaaaattattacagtttttctgtgtgtttgacatttttcacaataaaatattggaaaaatacaaaaagttattactttaagaaaccttagaattgttgatatagtttttcatgttgttcatgttttattcttttgaaggtggtctggacaatgtggaatattacgatattaagttgaacgaatggaagatggtctcaccaatgccatggaagggtgtaacagtgaaatgtgcagcagttggctctatagtttatgtcttggctggttttcagggtgttggtcgattaggacacattctcgaatataataccgaaacagacaaatgggttgccaactccaaagttcgtgcttttccagtcacaagttgtttaatttgtgttgtcgatacttgtggagcaaatgaagagacccttgaaacatgaaaaatgagtggacttcagactcatcagagactctaaaatatagccaccagtgctttgttccaggagtttggtgacaaagttttggtttggtgttttggtaaagaaagtttcaagtgaaatgaggttcctataaaatagatgtttcttttatatggatttccttaattcaaagatcatattttagctggccacaaaaccaagaacatatctagcaagaaaacttgaaaaagtataagcatttgttaaaaatgtgaatttcttgaatgaatttcacatttgtaactatgattttggcagaatagaagattggctcatcagtgaagcgcagtatcttagctctagattctattttcatgcatcacagaagtgctatacggttaggtctgtttgtgctcagtcaagaactaagaaatagtatgaattgtaagtcaagatgggcaactcagatggagcagcttagtctcacagtttgcttgtctatttattttatttagtgccaaatgtattccattttaaaagtaagccagagtgagtcaaggcatatacacactttctcacaaaacttcctaaacagatttgggggtttaatatgtccaactcctcatgaaatatattcaatccacttaaatatattccatctttttaacataaaatgtaaagcttagcacccatcattaatttatgtctctgttttatccagtggttaaaaaaggattctgcctctttagtcctcactgttaaataaaacccaatcatagtaagtgattaactagcaaaaagtaaagctatttatagcaaatttctagatcattagaaaagcactggtagttgtacaatatcagtgttgactttgaacttctttaacgagatcatgaattcttttcccttagccaaaacatgaaatatttaacctagttgtctctaaaagttttgtaatcatgagttagatatatgtcatctcctattcattgcttttatgtgatcaataaatcttttacaaacccaactactcatttccttcctagtaatactttgcctttttcactgtgtatggaatgaaacatgtaaagctgtcacaatcaatgtttttatctgataatattaaatattttttaacttaaaatag

SEQ ID NO: 7722 - DNA, 2636 bp, Homo sapiens
gttcaacttttgttttctacccttctagacattttgtgcgtatatgtacacatatgtgagtagtaaatgagcacttaattagaataatagacctttctcattagtatgagttcttttacttcctgtaaacaagcacactaaaaactttaattttttcagatggactgagctgtgtccaatgattgaagccaggaagaatcatgggctggtatttgtaaaagacaagatatttgctgtgggtggtcagaatggtttaggtatgtgatgttaattcactgttccactttcctgatgagtttgctgatacttccttaaattattgaagcatttttaaaaatctagatagaagcatttaccatgtatattattatatctatttttatagtttctgggaattaacatacttgataaaatatcgcaggatgttaaacattcctgtttatgaaatgtcgcagtagtcaccagtcattgtgacaattttagatggctcctatacattcccagatacctcctggggaatgatgtcacaccagcttaagaactattgagcaatagaaatatttgaactttaaaaaacctttaaaaactttttaaatacaagttttaaggcttgtatccaggtcctaaatggtaaagtttcctaaatatttttaaacattgcatgaaaatatcaatattgtaatttttaaatgactaaatttggcattttgttttcataaataatgtactaaagaatcttaaataattgtcttaaatgaaagggagtcggaactgaatctagacacaagcttcaatttagtcagtactttaagcatcacttaagtgtaccagtaacttcttttccttcttctgtccctgtccattgctattttccataaagtgctaaaaggaggaaaaagaaggacatttgagtaattataatcaaagttaatcagaggggaaatcaccgattggtttattttgcatttttccagaatagataaaacatgtttaattttgtagaaaaaaatcaatatttaaaaagaaatattaaatgtctattgtgttaagagtaagaatttaggtggtggctatgtggacattcactgtaaaattattacagtttttctgtgtgtttgacatttttcacaataaaatattggaaaaatacaaaaagttattactttaagaaaccttagaattgttgatatagtttttcatgttgttcatgttttattcttttgaaggtggtctggacaatgtggaatattacgatattaagttgaacgaatggaagatggtctcaccaatgccatggaagggtgtaacagtgaaatgtgcagcagttggctctatagtttatgtcttggctggttttcagggtgttggtcgattaggacacattctcgaatataataccgaaacagacaaatgggttgccaactccaaagttcgtgcttttccagtcacaagttgtttaatttgtgttgtcgatacttgtggagcaaatgaagagacccttgaaacatgaaaaatgagtggacttcagactcatcagagactctaaaatatagccaccagtgctttgttccaggagtttggtgacaaagttttggtttggtgttttggtaaagaaagtttcaagtgaaatgaggttcctataaaatagatgtttcttttatatggatttccttaattcaaagatcatattttagctggccacaaaaccaagaacatatctagcaagaaaacttgaaaaagtataagcatttgttaaaaatgtgaatttcttgaatgaatttcacatttgtaactatgattttggcagaatagaagattggctcatcagtgaagcgcagtatcttagctctagattctattttcatgcatcacagaagtgctatacggttaggtctgtttgtgctcagtcaagaactaagaaatagtatgaattgtaagtcaagatgggcaactcagatggagcagcttagtctcacagtttgcttgtctatttattttatttagtgccaaatgtattccattttaaaagtaagccagagtgagtcaaggcatatacacactttctcacaaaacttcctaaacagatttgggggtttaatatgtccaactcctcatgaaatatattcaatccacttaaatatattccatctttttaacataaaatgtaaagcttagcacccatcattaatttatgtctctgttttatccagtggttaaaaaaggattctgcctctttagtcctcactgttaaataaaacccaatcatagtaagtgattaactagcaaaaggtaaagctatttatagcaaatttctagatcattagaaaagcactggtagttgtacaatatcagtgttgactttgaacttctttaacgagatcatgaattcttttcccttagccaaaacatgaaatatttaacctagttgtctctaaaagttttgtaatcatgagttagatatatgtcatctcctattcattgcttttatgtgatcaataaatcttttacaaacccaactactcatttccttcctagtaatactttgcctttttcactgtgtatggaatgaaacatgtaaagctgtcacaatcaatgtttttatctgataatattaaatattttttaacttaaaatag

SEQ ID NO: 7723 - DNA, 546 bp, Homo sapiens
ggcatatcacagcagaggcaagaaaggctgactaggaccaaggaaaataggactttatacatggatgtgtccacatgtgtacgtgtgtataatgagagatatatcaaaatttaagaaatccttctacccatatcttttccaggctttccaattttccgcatttcacatctcagcacctaagtataagaacttgcatggaatagatactcagtaaaacttaagtgaattaaatcatatttttagggtaacagctccctgaccctgcccacacacatataccgtcccatctgtgactctactgttatttgtccatcttcttgctaacatgagaactgcatattcctctagatttccctgtagatttccctattgcagggagcaataaatagcactgccttcacctgcaagcccaggttggaactagtttcatcactagggtaatgcccaacagtcatagccactgagctgacaagactgacttcccatctattcttccccaccccaccccccgccaactacatacagtatctaggtactataatcagc

SEQ ID NO: 7724 - DNA, 282 bp, Homo sapiens
aattgttttttgttttttgagacatagtctcactctgtcgcccaggctgcagtgcagtggcgtgatctcagctcactgcaacctccgcctcctgggttcacgccattctcctgcctcagcctcctgagtagctgggactacaggcgcctgccaccacgcctggctaattttttgtatttttaatagagacggggtttcaccgtgttagccaggatggtctcgatcgcctgacctcatgatccgcctgcctcggcctcccaacgtggtgggattacaggcgtg

SEQ ID NO: 7725 - DNA, 5138 bp, Homo sapiens
tgcaaatgcagcttcaactgcagcatctagtgcagctcagaatgctttcaagggtaaccagatttaagaatcttcaaacaatacactgttaccttttgactgtacctttttctccagttactgtattctacaaatatttttatgttcaaaacacacagtacagacagcatggatatttcctgttcacttgtgcatgggctaaaaccaggaaaacttccttgtcttattactttacctaatagtttcttaatatttcagtgccccttgcagaaaaaatattacatgctaaataaatattctccatatttttgggggatgacattcagtgaattatttcagtggtgacccactgaaaattaataatggtacttatgattaaaaacgcatttaatactaactgcagtagttctttcaagaatctttagagataaggattgcacattggaaaagtaaaccatgtttcattcctttttccctatttatattgaaagaaataggccagcagagacttagggattttaaattggcttgctttttagctgtttcagtcaccagtgaagagcctatgtgcattttgtagtagataatgtaaaatttgtcatctttttcttttcttttttttagaatagctgatattttgataacaatctctaatttgcatgggcaccacatttcttatattaaaagaattagtgttttggcttctgtactgcttatggttgtaggattcaggggttaatggaatcacagaaatgatattctgcaagaatttcttttaaataaaaagtttgggggtgcaatataagaagtttatataatatgcagtacattatccaaaagagaaggtagttaatgcagtagaaagtagtggtaataattcctttttaaaaaaatttcggtagtcatatagtaacattttgctatatgaaaactttggtatattctgtggttacaactaagattgtgtctggcagctcttttttggggatgtgtgtgtgtgatttttaacagaggtattaaaggctagcctaactgttgtctaaaaagattgtacagtatttaagggattttccttttagcttttcatctccagtggcattaaacataaaaagaccctggcattttttcacatacttgaatccctaaatgcacctgtctttcactttttgagacagactgaatatatctaaaatttccagcaataaaaaaaaaagcatttaacttgcaccaagcaagaaaatataaatacagttaactgcattaagataatcacgttaaaattgttactatgcagcacagaacttcattcttatagtattcttgggttcaacctttgaatcaattttaccactgattaaataaatgactcaaagacatctgtaagtcatgctgctgtgttttgaaagtctttaactaaattaagattgcagaatgatagtgattattcaattagattttaagtaaggattgtgatattagaggctggaaatccttattttttaaaaaatcagataggcataaatagttaaatcactttcattctccccaaacctgtagttacagaaaaagttttatgctagaggtgggatgccaagttttcactatccatgaagcagcgctgcatgtcactaggtaacacagatccatccagatggtgtttacatttgatttatttgggatcttattgacatcaggtatacttggaagacatttcttttattcttcagcgtatgaatttaaagctattttttgtaaatatttctaatcagcgataatttctacctatgttctcaaccaacttagccagtttgtttttcagagcctgtagtcttattggaaatctattttatcagtgtgctttattgagtgtggattttgcatacattcaaaacattaaccacaaaatacagcaagtgcacctatattcaccattaacttatatcccaagtccattttttcctgtacactacaaacaaaagatatattagagacttttgaaaaatgctgaaatactttgcttcagaattggaatgtttatattatgtagaaatcttcaaaggtagcattattaaatagcaaagaataattagaacccacatatctttttttgtgtggatggggaaaatgttttaaaatccagttatttaatatgagtttgagagagaaaattgttttttaaaaatatatgtgcattgaaatgatggcaatgcttatagtatgatcaagtatgaaaggaactttaaattcttatatttacttttctctcagtaaattgttaaattttcactcagcaaaagattggcatttgttaagtgttctatatttagtactaaaatcacagtcatgaaatcatagtcataaaatggtcttcacacagcagtcatccgtgtcatttatcattttgtaatattaaattatggcaattttatttcaaactaaagtttgaacaccggaaagtcattactcagtgatttgtaatttgggacttggattatttatctagagatgtttgtatattttgtcagtaactaatactgcgctgccatcatggtgactgtcatggttctacagaaatgccctccatgtgtccctctaatgttgcatgtttcagtgggttggaagttttgtatatttattgtattaacacagagtgtcataaaataaaatgctgtttactggatgtttgtttgtataattttgaacactataatagcaattcagagacagacattgttaaaggtttgatgtatatagaaattccatgtttgattttttaaaatatgtgtataagtctgtcatgtgctaaacaaaataatatgaaagacctagttaaaaattctaaccaatgtaaaatgaccatttttctgttgcattagacctttacaggtaatggaacatgagcttcacccatattaaatattttggcccctttaaggtcaaaatacagatcatctagaagttagattcaaaatggaaaacctattcatggctcagatttttcattgtgggttaaaaatgggtgtctctgtactagtattgtatttattcaattgaacttgtattctgatttctatccttgctacctattgctgttttatgtactgatgaaagtacctatttgtgtatattggatttttcacttggttagctaaagaagatgtaaaaatatctaaaataatgttcatggtgaatcttattttgagaaatacatgttaaaaaaggaacagtattctttattttctgggtgttatatttaaaaaagcaagtttggatttttacacctaatttactaggaaaatattttattctgtaattcatgttaagattatgtatggtttgcattttaaggggatttatgttaggttaattagttgtttctgtaaatcatttgtaatagcatagtgctttttactcattgctgtatctttttctgaaaacactgttgttaacatctaattcagtatccttattggtacaaatctgtgtttggcatgactgtttatatacagaatttgttacattttgagcattttttcccctgcttatgtataccttagagttaccatggctgtcatataccatttcactatatctcctttcagtttttccttaaggaaaatgtttagaggaatttgttcatttcatgtgattaagccctttagagatgaaataagattggttaattttaaaaaaattgaggatggttaaaaaatagaaaacaccttactttgatacattttaaagtacaatagtatacatttatttagagtagactaatgtgtttaaaacatgagttgttttaaatacttttttattgagctaaaaagttttatctcacatattaagtattacagaaagtgaagtattttggctagaattttagggcatattttataaagcagcatgcctgtaatattggtgggtatttttaaactttaggactttatcacagtatgtagagagctagaaataaatctagaaactttctaagccaggtattgccactaacctgtcttatataagcagatacctcttatttgaagattgtaggaaaatagagaaagactgttctccagttttctcacccccgctgtgggttttatatttacaatttaactttggggtttgggtaagacaaacatttaatgtataggattttggccaggtgtggtggctcacgcctgtaatcccagcactttgggaggccaaggtgggcggatcacgaggtcaggagatcgaaaccatcctggctaacatggtgaaaccccatctctactaaaaatacaaaaaaaaaattagctgagcatggtggcgggcgcctgtagtcccagctacttgggaggctgaggcaggagaatgacgtgaacctgggaggcggagcttgcagtgagccgagatctctccactgcactccagcctgggcgacagagcgagactccatctcaagaaaaaaaaaaaagaattttcattagtgctggccgtgtttcaaatggcaagggaacatgggaactatcatgtggcaatgtagtgagtgttaaactttgtgtttgtccaaatcctgatttatttttcagttcatatctttctgggcttgacatggctgatggtgtagctgaaaccctcctaacactaaaagccatttaatcttttctgtaataggagcagaaaatagttaatcatccacctagtaatataagattactgtgaatattatcttctatacattaaaacagttctagtttgtagaataataccatacaagttttatttttaaattctagttattttcagtgcttacttaaatgtaattctagaattcctccacaacttttaatattttgtatgccagtgattctcaagataaatcatgattgtagtagttgttactgttggcagtttgtagtagtattcaggtattttggggatgggggaaaacaccaaaaatcagtgtcttttatctggtgatcactgtggtatctacagtattctagtctcctgcacaaaaactgaacccactgggcctatgcatccctcacactttttttctagtataaaagcaatacataatgtgttgtagaacaattaaaaattcagaaagtgatacatgagaaaataaaaataaatccttaattctgtca

SEQ ID NO: 7726 - DNA, 5138 bp, Homo sapiens; identical to SEQ ID NO: 7725

SEQ ID NO: 7727 - DNA, 704 bp, Homo sapiens
atgagacgtttatatatatgcagccattttccaaaagaaaagggtagtaatgcagtacaaagtagtggtaatattcctttttaaaaaatttcggtagtcatatagcaacattttgctacataaacactttgggatattctgtggtcacaactaagattgtgtcgggcagctcttttttgcggatgtgtgtgtgtgattttcaacagaggtattaaaggcgagccctaactgttgtctaaaaagattgtacagtatttaagggattttccttttagcttttcatctccagtggcattaaacataaaaagaccctggcattttttcacatacttgaatccctaaatgcacctgtctttcactttttgagacagagtgaatatatctaaaatttccagcaataaaaaaaaaagcatttaacttgcaccaagcaagaaaatataaatacagttaactgcattaagataatcacgttaaaattgttactatgcagcacagaacttcattcttatagtattcttgggttcaacctttgaatcaattttaccactgattaaataaatgactcaaagacatctgtaagtcatgctgctgtgttttgaaagtctttaactaaattaagattgcagaatgatagtgattattcaattagattttaagtaaggattgtgatattagaggctggacaatcccttattttttaaaaa

SEQ ID NO: 7728 - DNA, 521 bp, Homo sapiens
aggacagattgctgagttaaagggtattatgcatagtttttaaagcacctttcatgtgctttgccaagttgctctccagaaaaattttatccatatgtaactccatcagcaatgtacggaaaggcctctttcttcacatccttggccagcattggatgttccttttctaaaaagtcttttatcccaatagattttgacaaatcaggtttcttttctgagcattctggtttcacatggcttatgtgctcacccaatgctaccggtttgtttgtttgtttttgtttttgctaaataggagtaactgagtaccctgcatccactgagaaatcttctgcttcctgaaagctctaaggtaaagataattagctgaatgctctgttataacaggatggaaaaagaaatggtggcctcaggtagccaatccactgagtctctccaggtaaaattacactggtttcgacaagttatgttacctttcatagaatgtaattttaaaatgatattagtctgggtgggtagta

SEQ ID NO: 7729 - DNA, 521 bp, Homo sapiens; identical to SEQ ID NO: 7728

SEQ ID NO: 7730 - DNA, 2642 bp, Homo sapiens
gagccaaccgagggcgttcctgtcggggctgcagcggcgggaggtaaggcatggccaggccggctgggctgcagagcgccggcacgggtccacgcctcgggtgacgggcttccaggatgttcgggcgcggggcggcccatccgcatcccccaacacccccacctccggcctgagcctcccagcgccgtgggaaccacctcctgtccgctgttgctggcccgcatcctagcagcggcctgacgccctccccaccctggcatgcccccttgacctgggacgatgagcatacgactgggtaagggcaagctcgatgccccgtgccctacggacacgggggtaggtcgctcataccttgccctctgatagagactcaagcgaacctgggtcgcggaccttgggccatcagcgtgcaaactgccccaggacgatctctttgcttctgtcgatggggactgaccctctccacctctgcctgtcagctcaggccaggaggggagggacctgggcggagccccgggtggagacaagaggaaggtgacatcatcttgaagatacaatccagctttacccactcgtgtccaccctggcacacgagacagatgggggagagggtgtttgggctgtatgtctgaggtgacaccagggacaagggcatagaactcaggcatggagcccatcgcttgaagtgggattggaccaggatggaagcgggctccttcagatgctcccatctcacccctggctgcagtgcaggtccttcctttagacctcatttatccattttgctccactggacaggtgctggcagcccaatgccccaaaagggctggggcaggcacctgaaacctgcacttaatctttccccagaagctgagacttgtaaatgtttggccagcatctgagctgggccccaccctgatttagggataggagttgggcaagactcagccctggatccaggccttcccttgatcccctttcctgccaggatttgccaagactcactggagggtcacacccagtacatctacctggaggatccctcctcccaggatttgacctgggaccagttttcatagatcttcagctctgggggagggatccagagtctggatgtcacctgggtgcaactgataacctcccttcctccttcccagggagcccagtggaggcgccctcccgaagcgccactgcccatgctgaccacccagccctccggctgctgatgtcatgagtaacaccactgtgcccaatgccccccaggccaacagcgactccatggtgggctatgtgttggggcccttcttcctcatcaccctggtcggggtggtggtggctgtggtaaggagccctcatatacacacagacacccacagctttgctaaggcaggggctgggtgggcctggtccagtctgcacagagtccccactgtcctgttaagggagtgaagggtgtggaggtgggcctctctctgcctgtgggccttcctgggctcagcagcccccacagtgctgtgtctctgttgcaggtaatgtatgtacagaagaaaaagcggtgagtgtccctgtcccccacccgccctaaccccacacccgttctgaaattcctgctcataggctctgacttttctgtaagatgtccctcagccatcctgatacaagcctgaaatttgttttccctgccccagcctcaggttactcactggggaaagcccctttgtagaatcagggttgtattcttggaggtatagtgtgtcccaaaaggcacccactggaattgcccctgcctgggaaagggaggagacgaggcagccaggtgtttgatgagggttggggggacctcctagctgagtcccctcccctgctccccagggtggaccggctgcgccatcacctgctccccatgtacagctatgacccagctgaggaactgcatgaggctgagcaggagctgctctctgacatgggagaccccaaggtgagcacttgggggccagggggagaatgaggcaaggtgggagtcagccctgttcccagccatactcgtccacactgaaaccagagcctggttctgcttacttgggctgtaactgggtgctgcagactcccagggaacacagcccagccttgtggtgtggtctcctccccgacaggtggtacatggctggcagagtggctaccagcacaagcggatgccactgctggatgtcaagacgtgacctgacccccttgccccacccttcagagcctggggtcctggactgcctggggccctgccatctgcttcccctgctgtcacctggctccccctgctgggtgctgggtctccatttctccctccacccaccctcagcagcatctgcttcccatgccctcaccatcacctcactgcccccaggccttctgccctttgtgggtgttgagctcaccgcccacccacaggcactcatgggaagaggctttccttctgggatgggggcggctggtagacacctttgctttctctagccctcctgggctgggcttgggcacaaatccccaggcaggctttggagttgtttccatggtgatggggccagatgtatagtattcagtatatattttgtaaataaaatgttttgtggctaggggttttgatttca

SEQ ID NO: 7731 - DNA, 2642 bp, Homo sapiens; identical to SEQ ID NO: 7730

SEQ ID NO: 7732 - DNA, 283 bp, Homo sapiens
cagcttgttttacagacgttaagacaggcgcagagagggtgggcgtgccagggccctcggtagcccagacctgccgtactctaccagccgagcacagcccgaaggccagggaacaaacacagacggaggccgagtgggcccggagcagggtcttgccgcgaagggcctgggctcaacgttagagcgtggcgcgaccctattctggctgcaacgagaggggtgaatgaagtgggcgccggggacctcccagaatcggagctccagacgcgggcgggccaggggc

SEQ ID NO: 7733 - DNA, 6286 bp, Homo sapiens
agtccagaaaaggatattttttttattcaagtaactgcaaataggaaaccagagagggagccccaggctgggacaaatcatggctacccctccccaacagaacagggggaggaggtggcccctacaccctttatggtcgatttgggcccccttgctcactctgctgcagcatcctaggggcagggccccaccttccctgggactggggtagtcggtcacccagcctgccatgccccagcccctcttccccacaaagagtatcttgggggaggggatcgtgggcagaacaggaggcaatgaggatgaacatttggcgctggtagcagcagcaatgacggatgtcgaagaatggaacattgaacaaaaaacaacacaactgtccagaggtagtttgtgaacagaggaaaaatggaaccagaaccttggggggcagggaggagcaggaggggggttgggagcgggcagggtgagctccttgttattggtgccccatctgaggagggggaaatggctgagtggcggaagcaaagtagggttaggggagcagccccagcccacctcaggtggcggccacagggctcttgggcctcacctggacaataagtgactgcatctccatcaccacaatatgtactcagatcccaggcggagggcaagggggctgtggccacagtgaagagggagtaggggactcacccctcctgccttcctgtaaccgaagggggctgtccaacctagtacggggactagggaagttggggaaggatgaaaagtgagccccacgtggtgacaaagacagtttggctgggggaatcctgggggccagcacccccctccattggccacacctgctgctgccagggcagtggagtagggcgtgccaggatgagatggggcttgggccccttttaaggccaggggaaccctcccaggccccactatgggaagccagagggaacagtgaaggagcagagagggcgcccccaaaccaaaagcccagagagcaatgtccccaccaccaagggagtggggacgcagcaggtgcagggtgcggctaagtgggatgttagccttgtccaggagggcatgtgtgtatgcgtgggtgggcggggggagctgggaactgaggccaggggaaaactgctccccactcagcccatgggagccctgcagcggctggtgtgctgtgtagtgtggtggtgagggcacaggtggaagatgggggtggcggccagaggcggtggtgatggtgggcctggggaaggggtgggggcggtgggagcggagcaaagctgtccagtcccagaaggaagctgctcctccagtgaggagcaggcggcacgcatgggtcactgctcctcctccgaggactcctgcgagatgccctcctcttcctccttctcctgtgaggtgggcagttgttggtgtgagctctggcccggtccccctcttccacccccagaggctggccccacccgctccctgcactccctggctctcctgaagagggatgagtcagggctgagtgtgtgggtgactcagcaacctccacggcccggcttcattcataaaaagaatttaaaaggaggaaaaaaccccacacacatgctgctctcacccagagccaggagccaagcccccttggcccccaggcccagggagggcaggagggcagagctcagggcagcaatgagcttcaggatgtgactgactccctaggggagaagaggaggtgggggaagaggtggctgggggaggaaatgggaaggggtggctggaaggtgcaagagcccgctggtgggtgcaggggaaccaggtccttggcccacaggggcagatgctgtgctgtggtgccctggccctccggggtggccgagggctgaccctaggccggggtggggaggaaggggaagtgtgtgccgccggggctcactcactgggcgggaatgtcgggacaccacacggggctacagcccccgtgccaggcacaaactccaaaacaacttgtttcctgttactcactcttggggcctggccagcagcaccccctaacccccccaccccagcagtggctcagctcaaggaatgacagcttcagggatttgagggggcaggctgggggtaggagagggccaggagctggaaggctggggtgaccctaactgcagtggccccctagaggcagcttcttgactcagcccaccgagcctttccaccagctgtttggggacccagaattggatggtgccctccagtgcagtgtggtgggtcacatcagaactccagcaccgacccctcccagggcccagctccttcgctgtttctcttctgcagaggctcataggaaggacaaaccttccccctatggcttcctttcctcatctctaattgagggggacacaggctagatgacttccaagatctcccctagaagttctgagtattctaggagcaggagagggagggacccccacacacaactagggcagggcagggcagggggatgtggtctgatttatacctgggacccctcacttctcatgggcacagcccaggccaggtaccttcccctctctggacttctgtaaaatctgatgtcccagcaggtcaaggagagcctttccatagggggtgcatagcatcaggtactgtgtactcaacaccctcaactcaaaagagcccaggaggcaagcagcagtctgcttcttcacctaccagttttttgggtctgccccttggtttccttcctggagttgtggtggttttctagagggttagagaaaatatctcctaagtccaaaatgctcatcagtgctcacccgatgcccaatagtgatggggggcagacctacctgcctgttcagggtgacccaacactctcacccaacaggcccacccaagtccagctggcaatgactggccagccacatttgccccctcgacatacacacacgccccctactcccacctccgcccatgactcagaggatatgagtcgtgtcttagaaaaaataaaataaaaaacaaaacaacttttctgaaaggctaatgtcactgtgaatctggcctttgctgcctgtccccaccccttcaggctccagggaaccccaagagaaggtaacattctcagcccagggactggcagggaccctccattctccccactctgcccttctctagatcaggaaagctgtgggacttctgacctgatctccgcagtgtcctgggcaggaccaaccccccagaagtaagaccttagtcatcgccccactctccccagttagcaaagactcactgccatccctgtaccagggaagggggtacacaactgagatgactgagccccttcccagacctccccacagccgtggccatggtgccaacaagaggatcctctgctagtcatccacccaggggtagtcccatctcaagtctcacccgggtcttggcagcacccttgtttttgcttccctttggtcggccccgaggtctcttaggtgttggcacttcgctgggctccttctgtaaagacagagggggtagtcagggacagtcatcacctgtttccaccccctcagaagacacagccctctgcctcctcaacaaggttaagtcagcaagaaccaagaaccacaaaccatccctgacctaggaatcccttcaggatccaaagctccagtttgagcatctttgcaaagtgcctcccacctctccccttgcttccctgcaggtttctaagatgcaaaatgacaagagcccagaagacccctaggaaaggcattctggggacagaaagacagttaggtggctctgcccaagtctcagttctgacacttatcttgggtgggacacttaatgctggagcctcagtttcctcatctataaatggtgaagacttcccttgcagggtgtcatggagattaaatgggtaatgtatggttatctagcactgggccatgatcactgcccaccctctcagatgacctatgctggacacacactccctgcctgcacttgcaaacctggagcccatccaggctgcccccagagaaggggaattatagccggactccagagatccctgccatcattcccactgaaattttaataagccgtagatagaataaaaagctgctgcataatgcatataaggtgtgtggtgaaggcgcgccagctactgtttcctagggggccgcccatggtctgtctataaccagggtccagtaaccctgcacccctcctgacacctcccactgaccatggctaacaggtggggtaggaggggaggctgagggagctaggctaagaggacaaatgaccccaccccaggctctgaattccaacacagcagactcctcacagctcgtgtctccctgggcccaggtcagcacagaccactctccaccgtacggacagggaaaacctgcaggtgaacaacctgtatcatgtttaaggggcagaggtcgaactcaactcctcttacctctctcccagggaagggaagtaactgggcttcaccaacagccacccttcacttgggtgacagctgcctctgtaagaggccaatatggggtcccccccatgcccaaatggccatgctccctagggtgccccacagcgccaggctggcagcctcatccttctatgaggactttgtggggagagcagcaccagggttctgagggtcactgccaccaactccccaacatttttgacttcttgggcttcaatttccatctaaagagccaggggcaatgcccattccagaactactcataactggcctgtgcacaaacaggtgctggcccacgcaggcacccgtttctcacctgggatgaggaagtacaagaatcgaccataagtattcagcaactttacagcaaattgacaaaaatcattttacgtgcactgaatctaatgattaaaaaccctgggcttctatgttcatttttgttcattcgtctttactgcattttaaaattactggtccacagtggattggaaattaagaaaaaggcgagtgttttaagcactggccatgtgacctctggggtgctttaggtttggactgtttgccattggcttcagaatttatcttgaattcctcggcccccggttctctcctggggtctctatagagatctgaccagggttgcaagtggggcaggagtacacacaggtgggaggacacacccacacgcttactgcgcagaatcattctgcaccctccatgcatggtctcgcctgctgaatgaaactccaggcacctccctagccccaaagggtaaaccaagtgaagcaaaggtttggacacccacctgactccctaccagcgctgtcccgggactcaccggaggctgcttgcgcggcctgccccggccccgcttctcagtgccgtccttttcctgcttggaggccaagggctggctggacttcgagctcgactcactcatcttcccttctctaaggagcaggtggaagagtgatggctgggatgctgggagacagaaaagtgcttttagacaaacatctcgcttcagccactttctaccccctcatcacccacaccttcaaggcacactgcagaaaactgtgctcccatgggcccccaggcctcctactctgcccaggatggaggggtctgcccacccccagatgctgccaagggcggggaagggccgttggccctaatcagcttcttatctatctcctgttcagaagggctctttgttgtcctgccttaacaccgccccagtgcagcgtggtggggggggtcccaggaggtacagccagcccagacctagctacatgggtgaggccaccctgggacaaaggtgtggggaggtgagatctgacgtattgccagcatcccctccttctgtagtcaactgctgccctttctctttaagagaaaatccagcctacgcagttcagtgggaaaatggaaagaatgagaccttgcgatctggcagctatggacattgatcccctgcccacctcactgacaatattgcctatctggcaaggtgcaagactcaggaccaaaaagagccaatcacacagccaggggtggtgcccaccaccagctctcttctctgttctcacccagggtaaatccctggagaattcagattggtataattgagggagggaggagatggttgaagctagtgggtgaggtgggggaggaaagtgagcccaaagccaaaggccaccctcctctttccccttacccctcctctgcccaactggagtcagatgggactttgtcagatgggtagggaat

SEQ ID NO: 7734 - DNA, 6492 bp, Homo sapiens
agtccagaaaaggatattttttttattcaagtaactgcaaataggaaaccagagagggagccccaggctgggacaaatcatggctacccctccccaacagaacagggggaggaggtggcccctacaccctttatggtcgatttgggcccccttgctcactctgctgcagcatcctaggggcagggccccaccttccctgggactggggtagtcggtcacccagcctgccatgccccagcccctcttccccacaaagagtatcttgggggaggggatcgtgggcagaacaggaggcaatgaggatgaacatttggcgctggtagcagcagcaatgacggatgtcgaagaatggaacattgaacaaaaaacaacacaactgtccagaggtagtttgtgaacagaggaaaaatggaaccagaaccttggggggcagggaggagcaggaggggggttgggagcgggcagggtgagctccttgttattggtgccccatctgaggagggggaaatggctgagtggcggaagcaaagtagggttaggggagcagccccagcccacctcaggtggcggccacagggctcttgggcctcacctggacaataagtgactgcatctccatcaccacaatatgtactcagatcccaggcggagggcaagggggctgtggccacagtgaagagggagtaggggactcacccctcctgccttcctgtaaccgaagggggctgtccaacctagtacggggactagggaagttggggaaggatgaaaagtgagccccacgtggtgacaaagacagtttggctgggggaatcctgggggccagcacccccctccattggccacacctgctgctgccagggcagtggagtagggcgtgccaggatgagatggggcttgggccccttttaaggccaggggaaccctcccaggccccactatgggaagccagagggaacagtgaaggagcagagagggcgcccccaaaccaaaagcccagagagcaatgtccccaccaccaagggagtggggacgcagcaggtgcagggtgcggctaagtgggatgttagccttgtccaggagggcatgtgtgtatgcgtgggtgggcggggggagctgggaactgaggccaggggaaaactgctccccactcagcccatgggagccctgcagcggctggtgtgctgtgtagtgtggtggtgagggcacaggtggaagatgggggtggcggccagaggcggtggtgatggtgggcctggggaaggggtgggggcggtgggagcggagcaaagctgtccagtcccagaaggaagctgctcctccagtgaggagcaggcggcacgcatgggtcactgctcctcctccgaggactcctgcgagatgccctcctcttcctccttctcctgtgaggtgggcagttgttggtgtgagctctggcccggtccccctcttccacccccagaggctggccccacccgctccctgcactccctggctctcctgaagagggatgagtcagggctgagtgtgtgggtgactcagcaacctccacggcccggcttcattcataaaaagaatttaaaaggaggaaaaaaccccacacacatgctgctctcacccagagccaggagccaagcccccttggcccccaggcccagggagggcaggagggcagagctcagggcagcaatgagcttcaggatgtgactgactccctaggggagaagaggaggtgggggaagaggtggctgtgggaggaaatggtaaggggttgctgaaaggtgcaagagcccgctggtgggtgcaggggaaccaggtccttggcccacaggggcagatgctgtgctgtggtgccctggccctccggggtggccgagggctgaccctaggccggggtgggtagtaaggggaagtgtgtgccgccggggctcactcactgggcgggaatgtcgggacaccacacggggctacagcccccgtgccaggcacaaactccaaaacaacttgtttcctgttactcactcttggggcctggccagcagcaccccctaacccccccaccccagcagtggctcagctcaaggaatgacagcttcagggatttgagggggcaggctgggggtaggagagggccaggagctggaaggctggggtgaccctaactgcagtggccccctagaggcagcttcttgactcagcccaccgagcctttccaccagctgtttggggacccagaattggatggtgccctccagtgcagtgtggtgggtcacatcagaactccagcaccgacccctcccagggcccagctccttcgctgtttctcttctgcagaggctcataggaaggacaaaccttccccctatggcttcctttcctcatctctaattgagggggacacaggctagatgacttccaagatctcccctagaagttctgagtattctaggagcaggagagggagggacccccacacacaactagggcagggcagggcagggggatgtggtctgatttatacctgggacccctcacttctcatgggcacagcccaggccaggtaccttcccctctctggacttctgtaaaatctgatgtcccagcaggtcaaggagagcctttccatagggggtgcatagcatcaggtactgtgtactcaacaccctcaactcaaaagagcccaggaggcaagcagcagtctgcttcttcacctaccagttttttgggtctgccccttggtttccttcctggagttgtggtggttttctagagggttagagaaaatatctcctaagtccaaaatgctcatcagtgctcacccgatgcccaatagtgatggggggcagacctacctgcctgttcagggtgacccaacactctcacccaacaggcccacccaagtccagctggcaatgactggccagccacatttgccccctcgacatacacacacgccccctactcccacctccgcccatgactcagaggatatgagtcgtgtcttagaaaaaataaaataaaaaacaaaacaacttttctgaaaggctaatgtcactgtgaatctggcctttgctgcctgtccccaccccttcaggctccagggaaccccaagagaaggtaacattctcagcccagggactggcagggaccctccattctccccactctgcccttctctagatcaggaaagctgtgggacttctgacctgatctccgcagtgtcctgggcaggaccaaccccccagaagtaagaccttagtcatcgccccactctccccagttagcaaagactcactgccatccctgtaccagggaagggggtacacaactgagatgactgagccccttcccagacctccccacagccgtggccatggtgccaacaagaggatcctctgctagtcatccacccaggggtagtcccatctcaagtctcacccgggtcttggcagcacccttgtttttgcttccctttggtcggccccgaggtctcttaggtgttggcacttcgctgggctccttctgtaaagacagagggggtagtcagggacagtcatcacctgtttccaccccctcagaagacacagccctctgcctcctcaacaaggttaagtcagcaagaaccaagaaccacaaaccatccctgacctaggaatcccttcaggatccaaagctccagtttgagcatctttgcaaagtgcctcccacctctccccttgcttccctgcaggtttctaagatgcaaaatgacaagagcccagaagacccctaggaaaggcattctggggacagaaagacagttaggtggctctgcccaagtctcagttctgacacttatcttgggtgggacacttaatgctggagcctcagtttcctcatctataaatggtgaagacttcccttgcagggtgtcatggagattaaatgggtaatgtatggttatctagcactgggccatgatcactgcccaccctctcagatgacctatgctggacacacactccctgcctgcacttgcaaacctggagcccatccaggctgcccccagagaaggggaattatagccggactccagagatccctgccatcattcccactgaaattttaataagccgtagatagaataaaaagctgctgcataatgcatataaggtgtgtggtgaaggcgcgccagctactgtttcctagggggccgcccatggtctgtctataaccagggtccagtaaccctgcacccctcctgacacctcccactgaccatggctaacaggtggggtaggaggggaggctgagggagctaggctaagaggacaaatgaccccaccccaggctctgaattccaacacagcagactcctcacagctcgtgtctccctgggcccaggtcagcacagaccactctccaccgtacggacagggaaaacctgcaggtgaacaacctgtatcatgtttaaggggcagaggtcgaactcaactcctcttacctctctcccagggaagggaagtaactgggcttcaccaacagccacccttcacttgggtgacagctgcctctgtaagaggccaatatggggtcccccccatgcccaaatggccatgctccctagggtgccccacagcgccaggctggcagcctcatccttctatgaggactttgtggggagagcagcaccagggttctgagggtcactgccaccaactccccaacatttttgacttcttgggcttcaatttccatctaaagagccaggggcaatgcccattccagaactactcataactggcctgtgcacaaacaggtgctggcccacgcaggcacccgtttctcacctgggatgaggaagtacaagaatcgaccataagtattcagcaactttacagcaaattgacaaaaatcattttacgtgcactgaatctaatgattaaaaaccctgggcttctatgttcatttttgttcattcgtctttactgcattttaaaattactggtccacagtggattggaaattaagaaaaaggcgagtgttttaagcactggccatgtgacctctggggtgctttaggtttggactgtttgccattggcttcagaatttatcttgaattcctcggcccccggttctctcctggggtctctatagagatctgaccagggttgcaagtggggcaggagtacacacaggtgggaggacacacccacacgcttactgcgcagaatcattctgcaccctccatgcatggtctcgcctgctgaatgaaactccaggcaccttcctagccccaaagggtaaaccaagtgaagcaaaggtttggacacccacctgactccctaccagcgctgtcccgggactcaccggaggctgcttgcgcggcctgccccggccccgcttctcagtgccgtccttttcctgcttggaggccaagggctggctggacttcgagctcgactcactcatcttcccttctctaaggagcaggtggaagagtgatggctgggatgctgggagacagaaaagtgcttttagacaaacatctcgcttcagccactttctaccccctcatcacccacaccttcaaggcacactgcagaaaactgtgctcccatgggcccccaggcctcctactctgcccaggatggaggggtctgcccacccccagatgctgccaagggcggggaagggccgttggccctaatcagcttcttatctatctcctgttcagaagggctctttgttgtcctgccttaacaccgccccagtgcagcgtggtggggggggtcccaggaggtacagccagcccagacctagctacatgggtgaggccaccctgggacaaaggtgtggggaggtgagatctgacgtattgccagcatcccctccttctgtagtcaactgctgccctttctctttaagagaaaatccagcctacgcagttcagtgggaaaatggaaagaatgagaccttgcgatctggcagctatggacattgatcccctgcccacctcactgacaatattgcctatctggcaaggtgcaagactcaggaccaaaaagagccaatcacacagccaggggtggtgcccaccaccagctctcttctctgttctcacccagggtaaatccctggagaattcagattggtataattgagggagggaggagatggttgaagctagtgggtgaggtgggggaggaaagtgagcccaaagccaaaggccaccctcctctttccccttacccctcctctgcccaactggagtcagatgggactttgtcagatgggtagggaattctccaactgaaatgcaccgcctaacagaccctggctggccctcatcctttaggatgaggtttagggctcatcctaaaaccttcttggtcattttctagcatcttccttcttcttagaggcctgttggggtttaattaaccccatcaattttgagttttcctaaaacttctcattggaaggagggcctgcaacctgtatttgggaa

SEQ ID NO: 7735 - DNA, 283 bp, Homo sapiens; identical to SEQ ID NO: 7732

SEQ ID NO: 7736 - DNA, 15926 bp, Homo sapiens
gcggccgcgtcgccgctgaggatgtcccgaaaggggccgcgagcggaggtgtgtgcggactgcagcgccccgggtaagcgcggcggggccgggggcgggaccgcacagccaggccgccgccgggcgggcgccggggcctggcaagagcgctgtgcggggccggagggctgggcggggcggggggctgcggcctccaggctgggcccccgcctcggccactgcggagctgcgcccttggcgggagggccggcctggggtgcccatgctccctggaggccgtggactagcgaggaaggacgttcccggcgccgcctcccgctcctcggtctgagggaggcgggcagctggctgctcctccacctccatctctgtatccgacggaagcgccagcctggggtggcaggagggccgtggcggaggccgtcagggcttgggaggtgggggcgagtgtggttttatgtcatctcagtgccacccccgcgtcttgcacctgctgctcgcgtggtcggtacgcctgccggggtggtggagggcaaggagcagagggccgggcagatgcgccagtggggcctgaataccgtctcctcaggagcagatgagcggtggctactcccaggactccctgcctcgggttcctaaggctagcgctccttgccgggcctggcgttcagggccagtctagacccgggtgtcttctcgggaggcatccccaggcctgctggtggtgactgggaacagctcggctggaccctgctgttcctgttcaccggtaaggcctgcttgggaaagtgagcttggcatcaagctatcctgggtgcgggcccctccctgtcccctagcccagtctggccagaaatgggtgggaggccgtgccgagattccccgtatcctgctggcttcctggcctgtctcctggctgtatttacatggtggttcccttccttttcctaacagagttaggactgggctggagtgaaaccccccaggcctgctgaggaagtcaggggtaatgatccaagaggctgctcccttctgatgagggaggacagccagtgacggggctctgcagctggcctgggaaggaagctctagcccacatccattctttctttagcaaaggagctatctccctggtaggcccctgggcaggctgcggaggtccgtgaactctagcggggctgtgggcatgattaagagtgagagtatggggtgctggtttgtgggcccataactttcagccaccccttgagcaggcccaggaccccaccggttgagcctcacagatgctctggtggttctgggggtgccaagctagagtatttgggaactatgacttagcagggcttgggcacaaaatactccataggtggttatgaccaaggcctcctaggggcttatcatggtttagagggccctggggttgagggtccatacccctaagaaactgtgactccgttccccgagctgcaggcaggtctggggatggcagggctgaggatgcaccttgccttataaatgtctccccactgttccacaactccgtggggtaagcatggcatggaatgtggaggagagtcttagcaggcgcccaatcgggggagtctggggcttagtgttgcctttgttcccagcttactctgtaatcccaacaagactttcctcactgtggggtcctcagcttcctcaattcagaggcaaagaagttggagtagaaatggtttttggggggctgccatctccgaatctgtggtctgattctggggtggaggggtgaagggcagcaccagcaaggcagttgtcctttgtatgttgcgttgaatgtccgaccacagcctctggatgcccagtgggctcagggaggaatggtgggcatcagatgtgttggattgcccagctcctcctcccaggtcctcatctgtcagaggaatttgtgccccagatgcctcctttcccctgattcacaatagaggtcaggaaggtggtgagaaggtgaggatggtggggtggggaggatgtggacagtcttactcatcagcccacctagcacccagcgaggtgtccagcacatggcaggcactccctgagtgtttggctgcttgttaggaccctggctggctgcttgggactatcccacacctggaccctaggatgctggccctggcatgcagcggcatgtttggtctgggtcctgtggcatctcaggcagagaggcatgagggtacccagcagtccggagtccagatccagtgccagccccatggtgtatcgctccaccccagggtcacaggcttcttttattatgataggagccctgcagtcctaaccacaggagtggggccagggactttttgtgcttggttaatttggggggtcatggaggtcagaggtgagatgcagcctgtccccagagagccccatcctccctctgctcccgggcatgggcacacaggacaagtgtgagtgtgttgctaggcagctggacatgacatggctgctctggcagcttgtgccacctcgtcaggcaccgtatgtgttcctgcctgcctggggagtccaagagaggaagggggcagggagccctggagaatgtgcatcttcccctttccttagccttggcccacctcgccacacgatctcagtcaagggcctctcctcaccccatgggcttctatctcagccttttccactttggcaaccctgggggtgagagtgaaggcctcaagatgcctgtcctgtaggtatctctggtgagcaaggccggggacatgttacgggacaagctacaggctgatttgtctcttcatagtgtagattgcagagtgggacaaatgttgggctcctcttcctcccttatggaggtagaatttgtgtgtgtcaatgcctgcacctgagtgttcatcctgatgggcttttacatgtgtgtatacccatgtaactactgctctgatcatgttatagaataagggtatccaatctttttgcttccctgggccacattggaagaagaattttcttgggccacacctaaaatacgctaacactaatgatagctggtgagctaaataaaacaagcaaaaataaaaataaaaaataaagtcacaaaaaagtctcataatgttttaagaaagtttatgaatttgtgttgggccacattcaaagctgcctgggccgcatatggactgcaggttagacaagcatgttatagaacatttccatcaccttagggggcttccaagtaccccctcccagtccgtgcaccccagaggtaaccaccattctgactctaccccaaggactactctcgcctgccttcatgatgtgggcttttcccttagtctagtggagatctggcccttagctcaggggagggaggcctgaggctagcctgtatgtgcaaacctactggccctggaggccactgatggcttcaggtggtggcaggaattcaccgtagtagaggcctccatggggttggcactggttaacgtgatcccaggatcacgcctgctacctctccacacatacagacccataccctgccggtggagccagaagcgcagggggagggctgacgagttcccttacagttcctgtcctttccgtcccaggtttggtccaaggagcttcttgacgcaaggatcccttcaccttaaactacaatctgggtagtcccaagggcacttgcacagagggaggagacagaatggttagggtgggcgtcccatctgtgtcatccagaaatgagctgacaccaatagcggctgcccagaccaggacagtgtcctttgcctaccattcttctcaggtcacctggaggagaaggagaacccctcccccaggctgggggaaagtgccaggcaaacccttggaccacactcctgcatcctggtcttggttactgccatagccagggtcactcaccacatctggtctgcccatggcttagggctctggagccattggccgtggatatatagtcagccttccatgcctggcttctcctgtaggaccacagacctcagatcagcccatttatgatcctgccctgggcggctccccacttacaggaaaccccaccaagaggaatttgggctgcatcatttccggcttcctgcctgggctgctggaggtggctggctggcagccccctgacccagtggtgtttggagtggggagagggaggtctccacacctggggtgcctcactatttgggtaaagccagcccagaagtgcatgctagggctccccctcttggcgaagaaggctggtcccttcctcctgagccctggagtcagccccccaggaaggtgttggcggtcaccttgggcatccctctgttgccctgattgggagggggtcccttaaaaagcctaaacccgctgcactccagcctgggcgacagagcgagactccgtctcaaaaaaaaaaaaaaaaaaaaagcctaaacccaaagacaggcctctctcctttacttcctgttttcatgcctcagtgggggtcacttgctgtgggcagagctcaggctgggcccctgactcagagtctcctcaattttcctgggaactttggtggaagtccttagaggggaaaggcctgagaattgccttctagttgggagagattcttatccccctaagcctgtccctcccctgatggggatacttctgaacaccctgagcgctacagggcaaggcagagagccagtcccccacccccaccccaggacagggtttcctgagacagggtgggggccgctgggcagagcaaagtgtcctgggagagaggcgccctgcccccactctcaggcggcacacaatggctgctttctcccccgtgacctttccgcagcctgagtcgtatgcagctgtctcccaaggggcctaggatgggtggcatctcctccacccttgagaagaaccccggaactcccacccagtcctggccctgcttcttctcccaagttcacttttcccaaaagagtggagagcaggctatagaggcagagggacagcagcaagtgtggacatggcatggtctcaggcatgaaagtgccacatcctggcaattctactcattagcctcgcatccttgaataagccctttaacctctctgagccactgtttcttcatcacagaggcagcatgtcctaccttgcctgacagttgcaagcagcatcacacataatgtacccagctggtacctagtgggtgcccagtcaagcccagctcctttgctctgtccatcttccttaagagggctccagcttacaccctcagtgatgatggcaggaggctccagcatgaaaggacctcacctgctggcaggaggccagaggcaggacctgtggacgggtgtgatctgtcaggcatgtttcaacagcatctggcatgcagcagcatctgggttgcatccccttggggatcccttcctcccttcgggacgggctggggcagagacctcgtttcctgggaaaaggctgagagactggtagcagtggctgcagggcaggaaactgtgcctgctgaatgggccctggggactgcatatcccagaggggtaaggatgtaggaaagggcatggctctgtcagcccccagctgtgagctcttggggagatccctcactggtaacctggccgtagtgatggtcccagctcctaggctgttggagactgagtgagtgaatgtgtggagagtactaggcttggcacgggccagagcaggtgctcaggaggtctggcccatcatctggctccggctgacccttgccctcaccctggcagaccctggctgggcatccatcagcaggggtgtgctggtgtgtgacgagtgctgcagcgtgcaccggagcctgggacgccacatctccattgtcaagcaccttcgccacagcgcctggcctcccacgctgctgcaggtacagggctcagtcgggtggttcttccttcccctcaggcagagtgtgctgagcatgagggcgtttccccctcacccacatacacccccatctggaatctgcagcttccaaggggcagcacccccctagggcagaggctaatcctgaccctttcctcccatctactcacttcatgcagaagagtagctcacacccctgctctgccacttatcaacgtggtcgtgtagcattgagcaagttgcttcacctctctgagccttggcacactcatgggatctgtgtctttgggcagctggactagatggaggtgtggtggtgcgggcacacagtaggcccccttggtaccgtttccagctacgccagccacagcaggcgctcaggaagtgtttcccccattgcttagcacgcagtgggcactctctcacttggcatctcttccctgcagatggtgcacacgcttgccagcaacggggccaactccatctgggagcactccctgctggaccccgcacaagtgcagagcggccggcgtaaagccaacccccaagacaaagtccagtgagtggggctggaggggtggtgggcagagactgcgcagtccgggacagggccctgggaggtggcaaggtgaccaccctctcccaccatgctccccattcctcctgtgtgccccatgcagccccatcaagtcagagttcatcagggccaagtaccagatgctggcatttgtgcacaagcttccctgccgggacgatgatggagtcaccgccaaagacctcagcaaggtttgaggggccctacaacagatgggtggccccctcctcttcttcccatccacgactctctgaaggcctctcctttgtccccactgagccctgggccccaaaggcagccaggtcagggtaacagtagacagggtggagagagcagattgttgggtcaggccgtgtgtggctgaggctccccagcaaccaagtagacacacaaggctagaagcccacagctgccactcagaagctgggaaaacctgggggtagttgcttagccactcatagcctcagtttactcatctgtaaaatgggaaagaaataacagcatctacttcataaatagtatctaagcagggcacacagcacacgtggtagatggtgactgacggcagcgtttattaattggcattaacccctagcgggaagcctctgtcctcccgacatagtctggtttgggcaggcctccttggagctgctaggtgtcccaggggcagccagggtgcagcttgtgggtggggaggtgcgcctcacgcacatgcgtattcactgcacactctgctcctcttagcaactacactcgagcgtgcggacaggcaacctggagacatgtctgcgcctgctctccctgggtgcccaggccaacttcttccacccagagaagggcaccacacctctgcacgtggctgccaaggcaggacagacactgcaggccgagctgcttgtagtgtatggggctgaccctggctcccctgatgttaatggccgcacacccattgactatgccaggtgagggtcggctgaagggtgcagtgtgggtgggtgggggtgtgggtgagggctgctgctgcaggtctgagccataccccctcctcacaggcaggcggggcaccatgagctggcggaaaggctggttgagtgccaatatgagctcactgaccggctggccttctacctctgtggacgcaagccgggtgagcagagcttggggggcgcctggctgtgacaggcctggctggggctgggcaggtgggacctggacgcacccggcagcaggtgccatggtgacagagcggctggggagcaatgttgctaggcaactggctcctgtgaaattactgcaggctctgggccatagcatcgctggggctagggagtgggggtgggcatcctgcatcctcccacgagctcccagcattcttgggggtggcctgccctccccactttcccctgacacttctgggtgccagccctgctcatggcagtgaggtgggctcccagctgctgaggccacccagcactagtgagtgacttggcatttttatttttgttcagatcacaagaatgggcattacatcatcccacagatggctgacaggtgagtgcccacctgatgcccctttccagaggctgttggatgccatgtgggtggctgacccccagagctcccagcccaggtttcagaggcctaggaccctgctccctccccccagagactagaggcacagcttagtcctcagtccctaatgctgggccccaaggcaggtaaaaaatgtcagctccatatgtggcccgcatagcctgagccccgtgactgtcaagtacatggagggcttgggtgtgagaagctacctgtgggccgggcgcggtggctcacgcctgtaatcccagcactttgggaggccgaggcgggcggatcacctgaggtcgggagttcaagactagcctggccaacatggagaaaccccgtctctaccaaaaatacaaaattagccaggcgtggtggcgcatgcctgtatctcagctactcgggaggctgagacaggagaatcgcttgaacacaggaggtagaggttgcggtgagccgagagcacgccattgcactccagcctgagcaacaagagcaaaactccaaactccgtctcaaaaaaaaaaaaaagaaaaagaaacagaagctacctccggctgggagggtgggccactgggttctgtcccagtggcaccgaccccactgtctttagagaagcctctgctcttcgctgaaaagatgggtgggcttcagggatgtgactaactttgtgactgctggctaggcctctagcgtgctcagaattaggcacgtgcgctgaggctggttgaatgaggtgtttctgcttccgtctgagaggcagtgtgggacaccccctgccactcacccagcacataagatggatgctggtgccacctggtggccacctctgatggccacgtcctcatgccaggctgtgcctgctggcctggatctggagagaggaggtgctctcctccccaagggcctgtgtgggcagatgggcataaccaggcctgggcgactcagatcctaaacccagacctcttccagaccccaaggctcctacttctatggtctgattctacctgggctgtgtgtgcatgcgtgcatgtgtatggtaaatacacccaaatatgggctccattcaacagcacattaactgagcaccttcccggagccagctactgctcttggcactgggagcacagaggcagctgagacacaatccctgcccttaaggagctcacaatctagctggggaggcagcctagccaggtgattctagtcctcatgggggagtgcagcaagagaggcagaggcatggagggtagaaatgctgcatgggaatggaggcagcccccgggctggagcacagcatgggaggcagggaaccctacaagcaagactgggatagagacgagctggagaatgagcagccccgagagcatcagcaggagcagtgaccatcccgagagcggagagttccaggcacagaagtgtgaagtcatctctgctgcttactggctgtgtgacttgcaggctgcttgacctctctgagccttggttatctctcctggaaatggagatgacagcatctatttttcagggaggagaggattagataagaatgtatgcaaaatgtttagcctttttttttttttaagagttggggtctcgctctgttgcccaggctggagtgcggtggcttgatcatagcttaccacagcctcaaacgatcctcctaccatagcctcttgagtagctgggactacaggcacatgccaccgtgctcagctaatttttaaattgcttttgtatctctgtgttgcccaggctggtctccacctcctggcctcaagcgaacctcccaccttggcctcccaaagtgctaggattacaggtgtgagccactgtgcccgtccctagggtattctgatgaagtatgtttggagtgtgccatatgcacctgttatcactgcagtgccttaaggcaaggggtagtgcagccaggtgtatccaaaaaatcaccctggctgctgggtggaacaggattgtagggacaaaactagaaggagggagattaagaaacttacaaagcccaggcaacaggtgattgaggaacctggggagcttcactaggactggagggtgagggaggcttcaggtgactgccaggtggctgacactggtggtggacaaacaggtcactgagaggaagagcaagccagaggaggaggggtgggggacgcggtgagatgaattcagctttgtcccttctgggccgggtgtgcgtggagatgggtctgggcctgatgtgaaaaggcgtgtgctgccctgctcctgggtaactgccgcctctgtcctgttcttccctctgctgccttcctctggacttagatctcggcaaaagtgcatgtctcagaggtatatggtgcctgccggggcagcaggcctgaaggtggggtagggcggggaggcatttggtgtgcagcatctggggtgccatctccccgggatccctgcatgttggggaggttgctggcatgggcctggccacctctcaggtctctcctctcctcccaattcccatctccctctgccctcagccttgacttatccgaattggccaaagctgctaagaagaagctgcaggcggtaagtctgctccaacagtgccctgacacttgaagctggcccctctctgatcccccaccctctgctcttgcttcccctgcctctgactcgatgaccttttccaagtctttgacctgtcccctcactggcctcagcagtcccctctccctgacctccctacaaggggatggactggtcccttctctcccaccttggagtttggaacatgatccctttccactttcccattctgagactgtaggggctgggcagcacaaggaaggccaccggttccccaaggctcacaacatgctggggagctggccttggcactgggagccgatgcatctgacaacatctgggcccctctcttcctccagctcagcaaccggctttttgaggaactcgccatggacgtgtatgacgaggtggatcgaagagaaaatgatgcaggtgagtcagggagcaggagtgtctggcgtggaggacccgagcggcccaggcatgggtctctggtcctttactgggctaagaaggggtgcctggggttggggctgctcagaggcctgcagatgagcccctgctggctgtgagcctgcctgggcagcatcccaggctgggtagagtgctgagggggaggcggctagcgtgctcctcccccagcctcagactggggctcctcttgctctggcagcctcccactttggctgtctccctggtaccgctccacccccctgcatcactccttcctggccacagccggattccagcccaaactctgggtctggatgagtggcactggccttgttccatttgtctgtccccagccggccacgcccagccttgccctggcccggcctagctctgcgtgcccaaagaccacccctgttctgaacaccagtgctcagtaggcgtgggggcagctaggaaggctgggctcagtgcttccccacccccaccttgggggcctggccaccgtggctgatctgctcctgtccgtcccctacagtgtggctggctacccaaaaccacagcactctggtgacagagcgcagtgccgtgcccttcctgcctgttaacccggaatactcagccacgcggaatcaggtgagggggctggattgggggcctggggtggtctacttcatccccgcggtccctcctcatccggcagtgggctggggcctgagccagctctccagcatttgccagggcctccctcagggcacagctggcactgggatttgggaaggtcaggaggctgttgttttgagcacttggggagcagctccggtgggtgttccggcctctgctcaggcaccctactctatcataccctgccacgggtggccttggctgctgactagccaggtgaagctaggctgggacgctttagctggggttaaattaaatggcagagccatgccttgctacttggtccctgccgccctgcgtcagtcataaggggtcccctgaagccagcctggccctttctgccttgcaggggcgacaaaagctggcccgctttaatgcccgagagtttgccaccttgatcatcgacattctcagtgaggccaagcggagacagcagggcaagagcctgagcagccccacaggtgggagggttgtgtgggagggtgtgggaagcaggcggggctccaggggtctttcctgcatggctctccctgccagtggtgacctgagagatgggttgtgtggtggagtgtggcctgagtgacactcctgtgtcctcagacaacctcgagctgtctctgcggagccagagtgacctcgacgaccaacacgactacgacagcgtggcctctgacgaggacacagaccaggagcccctgcgcagcaccggcgccactcggagcaaccgggcccgggtctgagtcccaccctccttcccactcccctgtgccctgacccaggccttcgctgaggcccagctctgtcctcttgtagcccaggggcctgagggacaggtgggctgctcctagcctcaataactgccccctgcgggtgttggcctccctgcccccaggtgctgaccagcttaggtctctctctgcagagcatggactcctcggacttgtctgacggggctgtgacgctgcaggagtacctggagctgaagaaggccctggctacatcggaggcaaaggtgcagcagctcatgaaggtcaacagtagcctgagcgacgagctccggaggctgcagcgagaggtgagggtgcagcctcggtgggagggggagccccaggactccagggggttgacagcactttgcacccatagatccacaagctgcaggcggagaacctgcagctccggcagcctccagggccggtgcccacacctccactccccagtgaacgggcggaacacacacccatggcgccaggcgggagcacacaccgcagggatcgccaggccttttccatgtatgaacctggctctgccctgaagccctttgggggcccccctggggacgagctcactacgcggctgcagcctttccacagcactgtgagtcacctatgggtctcaaggtgtggggagatgggtggggctgccgcagggtccaccatgacgctcgctgtgctaacatccccaggagctagaggacgacgccatctattcagtgcacgtccctgctggcctttaccgggtaagcctggggaaggcgtgtccatcttagccagtaggttctgagccccagggggttctgggctctgtgctgaattcggggcttaagatgattagactgacctggtccctgctgcactgctggtgagcaggggggcagtggggcacactgactccatccagcgctgccctgggtttcagatccggaaaggggtgtctgcctcagctgtgcccttcactccctcctccccgctgctgtcctgctcccaggagggaagccgccacacggtaatgtttccatgcccagtgcccacagggtggctgggggccgtgtgggctaggggcagtgtgggtccaggaacacggcgctcacagccccttccctccgccctccagagcaagctttcccgccacggcagtggagccgacagtgactatgagaacacgcaaagtggggacccactgctggggtgaggctccctgggtctccagtccagcctgctcacatgccgaggcggggaggttgagagggcccccagtgtgtgaggaccaaggcgggcggctccgaggctggaacgtgtctttctctatatgtatctttgtctctgttttctggacctgggcctcaggctggaagggaagaggtttctagagctgggcaaagaggaagacttccacccagagctggaaagcctggatggagacctagatcctgggcttcccagcacagaggatgtcatcttgaagacagagcaggtcaccaagaacattcaggaactgttgcgggcagcccaggagttcaagcatgacaggtactgagtggagggggaggtgagggggatgcagttcctgttggcttctagggtgttgcagagagcatgaggggccctgggttctgctgtccctgggaacttcccttgagagccccctgctttatagcctcccttctccccgcagcttcgtgccctgctcagagaagatccatttggctgtgaccgagatggcctccctcttcccaaaggtacaggggccaaagagaggaccaggagtgggagggcctcgagctggggcaggcgtggagaatcccatctgatcgctacctgggtggagacacagacaaactgggccctgatctcagctggcggcttaaagtccaaggtccagcctcactcctgccccctccagaggccagccctggagccagtgcggagctcactgcggctgctcaacgccagcgcctaccggctgcagagtgagtgccggaagacagtgcccccagagcccggcgccccagtggacttccagctgctgactcagcaggtgatccagtgcgcctatgacatcgccaaggctgccaagcagctggtcaccatcaccacccgagagaagaagcagtgacctctctccccacaccctcacctgcaccctaggacctcactggccataggagctgggccactccagacattaatccccaccccaacagagccactggcacaagtgcccttagtgctgccacactccctggcagccaggtgccctggtgcccacccctgtcgagcccctaaggatggggaggttgggggggcaggagcttctgtcccccacattccatgcacctcccctctgtatatagcatctcccccctcctagtgagcaggggcctgcaaggcatcactcccagcccctcgccttctagggcaccctcagcaaaggggcaggtggggacactccaagtggggcagctctccgtacatgcgccccacccccatgagccagttcagccctactgggggctgagcgggggcatcccctcctttgtacatagtctccatggatgtccctgccctgtagccaccagccccttgctgctctccctttaatgccatatggcccctgcctagggcacaggccccaacctgtgtgctggggtccccagcagcaaacactggaaagtctgttttttttttttctttcttcttccccaccccttaattttaactttgtggtaactgagtgcccccgcgtgcctgcgtgttgagtgtgtgggcggcagtgccgttccggaggcctggtccatctggagttttgaggggtgaggggaccagagcagtgggaccagcatggggatcagcttcccttccccacctggagccagggactgtccgggtagccagttttggtcctgccagctgcctccctgatccctccccactctcgccccttctctatgaacttaaatcaaaaaccacttccctccatctcctcctgctcctgcgtggagggggaatgtgtgctggctagggtggaggactgagcacctgagcctggggctggctccccggggtccccgactcagctggtggctgtggagctgagtcccctccccgtaacctctgcaaggccagcacccaccatcactacctgcacctgctgtggtcccaccctctggaggcctgggaacctggctgcagcctgggaaggctggagaggcagacggtgggacccaccagctctctccccatcccgcttcttccctgggggccaggccctacctgtgtggtggtgggtgggctgtcaagacgtgtcatgtacatttgtatcaaaaataaagaagtgaccatga

SEQ ID NO: 7737 - DNA, 1522 bp, Homo sapiens
tccagagtctactaaaaataatttaattagaaacggagttttggcaagggaggcagaagcggctccttttctccccttggccgcccactcagcaaccaacaaggaggaaagcccccgcagtgctcggccagtgccgcgccatcgccaccagggagcgccccgcgcgcggtccacgtggcagaggtcgcggcctcgcggcgcggggaggagccgcacgccacagtggcaggtcccaggccgtcactccgagctctcgccttccgggccgctgtccggcgtgggcgggaggaggggtctccggcgcgagcgcttgacccggcgcgagggctgcagcagcctccgcttcagcacagctgtgggccgggcgccgagcagtcaagggcgggagggcagggaagctacggggggcggcgggcgacgcgaggtggggcgggggcctcgggtagggtagggagggaactcctcaccagccactgtgtcctggctgtccgctgtgggcccccagtagatgctctccccgcgtcggaagtttctgtgcagccgtgtgcagagcgtggccagggtgagcagcaccagcaggaaggtcagggccatggcagcccaggcggcctcttcagtgcgtggggtggggccccgggctgcccgtggaggcgctgctgcgcgaggggccggggaagcctgacttgaacagacacagccccctgggctgccttgcccgttgggcacctgagcctctgtcctggagctggcattgcctccaggcgcccccggcagcagggagacagtgggcacagatggggcattactctccctaccagggattcccgccatggactgcttggccttcaagctccctggggaagcagagggaaacctcagggctgagcgagtgggctggggaccaagggcagcccgcagcctccgcctcttggcaccactagaagagggctgcctgggcccttgagatgtcacctctgtgccagggggccgccagctccgcagagcaaaggccagagccagggcctaaggagaggagagagagcaatcaccctgctgcccctctcagagaacccgagggccaacaagcctgggcccagcgtctctcacctgcacacaccctcttcggcacagcctccctctaccgggagttggctcggagggagcaggccctgaaaggctttcacagtagatccatgccttcttcttcctctgcttcctcctccgcctcctcatcagccagtgggcagcccaggctggctctacccaggccatctccagcgccagcccccatgcagtcagcaccaggggctacgagaggaggtaactgttagagctacgaggaaggtggggacaagcaagaggaaacccttgaattttccattccctgcacacggggccatagccttctgccagggccaggcaagcgcctttcatcagctacatacccgatcctgcgtgaggctgaagtcaggggtgagggaagggttagccatacaagcataggccaggagggcaagctgga

SEQ ID NO: 7738 - DNA, 446 bp, Homo sapiens
tttaaggtgcaattataaataaagcccatggatcgcgatttcaaacaaacttgtcaatctgggccgcagcaaaaggcgatggaggcagctttgcatgtatttcgggtggtgtgactcatgagcattacttgtctcccctagggaaggagcctgcccacccacaaatcactgccgctctggcaccgctgggataatcgaccaacttgagcacccctgccaaaggactgcccccatcttaacaagcaggagtctctgactcttggagaacccctcctcaattgtcaccactgacctggcccccaggtctggccctggggacctctaccctctccccacaagcagagtgcccgggccttttgctgctgcagggattgggggttgggtacacgcgcggcacacgcgtatgggggcgcatgctcagtgcgggggctgcgctcatgtgcggc

SEQ ID NO: 7739 - DNA, 7025 bp, Homo sapiens
ggtcaagttcccttttcaatactggattcctcaaaagaatgctatttgaatctcttcaccatggtttggatgacattcagaccctaataaagacattaatctttgaatcagagtgtacgcctcaaagtcagttttcaattcatgcatcttcaaatgtcaacaagcaaggtgactaactgaacgctagcttactagctttaaactgcttaccaaaaatactgtatctttttcaattgtatttgatgttataataaaaccaatataattataaatagtgtgtttttagtaaatcttctctaatgagtctgatcctctggtttttttttaattacatagttttattcaggcttgtaatcaggcctgagatgaataggtgaatgatgaatagtgttgttggttttgttgttttttttttggatactgggtctcactttttcacccaagctggaatacaagtggcacaaacatggctcactgcagtctcaacctcctagactcaggcagtcctcttgcctcagcctcaacctcctgtgtagctgggaccacaagcatgcacaccacacctggctaatattttttagagatggggtctcaccatattgtccaggcggatttcaaactcctgggctcaagcagtcctcccaccttgacctcccaaagtggctgggattacaggcatgaaccaccatgccctgataatttttttttaaagataacctccttttttgtgtgtttttaattttactagatttaaaaaaagaaaaaaaaaacactaaaggtcctttgtgatttttattaccctagatgtgctttctagaaaaagaaacttttggtaattcaaggagtgttgtggccaaaaattgtaatatctatgaagacacagaaactacatttatacttctcattcagtaaagctatgtgttttttctgtttagtacaaacagccaattttgtagttgtatctgactattgatatgagcctattgaatatcctagtgttctcataaataattagaaactgctattatagagggttaaaaatgtaatttttgcagttcagtttggccacagaatctcttgcatattcgtgaaaatagtgtggatggaatttcataaacttttatttaaactgagttgttgctttatgtcattctgtaaaatattttcttttcccatttgctttattttttagaagaaaatggtgtatttattaaaactacagatgacaccacaacagataattacattgcacaaggtatgtatgcatatatgtgtgtacatatgtacatatcaggtcaaaaaggcatatagcaaaagggtaggaagagaagagattgccatggtagcctacttaaaaatacatttcatattatatgacaacaaaactgtagtaaaacttgtttatcagcattcacacataggaaatttctgttaacatatgctttgttcacatctgtaatatatggttatccctttgaacgaactgtatgatcttgaaccatgtgaataaaataagatcaaattatatatgataaagttatatataattttatagttaagataaaattttattctaattcttttaaaaattgctcattaatatatgatttatagcaattccatttaagtaaccagaagacctcattcttcagccaaaagaatttattatatggcctttcatataatttaggatatgtgcatactttaaatctagctgtggtagacactaaattcatattaaaggatgttaagatttaaaatatcagtgccctaatgtctaaggttttgttttgctttttaaaaaactttagattctagatgtgttttttgagtacagatgaaaagaagactgtagagtgttaagtttgaaagagcagtggcctttagttatcagctgtaattttttattagttgctcagcagtttaatgttgaccttcaaagacaaggaaacttaaatttcttttaatagtatatagtttaaataactactgcatactctttgcaacagccatgttcatttggcatcttcaactaatttgataacttaaattgatacattctacctaatttctctgttggagggaagacaaagaagcattatgatacactataaagaatattagatttgctgggcatagtggctcatgcctataatcccagcattttgggaggccaagttgggtagatcacttgaggtcaggagttcaagaccagcctggccaacatggtgaaaccccgtctctacgaaaaacacaaaaattagccaggtgtgtcagtgcaagcctgtaataccagctacttgagaggctgaggtgggagaattgcctgaacccaggaggcagaggctgcagttagccaagattgcaccactgcactccagcctgggtgacagatcgagactgtctcaaaaaaaaaaaaaaaaaaaaaattagatttaagagtattatcctatgcaggcgttgttatataaactcagccaggtccctcccattcagcaaaattatcttaaatcctttttagaataaagtaaaacataaataagctttaaaaatattttcaaaagccaagagcacagtagcacacacctgtaatctcagctactcaggaggctgaagtgggaggatagtgtaaggattgtgtgagcctgggcaacacagccaaactccatctcaaaaaaaaaatttgtttttaatctgtgagcctttctcataagtaaattaaggaaattagactaatttttgtgggctcttctataacttttaaattatatggttattctaagaccattggtcaacacataaaatcttaaaatgatagtactatgcaaacccaaaggaaaataattcattctgtcaaagatacgttatatgttcattgcagtgctattcacagtagcaaagacagaatcaacctaggtgcccatcatcaatggactggataaagaaaatgaacatatgtactaaggaatactatgcagccataagaaagaacaaaatcatgctctttgcagcaacatggatggcactctaggccgttatcctaataaaactaatgcaagaacagaaaaccaaagccccatgttctaacttacaagtgggagctaaactttgggtactcacagacatcagatgggaataatagacactggggactactagatgggggagggatgggatgtggcctgggctgaagaaccacctgttgggtactatgcccactgcatgggtgctggggttgttaggaccccaaaccccagcattacacaatatacccacgtaacaaacctacacatataccctttaatcgataaagaaagttgaaattattttttaaaaaagaagaaattaccaggccaaaaaaaaaaatctatatactgctgatgatactcactattaacgtattacatcagattttttgcctcagatgctcctagaacttgtactaaatctggatatctatcctttgactaggtgcctcattagatttcatgcagtttcaaattttagatttcaaattataattctgatttgatggatggatcccaggttgtcctttttgctttatgtttttatgtaaagaggcaacagttcagcaataatttatatttattttgaatgtaatttatttttatgtatcaactttgccttttcaatacttttttttttttaagagacagggtctcactgtgttgctcaggctagactcaaactcctaggctcaagccatcctgccacctcagcctcccaagtagctgggacttgggtcccagttacacaggtgtacgctactgctcctggcagcttctgaatattttgcttaagcagatgttaattactttccctgaagagataagatttgaccataacgttcatatataaataatcaagggttgaacaccaggcaaaatctcattatagtattggatatctcagttgttttcatgttgtgatttttggaaggatacagttctagaatcttagctggcctcctttcactcaaaatgaaaaaactaagtgctgtgatgagaaataggcaatgagatcataacattgaccttatgtcagtttctgtgtccaaactctcaagactttgtgttgtttttctttgttttgtgattactaaagacccactgtgtatccaatactgatcactcagtagaaatacaggtataaaaatgaaagacattgtccttaggaacttagaatataacttggggagaaaggacttacacacattaaggaactataagaaaagaaaaaaaaatgacaacttaatcaaactctgagtagtgtagtgtagtattaacaacaatgaaatgtatgaagtgactagccccagattgacagatggcttcctacaggagacgaaatagagtgtggcttgaagttgaagaaggtagaaaggaagttctgattcagcagtttaatatgaaaattacataagtgaaggaccgtgaaaatagaataaattataagaattaagattggatagtcaggttgaaataatgtgtcaggatttatacttgagataaatatatagttataaaagtatttggcttgtaatttttaagagcatgctaactttgtatgtgtatgttgcaggaaagagaaaaagtaatgaaatgatcacaaatttaggcaagaagcaaaagactgatgtcagtactgaacatcctcccttttattacaacattcacagacacagcattaaaggaatgaatatgccaaagtaagacacccagtgaatgacaaagtatatatattttatattttaataatattgtgatttaaataaaaatacaagaacctgattattttttctttcctttcctttttgcaggttaaaaaagtttttgtgctatttatctcaagcaggctttcgagtaagccgaactcattttgacccaatgggtgtacgcacagatgcacctctgatgcagtttaaatctatccttttaaagtacagcacccccacctacactggaggacagtcagaaagccatgtccagtcagcatctgaagatacagtaactgaaagagttgaaatgtcagtgaatgacaaagcagaagcaagtggctgcagaagatggtaaacgtagagaagaattggttctcaggtgtctgtatagatggcctaatagttctctataccaactgtagttctttttctgttctttcaattcagtagagtaaaaataaaaaacagtgtcattttcattcagaaactgagcagtttctaacttagctggtttgggagctttgctttccaagtttttttttgttttaaggcaaacttaaaattttaatggaaacatttcatatgaagccaagtctcactgagatcaccctactgcttaataattcagaaaattttcacatgcaaagtgtttggaattttatgtatgttatgaaagccatcttttacaattcttaatcacatctctgcctaaactgattcatgatgtttatgttttcctgtttgtagtgtacaaaatgaagctgaaggctcacatgttaaaatgaccctgaatagaataggaagaacaatgttcttacaggtcataatgtatttcacaattaaaaaactaaaatatgtacccatttttaagaaatcatacttctctccacattgatcttttcatttcttactagcttttaagaaattaaatacttgcctgagatagaaatactttatttttgtaactttaaggtctaaatgactaaacttcaaagtaagattttgtcagaataaattgagaccattaatctaatataatacttgttcatgagcactgaaatcctgaagaggagagatttggttataaattaaaaaggttgggtgatcttaagtgcctcagttaatgcacgtacagtattcatttggttggttgtactacctctcagaagtaaaatttgtcaccttatggaatgagagtttttgggtttgggggttgtttttttgttgttgcttggtttggtatttttggttttgtgtgtatttgtataaattttctgtataattagcccaggctgatgtaactataaaaattagttgaaaaaaaaaatattgtttccttaatggaattctcacttcatttgaatataagattttggatgaaaggatttggtataaagtttgggtttttgtctcaaggatttgatccatatttatccctaaatatttcttaagggatgtaactttttataaccattaagtggggggaagggggtggagggggtggtaataattataactgaaaggtttaaatatactacctaagaaaaaagtacttctgtgacatatacaaaaaaatctagtggataggcattagatgaatagagaatattaattttgcagaaatgaaggaaaatctcttcgtgctagtacagcgtattcccaagagagtttattttcctttctccaattaatgtggtcataaatttcggtaaaatcaagaaataggtgaagtgcaagctagtttctataatgaccattaaaaaaattctgctgtgtaattcttgccagttaaaattataacttgcaaatgagcagaataaatgaggtttttttcaattaaaaattactataaatccaggaggcaaactattttagcactcagattatctgatttaatacatattattgaatatcagtctcaaattttgctaaatgcttatcagcatgaaatatgttgatcagtgatgagttgggcttaatgcaaagatcctaatttaataaagaaacctgtaaattactgttacctaaaatatatgtgtatattaatttcacatataaaggtagatttttcaaagaaaaatttggtaggcggtagtttagaactctgatcaggtactacatcaaccaaaagaggaaatactttaaaaattccttttagcaacctgagcaatcttattctcgtaacaatagtagtaatttgggacattgcaaatgtttatcatgttgtaaagtagcatcagttgtatcctttcattaaaacttgataaacaaaagaacgagttaagga

SEQ ID NO: 7740 - DNA, 443 bp, Homo sapiens
gagatagaaatactttatttttgtaactttaaggtctaaatgactaaacttcaaagtaagattttgtcagaataaattgagaccattaatctaatataatacttgttcatgagcactgaaatcctgaagaggagagatttggttataaattaaaaaggttgggtgatcttaagtgcctcagttaatgcacgtacagtattcatttggttggttgtactacctctcagaagtaaaatttgtcaccttatggaatgagagtttttgggtttgggggttgtttttttgttgttgcttggtttggtatttttggttttgtgtgtatttgtataaattttctgtataattagcccaggctgatgtaactataaaaattagttgaaaaaaaaaatattgtttccttaatggaattctcacttcatttgaatataagattttggatgaaa

SEQ ID NO: 7741 - DNA, 38855 bp, Homo sapiens
ggaaagggaagcggacgggcatctggaatcgctgcctctggctttctgttttctactaacaggatttggtcactggttcttcatcttttgtctgttgcacgcatcccgccctccccacttgcttccccactccttggatccagccctgtgggcattcacgtcagttctctgaccccgccgtgagccccgctccgggtccccgggcgggcttggcacggaggcggtaactatggagaatatggcggaggaggagctgctgcccctggagaaggaggaggtggaggtggcccaggtccaggtcccgaccccggcccgggactcggctggggtcccagctccggccccggattcggctctggactcggctccgactccggcctcggctccagccccagcccctgccctggcccaggctccggccctgtccccgtccctagcctctgcccctgaggaggctaaaagcagtaagtgcagaaggcccagatctttctgctgcagaagagagaaagtgcgccttgctgggaagtaggggaggcccttcaccgggatggtttttatggggcaaggcaggtttaggaaaatggtggggaggaaagaggggcccgtgtagcggctaaagcagggttacagaatgggagacggcatcttcataagcctcgaggatgtcacggtgagggatatgcggagagcaggaatgctgcagatagaaggaaataatgaggttaagggctttttcttaaaagggagtctttttaaggtacaaaaataggaagttacacataatttggtagtttcccgcagtccagtctgccatggttaactaagttctttcaaatgtgacatagtaaccgaggcaacctgtttacggtagtagatcctagctgccaacatttctaaaccattactgtcaactagcttttctgcttcgacagccacaaggagatgagtttttctcatttcagttttcttttcccccgctagcagcttgcctccgaaaagattttgaggctgagtagtagtttaggaaagagtcgactaaatttacggatgttttcccccatacataaataccaattgagttttgtactccattccatcagaaatagactgttgagaattaatggcccatattattgtgcttctgaatgtgcctgcatgttttctaagtggtggtttattggaccatataggaatttaaaagactgatgagtaacactttcttaaggatcttctaacattttaaaatgtaaggtctaagaaagacataatttaagttcttttaacatttagtttgtggtcataagttgacctttatgtgctttctgaattggaacttaaaataatctttaattcattattttttctacttctaggccagttttgagtttaatatttataaaaggttagatagttatagataggattattttgcagttttgaaacaacatacaaattgttatagatttcagagtagggctaatcacaggaaagacaaaagtcagaatgcttcaggtaagccccttctcattatataagatcagagcttgtaggtacaaaataaggccagttgtttcttcaactacagtgggtagggatcggggaggcatggggagctgagagggttccaccctcctaagtagcctcctacctcacttcgaagttgtatttgtttatattagtcagaagtggttcagcagctttgggaaatgcatgcattctctacctcctcaccatcaaaaatatgttaaacatagaaaagacttatctatatattccaaaatttacaaatatgtaatttgaagaaggtatactatatgggaaactgaaaatgcattagtaggacaaatatgtaatgattgagaagtctgaaatgcattagaactaatacatatattaatcacattttaaacattatttttagttgatctagttagtcctttgaaatcagtcataactaggtaagatgaagatagcctatctgaaatagaattgaaaattgaggaaaaagtaatagaataagttgtaaaagaccctcctagcatcttggagacatctaatttaacaagaagtttgcctgttgacttctggattaatagtgtgttacaaaaagcagattgagtattttgcatacagattgtctgatacgcactatcttaaaccagaaggtgatttcagagatgtttataggcatatcatgcatttttaaacagatcttcaagagtttcttcagtagtagaccacaggatttttagttttctaacttaaccaagctcctttctcttattttgtgctatttaatagaataatttcaataggcacgtctttattgattgctgtttatcttgttttacatacacagatctttgaactctggaaccaaaagcctttatggttacaaattagataggttagtttgtacacatggattcatttctggaatattgctgtctgacctagcaaaagatttttatgaaacatgaagaagttttacctgtttatagaaattatatctcattataactcatttgaccagtatctgatataggaaattaaccaatattgtttgttgcttctttaaaaatgaggtgaataaccaggcaccagcctatactcccagctactcaggaggctgaggcaggaggattgcttgagcccaggagtttgaggctgcagtgagctatgattgagccactacattccatggaggctgggtgacagagcaagacccatctttaaataataataatatgaaaaattaccttttaataaatttgagcaggagtgtctgatagtgctgaattggattccaaaattattgacacagtgtgctactgcatccaaaaagtctaacaatttttttaacttcttgtttaacaaactttagtgcctcctatctgcaagctactgcattaggcacttagccatcagaaagatgaacaagaaataggccttgtcttctgttgattatttgtggggaaagcgaacaaggacacaaattatacaaatgggtaaacgaactgatagtgaagctcggagaggagtagtcaagaaggtgctaatatcaagaattgaattttaaagtctcaaggttttaaattgtataacctaataacataatattagagagccctgtggtttatcccaccatctcctgtctccttgggctctttacatatcagtttctcctaatcttaatatatattcagtccccactttgtaattgttcctttctcttggaatgcacatatattcaggttccccatacttaaaaaaaagcaagttacagtctgattcatttccttttttataccgtcaaacttctcaaaaaaagaaaaacctaattttctgtatttcctttccccttccaattctgtttctactctgaaacacctccctgaacctgttttcttaaaggtcaccagatgtgctttcttgatctctacaactgtttgtgatattcagtgttgaacgttttgcgtttatagactcttctcccttggcttctgcattaccttgattccccttaccatttattctttctgaatctacattcctgattccttctacttaatttttcttataaatatctacatctctcatacctcactaccagattatatctatctataataatcagtagcgggttcagcaacaggtagggaatgtatcccctacccaccccagtcagaacatgttaaacttattttagacttattcatgtatttccaaatttaatttaatttgaagagtgtgtaatgcttgagaaacctgaaaatgcattagtgggacaaatatgtaatgattgagaaatttgaaatgcattagaattaaaatataaatcacattttaaaattaattttacatagcctagttggttgtttgaaatcagtcataactaggtaagactgggtcttggctttttctcttatttttcacactttttttcttaggctttcttatttattctcatagtttcacctaatgtgttacttacgatttgtatctctagaatccctcctgagctccaaaaacaaattgccagctgcctattatacattattgctggaatactgtaccagtagtacatcaaacacaccatgtcaaaaactaaattttcctttctcttttccccttcctttctgccataagagtttcttctgtcttgtttgcttaatataccattattctcaaccacataaactcaaaatcttggaatcatctttgattttatccttcacctttacttctcatatcccaagttctgttgcttatttttttaaccttctattctgtcccttcccattgctaattttctctgttactgatctttggtattactggcagagatagcctcctgaaactcattcagatcgtataattcacttcctcaaaaacctgcagagacttaccattatttgaagaataaagttcaaactaacttgcgtagaatttatgttttccttggtctgtactgcatcttcagctgcacatacttctactgactccatccccccaaacataccacattccagccaagggtggggtggcatggttgtatgttttctacacatggatttgttcatgaggttacttcagttcatgaggccagttagcaaatctctacttaatagtgttcatttcatcctatctcatatgatagttagaagttgacatattgccttctcccacctgattgaaagttctttgaagatagaaaacatgacttaacgtttccttcagtattttgtataggacagaaacatttttcatagaattattttgactaattagataaaattttaaaactaagtttatacagtggggtctccccccaacttttcattctaaagcacacttgttattttataaaccgagttgtggcagtattccccatctaggtccataacactgtgttataggaaataaacttctatacgatgtgatcaataaaaatggaactagaatacaaactgttaaagcataatcttctcaattttttttttcagagagacacatctcaattcaaaggcagcttgctgatctagagaatttagcttttgtaactgatggaaattttgactctgccagctcattgaactcagataatcttgatgcaggtatttccatgtttgggttttttttttttcttagtttctaataatttatcatctttcaattcacaaaaataagtttggtaagagtagacttgtttattcttactgaactagaacagtggtaaaatacagttttttattcaggaaattggcaaccgcttatgtgcaaagttgctatggaaataagttattttacaactcctcaagaaaattataatttcacggatgtctaggggctgtctattcggcaagttaggaatggcatttggctacaagtaacagaggtcccaaaaaacagtgtcttaagaggttaatattctgtcaggtaaatgaagtcccaagataggcaatttagggctggtatgagagttccacgttatcagtgccccacactgctctctttctgctctactctccttagtgtttggtttgtatcctcaagatcgctgactgcgtggtttttttgaagtagacagtgtaaaaataaaaattgtacctatactctattgtactgtatgtgaaagatatttgttgggttaaaaattattaatatgagctgacaggtatgtaggtataagagaaaaaagaaaaaaattactaaatgagttattaatgattcttgctgtatattttattgctttaaacctgaatttgaaatttaattctttcatctatactatcaaagtttttatttgagatacattatatttctaattaaataagacatttttatgatacataatctttttgagaatatgttaataaagaaggcagaacttgtaaattcagtaatggatacggtggctgtaactatgcgccccgtctcagaacagcggttatatcaaatcccatctattccttccacttccttcttccatttttctaactccacatgttaactgtttttgttgttgccagtttagtagaggaataccacagcacatacttttgctctttgtccaatccctgtccttttgggagtgtaactgctgtcctttcagctgtccaaaatacagagtgatgctctcagtggcagaaaatttggccggaaggatgtcatacagtttatcacttcttcaacctttgttcccagtaacgacaaatgcatccactagctacagagagggaaattttagggtgaaaaaacaatcactgatcatgtgctgcaacaattactgttaactgtctcctgggtcaagaataatgacttctccctaaagttaagaaagactttaagaagtaggagggggagcccccattaacctctttgtagttgaatccaggcattaataactagaatattctgttgtttattgattcttttttctttttaaggcaacagacaggcttgtccattgtgccctaaggaaaaattcagagcttgtaatagccataagcttcgtcgtcacctccagaatttacactggaaagtctcagttgaatttgaaggttagtatttttgtgcttgcaaagaagtaatatatatgaaattcaacatttattaccagttttggcatttttatcatgagtataatcaaatattttcagtttaaaatgtgaggggtttaatgccctcatttctaatgtatttaataaaacaccatatagctttataggcagtagagatctatatgacacagtttagttgagcaaacatttattatgcatctgttgtatactgagtactctgaccctgggagtccattttgcttcttgaacaatgttttaataagttttccttttattttacacatattttggaaggtatagtacatgtagtaaaataagaaaataaaataatttgtatgaatattggaaaatacaagataatatctctttctgctgatggcttaaaaaaactactggagttaagagaattcagaatggtgggatacaagataattcagaaatcatagccattttctacttcagataaatggaaacaaacaaatatttcaattataatcatgataaaaatgacacaatttgagggaataagttcaacaagaggactcatcatgaaaagaataaaatcgaaggacagaaaacaagaacttttcaagttaaagggcttcctaagtgaattatatgaattattatagcatttttgggaaaatgctataattttcccaacatctgacaacatcttttaaaattaaaaatacgcatatccatccaccatgcagttcctctcctaggagtgccttagaagtaaaagaattgaggttggacacagtggctcatacctgtaatctcagcactttgggaagctgaggcaggaagatcacttgaggccatgagttcaagaccagcctgagcaacatagtaagaccctgtctctataaaaaagtgaaaaaattagccaggcgaggtggcctgtgcctgtagttgcaactgctagagaggctcaggtggtaggactgcttgagtccagaagcttgaggctgcagtgccataattgtgccactgtattccagcctgggcaacagagtgagactctgtttcttaaaaaaaaaaaaaaaagaggaagtaaaagaatcaacaggcacggataaatgtacaaggatattcattgcaatatttacttagtaacaaaaacttggaattaaaagagatgattgaataaattatggtatatacataccatgaaatattattatgtagccattgaaatgagtatattagatatataccagctaacttagaagtatttccatggtcaactactaatgaaaacagcaatttatagggaagattttataatattccatttggataaaacaaaaagtcccaccctcaaaagaaacctaagtatcaatcttaaacatatatacatttatatttgtatatgattatgtgagcacagaaattgtaaaatatggttggagtgtcaaccagccttgataaagcagctagtaagagacatccagaaaagaagtcggaactatgctggaactattttcttagtagtactactaaaaagattatcattagttatttagggaaaggggaattagatgctaatttaaggaccatcttgtcttttaagtttagttctatataagaatgtatgataaaccatactgacttcttaggaaaataaaggtctcatttcaattaaaaggatctctcatattctttacttaggtcattgtttagcctttaggtttggtctccctccaagttattctcttttcttaaatattttcttgtgatatttctttacttactcatggatgtggttctctcatgtacattaggctattgggttctttcacatggtattgctctggtagatggtgaagatatgatagtttttgtctcagtgagcaggtttcaaagtagttgacgtaaaattgaaggtagaagcaaccaaatctgccgaaggaatggatgtgaggtgtgagagaaagagccaagaatgcttgggtttgggacttgagcaagtagagaaatggagttggcctttactgagctggagaacagtgcattaggaccaagtgtgggaaagaaggccggaaccagaaatttgggcatttaaagggtgagatgcatctaagtggagatgtcaagtagcccataggttatatgaatctggagttcaggaagaatgtggggctaaagatatgcatttgggagttgtcagaagacacatggtatttaaagccataagatcagataagtaactaaaagaatacatattgatggaaaaaagaagtcatccaggactaaatcttggagcacttcagcatatacaagtaagaaatgatcgaatctaaggtataagaaaaatgcattagagatgacttaacaggctttgagttaagagcaactgtaaggcattatcattcaaaaaaagtaaagagacctaatgtaagataaattaccagtttagtcttgacaagtaggttttgagatgctgactagataatcagttacatatccttaataggcaattagaaataggaatctggctcttaggaatgaattagtacctagagctttaatttgggattcctttaattggaattgtgaaaggagctaagttgccaaggaaatgagaaaaaaaatcacttagccacccaagcctatggaatttctacattttagggcatgagagaaggaagaggatctgtaaagaagatgaagaaaggtgggaagaaaaccaagatagtaccatgtcatagatgaagaagggtctgtataatggcaaatatatcaatagcatgaggtaaaggtgaagcctaagaaaaagtcaaggtggcagagaataggataaagctgaatcccaaagatgctaaatgactaatccaagataaaacagatagtcatggcggaactagaattcaaacctggatccctctgtatttgtgtatatagataacatatacatatgtatatatgcatacacatatatctcatgtataataattgtataaactaaagcaatctcatttgagtaattatgacattacaaatgtaagggtaataccaattcttataaaataaaacttgcttataatttttgataactgaatatttaatgaacaatgtatgataaccagccattctttattttaggttacaggatgtgcatctgtcacttaccttgtcgaccagtgaaaccaaacattattggagaacaggtgatcagatattagatttttttatttttaaatttagtcctttttaaagaaagcataatttttacttactgtgaaactaaaatgtgtatgttcagcagtgtggtttactttaaaattctctgagtcctttcagattatcataatgggaaaactatgaaatgtatgaaaaaaaataattgttatattgaagttctcattttacagtttttagtttaagtcagataaattgctcctttgtgttcaaaatgaaaattaactcatttactaattttgaaatggaaaatttagagagtagttttttctcttaaaatttcggtcatggaataggagcttcaatttctgtgatttagtaaatatcttagtatgttttgatttaattcatcttccccatgtccttccttttgagttcaatcttagagaatcaagaaactttcagaaatcttagtaactttttaaaaaatacatgtgttttatttttagggtagatttgacctaaggggaatacaaactataaaattttttagtgacactatcctgaatgcatattggcgtaatgagttcccattattacattttcttttgagccactaaaagcagtatagtgttgacaaaaaagaaaatattctgtaagtagtagtcaaaacagtacctggtccatcagcctagtctaagatattttgaatatgataatcacagtaccacaaggaaccttgggtaatgtgcttcactattttctatttgctgtaagggtccaagtaaaaaggaggtagcagcactaagagtaaaaggcatcaaaactaggaaagagccattggagcagtcttttgttctcagctaaatgagaaattatgaagtgaaaatttttttactcggataagtacgcttctaattatgtctctaacattcagtggggtactggagctggctcaaatttccagaaatctttcaagctggttgtttagtatggcctccattaaaaattaagttatataaacctaaaaatgaatgagttatattaaaaaacaaaggtaatgaatgttcacttcatatcattgttctcctgtattttaatattatctgtgcacttacagttatttacatctgttatgtctgctgggtggcagtgctctgtaatggtgtaataatgcacatcttttcctaaattcacattcagtgatgttacattgatagcttaaaatctatgacagttgtagcttgaaattggctatagcagagtatttatgccacagaaatctgcaaatactacaaatcagggctttattttcctggagagccagttaataagcatttaccagcacaccactcctaacattacaccatttttaaatgcaacctatagaaaatacaattattttctgattggaatgaatgagaaaagctaggaaattaaccttctggcctattgtaaagtaagttttaaaagtatatgtaaatgcaggtaaggaagttaagatacttcaaagtcacatggcaaaattaaaattatcttctataccattaaatccaagacactaatgtacttaaatttgcaaacatatacttctgtttcattgtcttagcaacttatttaaattaaatactctgtttgatagataaccagtaaaatgggagcccattatcattgtatcatttgttcagcaacaatcaccagaagaactgatatgctaggacatgttaggcgccacatgaataaaggagagactaaatctagttatattgcaggtaagttgagcaatctcattaacatattaatatgtaaatccttaaataatggtccagttattattttcagacatcaggaatataaaataatgctgatttaaccaaatgatttagttcactagtccattacttcagcttttggtttctttctgtaaggtctccaaaaacattttaacattctcaatgtatatatttaataaatggtgtagaaaaaagtaagtgacactcaagtgactacaggtattttaatgaaagattatagaattgttttcccagtgacagcttttacacccttaactgtcatgtatgtattgttggaaaacactagaaaaaaagatacagtgaaataaagacttattattcatagtgatatgaaattattaatagcttgttactacttagagatcccttctcaagaattaaatcaagcactaatggcctaaagcatgtattatatgtaatgaataacttctctcctctgtgtccagaatggcactacgtaccattcctttaagaattgaaaaaaaaaacagtcactgaactatttttctatgaagcataattttctcacagagcctaagttgagaaagtctgaccttgtgagatatgcaacatgcctcctcacgggtagaaaagggtatgtaacacagtgctagggaaagttactattattttgcattttagaaagaaagatacagttgccatttagttaacattccgactgtaatgttatcaagaaatccaaacataaaggatctcatttcttaaatatttaaaacatatgcacatatatacacatcaatattttattagtttatagctaaatgattctaacatactaaatgtaaaatcattttttcattactttgtagccatttcaatgtaatttgtgacttgaaatcattatgagaaaatattctgaagtctcccatgttcaggaaatagagtgattcttagtaagccatgctagctaatggaatgcagccatatggagttactcattttctaacaattataccatagtgaaatatatttagcaaacaatgtagtgtttgatgaaccacaaaggtattttaggattttgtgctttcctagggtgattgttcttaggtatcataatacagatgtattgatgtgctggacagtcaagatagtaaattaactttcattaatcagatgtttaactgagtgttactcttttgtagagagtgctgaataaatcagttctttggttttggtttgtttacatctgccaaaccgtttgcattaacacaaaataatataaagttatttttcaaaatgtatatttattgttttagatgtttacaattattttgtgttttcttggaaatcttttgtttagaattattttgtgtttccctggaaatcttttcttttttccatcttagcttccactgctaaaccacctaaggaaattttgaaagaggcagacacggatgtacaagtttgtcccaactattctatacctcagaaaacagattcctattttaaccccaaaatgaaactaaatcggtaagataaattgaaaatagggttatgggatgtttcaaattattataagtgtaccttctcttaacctttatgttctaatatattaaaatttagaactaggtgcagaataaaaatcatctgttttaacatttttctcagaagaattgtttctttttttctaacaagccgatgtctttatcagagaataagataggcgtaactttatataattactgaacaagctggtacttctgtgagcaagttttctttataaataaataaatacttgttaatagaacccaactggattcatagtttaatttcacatatttttagttcttatagtattaaattcagaatatgttttcaggtctccttttgaaatagtttgtacagtaactaggaacttcagttcactattcttaaatgaaataaaatctatgatggtgaagccatggtaaagttatttcagattatgatttccttctaggcagctaatattctgtacattggctgctttggctgaggaacgaaaacctttggaatgtctagatgcttttggagccactggtaagtgaggacacttttttggaaccccattttatttattcaattttacagtattttttcttagaaaatatatatgggcagtgatgtaaaaaaattaaagatccaaggcaaaatttttaattttttattgtgaaaaattttaaatgtatattagagtataataagtgagtctctgtgtatccatcgcttacttcaaaaatgagtggttcatgctcagtcgttttctcattgtcctcatacctcatatcctaatcttttgatatccattaatttgaaacaaataacagatacatcatttcatctgtaagtatttcagttggatctctaaaaggtaaagatttttaaaaaataaaaccactatactgtcatcatactttaaaaataaagaataattctttaatatcaattgtttgcccaattatctcataatatgttttaaaaatcaaatcagaatgcagacaaaaactgtatttcaggtgtctggtatgtctaagtctcttttaaatctatgggtccttctatcattttctgtgtgtgtgataattatttgttgacttaacatgtcttttgacccatagagtttcccgcagtctagatttttgctgattgtattgttatggctcataaaacatgttcttctatctcctgtatttttgtaaattggtcatttaattagattcagatacaatttttttttttttttttgcaataatacttgtttgctgcaatcaggcagcacctgatgtctggttgtgtctctttttttgtgttgtgatgatcattgcctagcctttagacagtggaataaagtgaaattttaaacattgagaatattcttctcaaaagacttaatagtagagaaaagataatagaaacagtagaaaatttctaaaaagcctccgtacccaatccaggtccttctttataaagattataagagtacacttttggggagtttgtgccaaaggagtgaaagcatgagttagctctccttcctaaactcctctcctcagggaaaagtagtggttaaaagcatggactgtggaaccagactgcctgagttcaaatcccagctttatcgctttgatagttgtatgaccacaggaaattgtgcctcaatttgctcatctattaaaagaggagactactgctactaccatgatgatcagcattagtaccatctcagtataaatatggtaaaagtgatgaggtgatgcttctgattatttcccaagtcgcttggatttgaaatttgaatcatgttattactccttcttttcctgttactcttcccatatctactcagccaccaggtctgttctaatttttcttttctaatataactcacattttccattccatatccaccaatttaatgatttcatagcaagcctattgcagtagcttctaaatagtacccttgcttccagtcatttctctcctccagtttgtcttgcctgttactgctaaacagctattcctctgaagcaccacattaatgttatttatcaatcaaaaaagtcattcatctttattgccgggagtccagacttctcagactacatttaatatcttccatatctgatcctaacctgcttgtccaaatttatttctcagtattcttcaccatacaccgtttttctttactcttttgagacagagtttcgctctgtcacccaggctggagtacagtggtaccatctcagcttgctgcaacctccgcctcctgggttcaagcaattctcttgcctcaacttcccaagtagctgggatgacaggcgcctaccaccacgcctggctgatttttgtatttttagtagagacagggcttcgccatgttggccaagctggtctcgaactcctgacctcaggtgatccacccgccccagcctcccaaagtgctgggattacatgtgtgagccaccgcgcccagcctcttaactcttttttaaatctgaagtcattaaagctaatatctaaggaatatatttccagcctcttcttttaatgtgcctttgtaaacttagatcaggtctggagcagtcattttgcacattttgccattcctaaaatgaggatgtcagaacttacctcacaagcttgtgaaaatatgaaaaatgcgtatatgtgaagtccataacacatggtatttttccattcatgagacacgtgtatggagaagatggtcagtatttccagtacataaggggtttactaatctatgttggctgggcttgtgttgccatctcccattttgtaatgaatgtcccttatgactttaagctagtagatatggaaaaactgtgaaaaggggcccttttggtctgaattcttcctctaatcattcgcttttttgtttttgtttttgttgttttttttttttttttgagatagggtctcggctttgagatggggtcttggcaccatctcgactcacttcagtctggacctctaggaggtgatcctcccacctcagcctcccaaaagtagctgggaccacaagcatgcgccaccatgcccagctaatttttgtatttttctgtagagatagggatttgctatgttgcccaagctggtctcaaactcctgggctcaagtgatccacctgcctcagcctcccaaagtgcagagattacaggtgtgagccatctcacctggccacaatttttttttttttaattcacaacaatgctattgtgcagtgtttgaaaagtgttggtccagaaaagtttttcatattttggtccatgatggtaaacttcagcaggaggtattccaacttcccatcctcccttcaagcagagtaatcccatttgtataaagtattccatggtcagaaaaaaagcaaaaaagaaaacattttccactattcaacaaaataaaaagcatacatagagattttatttgaacaaggatcataaaataggtttagaagaagtattagttaaaatctgttagacagatttttagttataacctttcttgagaagctttgtagtaagaaggaataagattcatgaaaacattaaattttgaaataatttgttatttataaaactgaatgttgttataccatttttattctttaaaattattacaattataaaactcattttcttcccatttttcctaagggataatgggattacagtgggcaaaacatcttggaaatgcagtcaaagttacaatcaatgacttgaatgaaaattctgtgacactgattcaggaaaactgccatttaaacaaattgaaagtggtggtggacagtaaggaaaaggaaaagagtgatgatattcttgaagaaggagagaaaaatcttggtaatattaaggtgaccaaaatggatgccaatgtactgatgcatttgagatcttttgatttcatgtaagtagaaaagacttgccgtgtcactttctaaacttatctgaaattttggggacgaggagtagttaaaaattaagacagttttttgttgtttatttatttaaattaatgccattttttgacattggcctaaggtatgcagtatgaaaattttctagtatttgaaataaaatgcctgggcatgtgacttttcctctaacccgaatttatttttacatgtctgatacatcatactatcattttattacttaatttcaaaacagaattatgtacttaaaatatatttgcaatgtatttttaaatccatggaattttataattagaaataattacagtggtataatttttgttactaatatgactttaaaatgtctatattctttctgattttagacatctagacccttttggaacatcagtgaattatctagattctgcattcagaaatataagaaaccttggcatagtgtcagtgacttctacagatatcagttctttatatgccaaggcacagcatgttgcccggcgtcactacggatgtaacattgtccgaactgaatattacaaggaactagcagccagaattgttgtagctgcagtggcaaggtaccaaattgccaacagtgtacttagtgtgtttcagtgtttgataaaaagagataatattacaagaagtacttaccttattcaaaatatgcacaaaatataaattctgtattccttatctgtaatactggtttttaatcttacgtggtatctgttgtaattttatttaaaagtttatacctgaaatattcagtttactctccaattaaaatgttactgaaataaagtataagaaagaaaaggtaaaagtgaaagttaatttccagtttatttcaacaatgtaggataaaggatagctatatgaaaggaaaagcaaaaactgttttgttttgttttttcaccatgttgcccaggatgaaacaagactcctggccaacatggtgaaaccccgtctctactaaaaatacaaaaattagctgggcatgttggtacacacctgtaatcacagctacgattataggttgaggcactagaatcacttgaacccaggagccacatgctgcagtgagccaaggttgctccactgcactccagcctgggcaacatagtgagactctgcctcagaaagaaacagtcatttcttttatatccattctgttttatcttctttatttatatagtttgaataaaatgatggcttacaaacttgattctgcaaaatggtcttacaaaatgggaagttctctccatttctcaccaggatttccaaacagaatttgaaaacagttattttttaaaaggatgactttttttgagcacttactatatgcagattatgctagaataatataatataaacggatattgtgaatatagataatggataatcagccagctcacttgccagccccaatactagtttcagagcatttaagtagaaatttctacctcaggataaatacagattattagacttcatagaccttcagggttgtttctaattacctgaaaactgatgtttactgtatgcatgctaaggacttaactgcacatacttaaaaatgtctataatgtaatatcagcaaattcagagtaatatatataaattaaatgtagtatatgactgcagagtacataaatggtatatagtagagcttaatccaaaaagtctgtgaaattaatggtggaaaggactttgactgttcttttttcactcaattttcagtagctagcatactatcctgcatatagtcattactcaataaatagatactgtttgaaagaagcttttataggaaataaaatagataaaaaggaagcaatgtggtggtgatgataagaaacaaagtgaaaatgactgaaaaccagaaaatattgccctattgagaggatatcgcaagggaaaatgtctagaaactgaagaccctcccaagcatcttttatttcctgtgtttcaatttctgtaaaagttacagtaatgatcttttaaaagcactgctactgagaattgaatttttcttgatgtcccataacttatccatagtatactgtccaggttaatattgtcagtataatgccaaacaagggaaaatgataagcccacaaaataacttgaaaaaatttattgtagagctgcagcccgatgcaacaaaggcatagaagtactgtttgcagtggctctggaacattttgtgttggtagttgtgagagttttgaggggacctacttcagcagatgaaacagccaagaagattcaatacctgatccattgtcagtggtgtgaagagagaatttttcagaaggatggtaatatggtagaaggtaaattcaagttatatattatgtttatctataatcctccactgaataagcctttatcacatacctaattatacatattgttgtcctttgattttaaagattacagtgctaactttgttatttcctatactggatttcctttcgtcaacagacaagacattcgtgtgagtttattaaagttatttactcatgctgtacaatatatgctttctagctctgccttctatcgaaacatctagaaataacttagtttccactctcaactaattttaggaacataagtcagattacgttttttccaggctgttacaaatcattaattttataaaaataattttcatgtttctggctgtgtataaaagccatcagttataaaatgcattcaataaacatttattgagcctctactatatgccaggcctggggatgggaaacaaggaaaaagctgtagtttatgccttcataaagctctttctgtttgtttcagttctgggacatggaaacagttgcttattgttttctgttaggttcttggtattttatgaatttttgagtttagcacttactatgttaagttgcagatttttttctcattttgtcactttttttttaatctgtgttgcagaagttttttgttgctaattgaatgtttatgtagtctggattttgcctgtagttagaaagagctttcctattcctggattattcaaagtagattaggttgtattgaatagtacacctttcctccactgatttgagaataccttctttatcttatactaaatttccacatgtatttgagtttgcttctagattttctgttctgttccagtggttggatatttcttcatacacgtctatcatactgttttgactatagaggcttttcagtgtcatttaatatctgtgatggcaatccctactcaaagctctttgttttcagtgttcctgtattgctcttttgttaatcccttaatataaaagtaaataataacccagttggcatattattttgatgacattaaattggggagaatagatactgtgatttttgaagcttcctacaaatatgatatgcttttcatttgtgcaagtactttagtataatgttaactggtggtggtaatggaggaaattctgtcatgttccttacttttagtttcctctagcgctttctatttttttattttttttcagatggagtcttgctctgtcttctatccaggctggagttcagtggcacaatcttggcccactcaacctctgcttcctgggctcaagcaattctcctgcctcagcctcccaagtacctgggactataggcacacaccaccatgcccggctactttttgtatttttagtagagacggggtttcaccatgtttgctggctagtctgaaactcctgacctgtagtaatctgcccgccgcatcctcccaaagtgctgggattacaggcatgagcctctgcacccagcctctagtgctttctgattcaagcataatactggcttttcatctacaatacatatcatttatcacattaaggaagaatacttcatttttattgtattttatcaagatgttgaattttgtcataatgcattttcagcatctgtggagatgattatatggtttttctctttaggcttactaatttgattaattgtaataaaagtttccaatatagaaccaaactggattttgtagaataaactattgtcaggtttttttttaatatgttgttgtattttatttgctaatttttaaaggattttcttgtttcatgagatggtatatagttttcctttgtagcataattttagttgggctttgatctatcagtttactcccttcaaaaataatttggaatggttcccttttttcaattcttaggaattgaaaaactgatttttttttaaactagttcttaagaactagtttaactagtattggaattatgtgttccttaaaggtttagtaatattcacctagcatttctgttttatttacatagggttgagctaagtgttgtctaataattccttttaatctccttggttcctatggtcatattccccttatatactttcatttatttatcctttcttccatttttcttgactagataagaggctgctttaaatattttattgtaattgtttgtttttctttctttttttttttttttgagacggagtctcattctgtcacccaggctggagtgcactggcacagtatcggctcactgcagcttccatctcccaggttcaagcaattctcctgcctcagcctcccaagtagctgtgactacaggcacacgccatcatgcccggctaactttttgtattttagtagagacggggtttcaccatgttgcccaggctggtcacgaactcctgagctcaggcaatccgcccgccttggcctcccaaagcactaggattacaagcgtgagccaccacacccggcctgtttgtttttcttaatgtctatttttagtagtaaatatgtatatacttctgtaatttggatttatcagttttaagtaatatactttggctccttgataccacaactgagataattagctccctgttttccatttttcccttcctaatttttgtttgttataccatctctatgttattagaatatgtaacacttaacattctgttttgccagattaatctctacatataataatattctgtatatgtcatcagtctttttgccataatttctctagtcatctcttacttggttaaatttaactctcagtttactcaatagagctcataagaaaaatactactttgtttccttcatgttcaaagcttttctttgcccaaagcatgtccaatagcctgtatacttaaagaggttaaagaatttgagtgccttatagaagttcttataatttttctttcttatgtatgtgacattaatcaaacattttaaagactttttgacttgataagtgataactataaagcaatgatttatttttgcattttatttggaatcatacagaacttagaataaacaagtatgtcctacaaagaagtcatctcattcagaatttttatcaatttgtaatacatagtttaaaaagtcaaatagctgggcacggtggctcacgcctgtaatcccaacagtttgggaggctgaggcggacggaccacctgaggtcaggagttcgaaactggccaacatggtgaaaccccatctctactaaaagtacaaaaattagctgggcgtgatggcgggcacctgtaatcccagctactcaggaggctgaggctgagacaggagaatcaccacttgaacccaggaggcagaggttgcagtgagctgagatcatgccactgcactccagcctcggtgacagagcaagactccctctcaaaaaaagaaagaaaaaaaagtcaaatagttccgtaagtcttattaataaaataataacctctgcctgactccctaaacagttaaaatgtcacagctgtttcttataatgcttacattcatatttctaaataacatgtttataatgcatctaacttccttccatggaaaaagagtatttggctttttaaaccaatcgagtcacatgcatgctttcccccttccacgttggactacatcaatatttagtgttagtatttttataaatagataaatattgttcgcaaattttatttgctgtctattgctgtgtaacaaattcctccaaaattattggctttaaacaacatttattatcccatagtttctatgagttgagaatctaagcatggcttagctgggtccactagctcggggtctctcacaaggccacagatcaaggtgttggtcagtggtttgtgcccttagtcccagctacttgggaggctgaggcaggaggatcacttgaacccagtagttcaaggctgcagtgagctatggttacaccactgcactccagcctgggtgacagagcaagatgccatctcttaaaaaaaaaaaaaaaaagcaagtcagaagaaccagagagtgagtgagtgccagcaagatagaagaggtcttttgtaacctaatctcaaagtaatactccattacttttgccatattttagttgttagaaatttgtctctagaaccagtgcctactcagggggagggtattacacaagggtatgaataccaagaggcagggattattgctgatcattttggaaggctgctacagtacagataaaccatatgaatccgggcatggtggctcataccagtaatcccagcactttaggagactgaggtaggattgcctgaggtcaggagttcaagaccagcctgagcaacatagcaagaccctgtctctacaaaaataaaaataaaagctgattcatatatgttataataatgtttcctttcttatgcaactcttcggtaactctggaattaatacttactgtgcttgttacctttttaaaaaaatactttttataatccatccctaaactctttgctacattttcaatgcttccttcaccatagttaagcacattaggtaatctttggctataaatttcactcccctggagacagccctcctgttgtagtttggattgtttgttttctgtatctgctgaaatctgttgtgcaagggcttctgtttaaccatcatcctggaaattttctttaactttctttttgtgataaatctcctatcgcagatcctgtgtattttcccactttccttgtttacttcttcattttgagtggacactttttcctatagattgcagagaagtattgcatggctaagtaccaaattctaggatggaaatcattttttcctcaaaatgttcaaggtattattccattgtcttctagcttccagtgagaagtctgctgcttttcttgtgtagtgttatattattttctctctgaatgctcttaaaatatctcttctaaacccagtattctaaaataattttgagataatatgtgtatgagttcatctttttaaattcagtttactggataatctctgagttctatttatttatttatttatttttatttttatttttatttattttttttttgaggtggagtatcgctatgtcacccaggctggagtgcagtggcatgatatcagctcactgcaaccttcacctgctagattcaagcagttctcgtgactcagcctcctgagtagctgtgattacaggcacatgccaccatgctcagctaacttttgtattttttagtagagacagggtctcaccatgttggccaggctggtctggaactcctgacctcaagtgatccgccctccttggcctcccaaagtgctgggattacaggcatgagccactgcgcccagcctctgagttcttttaagtcagaaacttgagctcttcagctctgataaatttggggggcaaggggactaattttttctttttctttttcttttttttaagatggagtcttgctgtgttgcccagggtggagtgcagtggtgtgatcttggctcactgcaacctctgcctcccaggttcaagcaattctcctgcctcagcttactgagtagctgggactgcaggcctgtgccaccactctcagctaatttttgtatttttagtagagacagggtttcagcacattggccaggctggtctcgatctcctgacctcaagtgatctgcctacctcgtctccccaaagtgctgggattacaggcaagagccaccacacctggcccttgggggatgttatttctttgacaagttttgcctttcaaattatatctgttgtctctttcaggaactctgtttagttatattttgggtcttctagattaatcctttaattttttaaaatatctatacggttcatctctttggcaattagttctactttatactttttccttaatttttattttccaactcttatttaaatttctgtcatattttgttcatttctaagagttatttcatattttttcactgttcctttttttttctttaggctagtcaagtgattattgttccttttttaatagtgtcatattgtttcagggatacaaaatctcttacctttctaagaattgattatacttgggtatattttatatttaggggagaataggggttttttgtttgttttgtattgttgctgttgttttgttgttcagttctcctgttttttaactttttctgttttgtaattttgttctctgtctgtcatggtagttctcaaatgttttgtggtcttcggttgtccacagtgaaaaattgttttaaagcacttggggcagagcttataaaccaacggatttggctgtaatcccagcactttgggaggctgaggcgggcagatcatgaggtcaggagatcgagaccatcctggctaacacagtgaaaccctgtctctactaaaaatacaaaaaattagccgggcgtggtggcgggcaccaatagtcccagctactcgggaggctgaggcaggagaatggcgtgaacctgggaggcggagcttgcagtgagccaagatcgcaccactgcacttgagcctaggcaacaaagcgagactgtctcaaaaaaaaaataaaaataaaaataaaccaatggattttactgtgataagaagataccagtctgctttttttagtaagacacccccaaatgtcaacaagtatacatagatcttttgtcttggattggtaaatttttccagagaggaatcaaccaatcttttagcagctctgggagagccacactggggacagagactggaaagcagatttttacttaatccctctgttttcagacatctcactctcaactgtaactaaaactgctggtttcatatcctcaatagtttagcctcaccaaagattaacttcatcttttggaatggggaggacacagacgcttgattgtattagagaagatctggagttttaattgaaccctttaaaaaattgtaaccagacctcttatttgcaatacctctctatagtcatcttcagagacaatcattgccttcaattttcaggccgtcgcagggtcccaaaacactaatgaactttctgttttgttggttgcccatctatccatttcaggcttatgctttagatttttctggtctgataatcagttctcccattgtgtatgtgactcctgcttctgaaattttattggcatctctcatcttttgttacctcctctcccattttatttattcttgtagtttaatttttgttcctgtcatttaagcgttaagagacagcagagagagagtgcatgtttaatctgttgcatttaaatagaagtctcagaatattttttaactcctcatctggtattgccttcctcgcttatgtaccagtaacacggaaatactagttttctttctactttaccgcttcattatttgctgctagtaacttgaattgatagccttggccctcagagaggaaatttgctgatgctaatttagacctgagaaatcctagcaaagaggcttgggaaaaggcacgtttgtatggtaagattattttgcacagtgcatcaagatacaaactgattaataattcatttgtgctctctgcctgtggtaagtgggtgtagctgacagaactatactataaattgccatcctgaattggatgatgactgcttataagtatttgtagtttagtgatgtaatggtttaagagaagacttcttaagtatactcatatttgaggaacatagttctcaacaaaactttacgtcagtgctaaccacaccctttcatcaaagcttagaattaaataatactgaaaagtagacctaggagcagtgaaggacacttttaagtaaatgtaaaataagatctcataactatgcattataccaataattgtattgaatagcagagtgatagtatcagctagcaagaggctatcgacctgtgttcctgccaccattctttggttctgaatgtatctgggactgattgattaggtcaggccatttcaagaaagtgaatgataacccaggaatggcctggagtggagggaattagttggagaatatctgatataaaatgactatttgggccttgaatggatttaaaagttccatagtcaaatattagcccattttgaaaactaagaatagtgctagtatctccccagtttccttgtgattatatcaggactctcattcattgctttttaaaccaaattagattcttctagcctacattttgaaggctgaatatgaatcaagcataaggaattttctttccaactgcggaagagttaacttatgagaaatatctacattttgattgggatgttggttacatgggtgtatacatttgttaaaattcatcaactttttaatataaagtatatatgttttattgcacataaattataccttaatcagttaattttgaaatatggatctcttgtaaactttataagactttctccttccttatattatttcatgtggtatagtaagtaaatatcagttacacctctaataagccatttgacatgaatttccacctctctcaagctttaatcctctgatctgtataattgagattttaacagtacctacttcagagagttgtaaggacttaaattaaaaaaatatatatatgtgtgtgtgtgcacatatatgtgtgtatacatatatacgtatacatatgcacacacacatatatacatacataaaatacttagcataatacctggcacatagtagatcctcagtatatagtagctgcacattattattaatataacaattactactatttgtattagtcatttctcctttgatttctccttttattatctttttacagaaaacccatatagacagctgccttgtaactgtcatggaagcatgcctggaaagacagcaatagaacttggacctctgtggtatgtgaccagccataagaacatattaaaatttgatgtattgattgatttattaattgctgatttttattatgtgtggtaaaagacaaatttaaattcaattgttaagtctaggcaaataattatgactcttctcctcctatgaacctgaggtgtttaatattttgagatttttctctaccattattctctctagtttgtgacagaactaagaggcaatggaggtaaaagagaagcctggatgatctggaaactagataattcatttctgaatagtaagaaagaagctttttaaaattgatcattgtagatctagcatgtgatttttaaatgatcacaataactttttatagaagagccaactcatgtaaaaggtcctagaagaattagttttaagagagaaaggcatgtgaaagtgtctgcctttgttttagataaagttatttagatgatacacaattggaaatatttaatgtgtatatgcttttgcatcattggtaacagctgattgtaccttaaagttgaattggttttttttgtttgtttgtttttttgagacagagtcccgctcttgtcacccaggctggagtgcagtggcgcaatatcggctcactgcaacctccacctcctaggttcaagcgattctcctgcctcagcctcctgagtagctgggattacaggcacccgccacaacacctggctgatttttgtactttcattagagactgggtttcaccatgtttgccaggctggtctcgaactcctgatctcaggtgatctgcctggctcagcctcccaaagtactaggattacaggtgtgagccactgcgcctggccaaattattttaatcagaatccttaccttaagtttgttactagagattcttttttttttttttttttttttttgagacagagtttcactcttgttgcccaacctggagtgcaatggcactatctcggctcaccacaacctctgcctcccaggttcaagcaattttcctacctcagcctcctgagtagccaggattacaggcatgtgccaccatgcccagctaattttgtatttttttagtagagaccgggtttctccatgttggtcaggctgatatcaaactcccgacctcaagtgatccacccgcctcggcctcccaaagtgctggggattacaggtgtgagctaccgcacccggccgagattcttacagaaattcaagattcctaagaacattgtgacaagaattgcaaatttcttctcattactttataaggtcaaggcttaagcacctactaaacctagaaattgacctacatggtaaatgtctttgtgctgatgctcatgattttatcttcatcttattaaatactcttagattaagaaagatctagccagccctaccttctagttcttctaaaactagttctcacctatagcatctgctacacattgatcctactcactgattcagaactgaggaaattaaaaatagcaggttactggatccagaaggaagatttctagcctaactgccttattttacacatgaggaaactatggcacagtgtttttaagtgcttgctaaaactgaccaaaaaaattcataccacagccaaggctagaacttaggttttctgactcccaggactgaattctttttttattttttatttttgaggcagaatcccactttgttgcccaggctgaagtgcagtggcacaatcttggcttactgcaacctccaccttttgggttcaagcgaatctcctgactcagcctcccgagtagctgggactacaggcatgtgccactgcacccagctaatttttgtatttttaatagagagggggtttcatcatgttggccaggctggtcttgaactcctgactccacccacctcggcctcccgaagtgctgggattatgaattcttaataaaaccttatgatttccacatgaaagctattgtgttcatggctttacactcatccagaataccttcccctctctaccacctccaattcaaattgtactttctttttgaagtctcttcttagtgcctcaacccaatataatctctaaattccctttagtatatcttatattgatcacatatttgataatttaaaatcatatattctttcatatatatttgctaaccctaacaatagtagctaccatacattgaggatatatagagaagttttatttttggccaggcgtggtggttcatgcctgtaatcccagcactttgggaggctgagacaggagaatgtcgtgaacccgggaggcagagcatgcagtgggctgagattgcgccagtgcactctagcctgggcgacagagcaagactccatctccaaaaagaaaaaagttttattttacatttcatgatgaggaatataagactgaaaagtagtaattactcaggattatatagctagcccagcacagttgcagacatctatagtcccacctactcaggaggctgaggcaggaggatcccttgagcccaggaattcaagttcagcctgggcagcatagtgagaccctgtctcttaataaaaagattacataactagtaagtggtggagccaggattggaatccagtttatcatactcagaatttcatattttgtccattatacctgtgattcttaaattaaatgggaagcatatcagattcaccccagactatttctgaaccataccatcaccacatataattctcatatatgtgctcccctgccctgtcctgccccaccctaccaccataaactcatcagaattaagattttctattagtgactagaatgtgcattgtgaaaacctcttcattgctttattttcctgtctagatttataggcttttataaggtcaacattgtatattatattttggtatatcctccacacaccctctgtgtaccacagtactgtataccttatgagagttcaataaattatttttttattaaggtaacatacacatataacattttccttctttaccatttttaagtatacacttcagtggtaataaatacatttatattcttttacccctcttcatcaccctctcccttctccccttcccagcctcaatagattcttgttgacttaattaagtttccttgactaatgctactagtttagagaactgatatgataaaaatgagtggcaaatagaaaataaagttttaggccagaagtgtggtgtctcacacctgtaattccagcactttgggaagccaaggtaggaggatcccttgagcccagtagtttgagatcagcctgggcaacatgatgacaccctatctctattaaaaaataataaaatactatagcctaggcaacaggacgggactctatctcaaaaaagaataataataataaagaaaataaacagttttaaattaaatcataaattctttttgaatttaagtattactctgtcatataattaattatatatcttacttatagttaaattgtgaagactttctttttaaagagaaacatttttcaaacccagttctctgtatattcttttcttttcaggtcaagttcccttttcaatactggattcctcaaaagaatgctatttgaatctcttcaccatggtttggatgacattcagaccctaataaagacattaatctttgaatcagagtgtacgcctcaaagtcagttttcaattcatgcatcttcaaatgtcaacaagcaaggtgactaactgaacgctagcttactagctttaaactgcttaccaaaaatactgtatctttttcaattgtatttgatgttataataaaaccaatataattataaatagtgtgtttttagtaaatcttctctaatgagtctgatcctctggtttttttttaattacatagttttattcaggcttgtaatcaggcctgagatgaataggtgaatgatgaatagtgttgttggttttgttgttttttttttggatactgggtctcactttttcacccaagctggaatacaagtggcacaaacatggctcactgcagtctcaacctcctagactcaggcagtcctcttgcctcagcctcaacctcctgtgtagctgggaccacaagcatgcacaccacacctggctaatattttttagagatggggtctcaccatattgtccaggcggatttcaaactcctgggctcaagcagtcctcccaccttgacctcccaaagtggctgggattacaggcatgaaccaccatgccctgataatttttttttaaagataacctccttttttgtgtgtttttaattttactagatttaaaaaaagaaaaaaaaaacactaaaggtcctttgtgatttttattaccctagatgtgctttctagaaaaagaaacttttggtaattcaaggagtgttgtggccaaaaattgtaatatctatgaagacacagaaactacatttatacttctcattcagtaaagctatgtgttttttctgtttagtacaaacagccaattttgtagttgtatctgactattgatatgagcctattgaatatcctagtgttctcataaataattagaaactgctattatagagggttaaaaatgtaatttttgcagttcagtttggccacagaatctcttgcatattcgtgaaaatagtgtggatggaatttcataaacttttatttaaactgagttgttgctttatgtcattctgtaaaatattttcttttcccatttgctttattttttagaagaaaatggtgtatttattaaaactacagatgacaccacaacagataattacattgcacaaggtatgtatgcatatatgtgtgtacatatgtacatatcaggtcaaaaaggcatatagcaaaagggtaggaagagaagagattgccatggtagcctacttaaaaatacatttcatattatatgacaacaaaactgtagtaaaacttgtttatcagcattcacacataggaaatttctgttaacatatgctttgttcacatctgtaatatatggttatccctttgaacgaactgtatgatcttgaaccatgtgaataaaataagatcaaattatatatgataaagttatatataattttatagttaagataaaattttattctaattcttttaaaaattgctcattaatatatgatttatagcaattccatttaagtaaccagaagacctcattcttcagccaaaagaatttattatatggcctttcatataatttaggatatgtgcatactttaaatctagctgtggtagacactaaattcatattaaaggatgttaagatttaaaatatcagtgccctaatgtctaaggttttgttttgctttttaaaaaactttagattctagatgtgttttttgagtacagatgaaaagaagactgtagagtgttaagtttgaaagagcagtggcctttagttatcagctgtaattttttattagttgctcagcagtttaatgttgaccttcaaagacaaggaaacttaaatttcttttaatagtatatagtttaaataactactgcatactctttgcaacagccatgttcatttggcatcttcaactaatttgataacttaaattgatacattctacctaatttctctgttggagggaagacaaagaagcattatgatacactataaagaatattagatttgctgggcatagtggctcatgcctataatcccagcattttgggaggccaagttgggtagatcacttgaggtcaggagttcaagaccagcctggccaacatggtgaaaccccgtctctacgaaaaacacaaaaattagccaggtgtgtcagtgcaagcctgtaataccagctacttgagaggctgaggtgggagaattgcctgaacccaggaggcagaggctgcagttagccaagattgcaccactgcactccagcctgggtgacagatcgagactgtctcaaaaaaaaaaaaaaaaaaaaaattagatttaagagtattatcctatgcaggcgttgttatataaactcagccaggtccctcccattcagcaaaattatcttaaatcctttttagaataaagtaaaacataaataagctttaaaaatattttcaaaagccaagagcacagtagcacacacctgtaatctcagctactcaggaggctgaagtgggaggatagtgtaaggattgtgtgagcctgggcaacacagccaaactccatctcaaaaaaaaaatttgtttttaatctgtgagcctttctcataagtaaattaaggaaattagactaatttttgtgggctcttctataacttttaaattatatggttattctaagaccattggtcaacacataaaatcttaaaatgatagtactatgcaaacccaaaggaaaataattcattctgtcaaagatacgttatatgttcattgcagtgctattcacagtagcaaagacagaatcaacctaggtgcccatcatcaatggactggataaagaaaatgaacatatgtactaaggaatactatgcagccataagaaagaacaaaatcatgctctttgcagcaacatggatggcactctaggccgttatcctaataaaactaatgcaagaacagaaaaccaaagccccatgttctaacttacaagtgggagctaaactttgggtactcacagacatcagatgggaataatagacactggggactactagatgggggagggatgggatgtggcctgggctgaagaaccacctgttgggtactatgcccactgcatgggtgctggggttgttaggaccccaaaccccagcattacacaatatacccacgtaacaaacctacacatataccctttaatcgataaagaaagttgaaattattttttaaaaaagaagaaattaccaggccaaaaaaaaaaatctatatactgctgatgatactcactattaacgtattacatcagattttttgcctcagatgctcctagaacttgtactaaatctggatatctatcctttgactaggtgcctcattagatttcatgcagtttcaaattttagatttcaaattataattctgatttgatggatggatcccaggttgtcctttttgctttatgtttttatgtaaagaggcaacagttcagcaataatttatatttattttgaatgtaatttatttttatgtatcaactttgccttttcaatacttttttttttttaagagacagggtctcactgtgttgctcaggctagactcaaactcctaggctcaagccatcctgccacctcagcctcccaagtagctgggacttgggtcccagttacacaggtgtacgctactgctcctggcagcttctgaatattttgcttaagcagatgttaattactttccctgaagagataagatttgaccataacgttcatatataaataatcaagggttgaacaccaggcaaaatctcattatagtattggatatctcagttgttttcatgttgtgatttttggaaggatacagttctagaatcttagctggcctcctttcactcaaaatgaaaaaactaagtgctgtgatgagaaataggcaatgagatcataacattgaccttatgtcagtttctgtgtccaaactctcaagactttgtgttgtttttctttgttttgtgattactaaagacccactgtgtatccaatactgatcactcagtagaaatacaggtataaaaatgaaagacattgtccttaggaacttagaatataacttggggagaaaggacttacacacattaaggaactataagaaaagaaaaaaaaatgacaacttaatcaaactctgagtagtgtagtgtagtattaacaacaatgaaatgtatgaagtgactagccccagattgacagatggcttcctacaggagacgaaatagagtgtggcttgaagttgaagaaggtagaaaggaagttctgattcagcagtttaatatgaaaattacataagtgaaggaccgtgaaaatagaataaattataagaattaagattggatagtcaggttgaaataatgtgtcaggatttatacttgagataaatatatagttataaaagtatttggcttgtaatttttaagagcatgctaactttgtatgtgtatgttgcaggaaagagaaaaagtaatgaaatgatcacaaatttaggcaagaagcaaaagactgatgtcagtactgaacatcctcccttttattacaacattcacagacacagcattaaaggaatgaatatgccaaagtaagacacccagtgaatgacaaagtatatatattttatattttaataatattgtgatttaaataaaaatacaagaacctgattattttttctttcctttcctttttgcaggttaaaaaagtttttgtgctatttatctcaagcaggctttcgagtaagccgaactcattttgacccaatgggtgtacgcacagatgcacctctgatgcagtttaaatctatccttttaaagtacagcacccccacctacactggaggacagtcagaaagccatgtccagtcagcatctgaagatacagtaactgaaagagttgaaatgtcagtgaatgacaaagcagaagcaagtggctgcagaagatggtaaacgtagagaagaattggttctcaggtgtctgtatagatggcctaatagttctctataccaactgtagttctttttctgttctttcaattcagtagagtaaaaataaaaaacagtgtcattttcattcagaaactgagcagtttctaacttagctggtttgggagctttgctttccaagtttttttttgttttaaggcaaacttaaaattttaatggaaacatttcatatgaagccaagtctcactgagatcaccctactgcttaataattcagaaaattttcacatgcaaagtgtttggaattttatgtatgttatgaaagccatcttttacaattcttaatcacatctctgcctaaactgattcatgatgtttatgttttcctgtttgtagtgtacaaaatgaagctgaaggctcacatgttaaaatgaccctgaatagaataggaagaacaatgttcttacaggtcataatgtatttcacaattaaaaaactaaaatatgtacccatttttaagaaatcatacttctctccacattgatcttttcatttcttactagcttttaagaaattaaatacttgcctgagatagaaatactttatttttgtaactttaaggtctaaatgactaaacttcaaagtaagattttgtcagaataaattgagaccattaatctaatataatacttgttcatgagcactgaaatcctgaagaggagagatttggttataaattaaaaaggttgggtgatcttaagtgcctcagttaatgcacgtacagtattcatttggttggttgtactacctctcagaagtaaaatttgtcaccttatggaatgagagtttttgggtttgggggttgtttttttgttgttgcttggtttggtatttttggttttgtgtgtatttgtataaattttctgtataattagcccaggctgatgtaactataaaaattagttgaaaaaaaaaatattgtttccttaatggaattctcacttcatttgaatataagattttggatgaaaggatttggtataaagtttgggtttttgtctcaaggatttgatccatatttatccctaaatatttcttaagggatgtaactttttataaccattaagtggggggaagggggtggagggggtggtaataattataactgaaaggtttaaatatactacctaagaaaaaagtacttctgtgacatatacaaaaaaatctagtggataggcattagatgaatagagaatattaattttgcagaaatgaaggaaaatctcttcgtgctagtacagcgtattcccaagagagtttattttcctttctccaattaatgtggtcataaatttcggtaaaatcaagaaataggtgaagtgcaagctagtttctataatgaccattaaaaaaattctgctgtgtaattcttgccagttaaaattataacttgcaaatgagcagaataaatgaggtttttttcaattaaaaattactataaatccaggaggcaaactattttagcactcagattatctgatttaatacatattattgaatatcagtctcaaattttgctaaatgcttatcagcatgaaatatgttgatcagtgatgagttgggcttaatgcaaagatcctaatttaataaagaaacctgtaaattactgttacctaaaatatatgtgtatattaatttcacatataaaggtagatttttcaaagaaaaatttggtaggcggtagtttagaactctgatcaggtactacatcaaccaaaagaggaaatactttaaaaattccttttagcaacctgagcaatcttattctcgtaacaatagtagtaatttgggacattgcaaatgtttatcatgttgtaaagtagcatcagttgtatcctttcattaaaacttgataaacaaaagaacgagttaagga

SEQ ID NO: 7742 - DNA, 1555 bp, Homo sapiens
tgctgccctccacacccagagaacctccacagactccagccctccgacacctgcacagatccatctcccaagacaccacccaaagagagcatttgctgctgcttcccagaactgtccaacaataccttagcaacaccaagagttgggccctagatgggcccagcacattcacaggtcacacccacttccctgcaaaacccaccccctcccagcctcctcctgactctaagccctcctcttcctctacctctccagtgtatgtctgtcaccccccatttcaccagagcgtccttaggggctgggggtgggtttgttaatggggtggaggcaatgatgggttggaggatcttggctataggggctgtgctgactgcagcaggtaggttgggtttccctcttccttccctaatcttggttctctaccctcctttccactcctcacctgattctctctcttcctcctccttatatctgtgaggcagaaggcatctgaagctcatattagcccccattgggtgggaattaggagtgggtagttaactcagggagacttgagataccctggaaaaaatgctattgagatgtcctgacattaggcagggtggatggaacaagaaggagcaagaaaggaacctcaggcagatgttaggacatggacttgatcatgtggcctgggagtttagaaatggggagagacatcctcctagatcagatcgtgggctcagtaggcatgttgattcccagggagaggtgccaggaacagcatggtaaagaatgtactcttcacagctcacatccccaggttgctgatgccactcactccccctctcctgccatcgagtggccttgccggacacatcaccctacctaaaaagccagtaaatgagaacctgtcagctatagccatcatttctgagatgcgattttctttgggattgagctgcagtgggcagtggctccttacactgtaattttaattctctgcctgcccagcctctctgtcaaagtagctggtgatctataaagatgctaaaaggcaccaggggactttgccatttaaaggactcctgcagtgaattcttttgtaaaatgaataatggcaccctaatttatccactttctaaatttgggtccatgggggtgtccagggcatgcttatgtgctgtcaccagcagacaaacagagggaatggaatctgggggttccttccctgctctcccgccatactcaggataccctaccataagtgatttcctctcactgacttgcagaaaatgtgtgagatacccagcaagctaagaaggcagttttgctgggtatctcatacccaaggctggggtttgggtgatctgagaggttagctccttgatcctaggatggaagggagagcttatatagaagcttttacttggaaggttttgtatcctaaggtcagacatagctatattaccaagcctaaatgccatgtggcccaggaaataatttggacatttgttctaaaccacttgtggtaggtattggtctctctgcaactcagccattaattagaaattag

SEQ ID NO: 7743 - DNA, 3813 bp, Homo sapiens
gtcccaggaagaacaaaccagcaaaatcctgatgcagtatcaggcccgactggagcagagtgagaagaggctaaggcagcagcaggcagagaaggattcccagatcaagagcatcattggcaggtgaggggcggcctggggagggggttgtgagggagagcctgaggctggagagagcaagtgggcgagctactcctctgactcccatccccaaactcaggagcccaccaggagagcccaccactctcctccccaggaagccacccactcactcatcaccagatggagagaaaccccaacctgcttagtgcattaaatatctctttaccaaaccctgacctctcttctgatagagtagcttcggaagcccttggaaaatgtacctgttcctgtccaaccatcactgcatttgcatttaccctaggccagagctccccactagttattctcaacttaacctgtgatgttcactccaaacctaagcagggctccctagccagagtaggccctgcccttcctgggtggaccctccctctctagccttggaaaggtgttctgttagaaagggtcttttagcctgtgtatgttttcagctgctccagcaagtcctgggctccaaagagggtatcctcagcaaagaggtcaattatcttcagagtggtggggtcggggtgggggggaccctgggcgcactccaaccagagccacctccattttgatccattctaaatgtattttatgtaagatttaattagaagaaaagggcttcttgaaatattttttgaaaaccactgctctaattgatatcctttatgataaatcacctcgaggatcttcacagtgaggtgacatgggggatgcagaagccaggtcctcagccatggaaggtctggggaaggggcactgctgtcctgattgggacgatggaggcctggaggtgtctggatggtagaagtctttgaggcacagaaagctgccttagcagggaggtgtaagggttcctgggaggaaggtggagagcatgatcctgaggaacagggagtcttgcatcacggcaatggagggactctgattctaagggataaggatgcctgaggtttttccagagagctatggggttccatgggcaggctctgagcctgtgcccgccactaaccccactgaagcccgtcccttcaggctgatgctggtggaggaggagctgcgccgggaccaccccgccatggctgagccgctgccagaacccaagaagaggctgctcgacgctcaggtggaaattacaatgtcatttatcttctccgtgtcccatccccatccatcccactgtctttcgtgcactcactacaccagccacctagccccatcaccatctgtctctcatagtctgctgtttgtccactggctgctcctggcagccccctagtgaccccatcttcatcccatcgtctgtgcctttgtcactcctggcagcgtcagcccaactcctgtgccttcccatccagtcttcccactcctctctgcatctcaggaccttctctaccagaaccttggtctttctgcccctagaccccacctagttccaagaacccctgccccttctttgctcactcctattcaagccacgttgttcagcttcctctgcgctcttgggccagagggctagaagctgctgttttctggaatagagcacagggcagtatgatctgtagtttctccaggccctggccggtaccctgaaaacttggggacccatcacctctgttctcttggctccctaattttcctgtctccttggcagctcctgcatagcttcctcttcctgactcttcagatcttgaaggccttccatcctgtaacctccctttgccctcagtatttaagtccagcctccctctggcctccctcccactctggccctcagaccttcccagctgcctgctgcccagcctctcttctcacaagccagcttctaggacctcccttctgcacccttaccccttgctttcccaaaattctgctcattttcctacccatactcctctttgctctgactgctaggctccccccgcctgccatccccccaccaaggctcctgaccccatgaccccactctctcccactgcagctcctcatcaggtaattctcctggttccgctttggccacgggcggaggacacagggggaggtgactccggaccactgcaggttggtcgtgaagcccactccctccaacacctccggagcctctcccctctcactgctgccctccacacccagagaacctccacagactccagccctccgacacctgcacagatccatctcccaagacaccacccaaagagagcatttgctgctgcttcccagaactgtccaataataccttagcaacaccaagagttgggccctagatgggcccagcacattcacaggtcacacccacttccctgcaaaacccaccccctcccagcctcctcctgactctaagccctcctcttcctctacctctccagtgtatgtctgtcaccccccatttcaccagagcgtccttaggggctgggggtgggtttgttaatggggtggaggcaatgatgggttggaggatcttggctataggggctgtgctgactgcagcaggtaggttgggtttccctcttccttccctaatcttggttctctaccctcctttccactcctcacctgattctctctcttcctcctccttatatctgtgaggcagaaggcatctgaagctcatattagcccccattgggtgggaattaggagtgggtagttaactcagggagacttgagataccctggaaaaaatgctattgagatgtcctgacattaggcagggtggatggaacaagaaggagcaagaaaggaacctcaggcagatgttaggacatggacttgatcatgtggcctgggagtttagaaatggggagagacatcctcctagatcagatcgtgggctcagtaggcatgttgattcccagggagaggtgccaggaacagcatggtaaagaatgtactcttcacagctcacatccccaggttgctgatgccactcactccccctctcctgccatcgagtggccttgccggacacatcaccctacctaaaaagccagtaaatgagaacctgtcagctatagccatcatttctgagatgcgattttctttgggattgagctgcagtgggcagtggctccttacactgtaattttaattctctgcctgcccagcctctctgtcaaagtagctggtgatctataaagatgctaaaaggcaccaggggactttgccatttaaaggactcctgcagtgaattcttttgtaaaatgaataatggcaccctaatttatccactttctaaatttgggtccatgggggtgtccagggcatgcttatgtgctgtcaccagcagacaaacagagggaatggaatctgggggttccttccctgctctcccgccatactcaggataccctaccataagtgatttcctctcactgacttgcagaaaatgtgtgagatacccagcaagctaagaaggcagttttgctgggtatctcatacccaaggctggggtttgggtgatctgagaggttagctccttgatcctaggatggaagggagagcttatatagaagcttttacttggaaggttttgtatcctaaggtcagacatagctatattaccaagcctaaatgccatgtggcccaggaaataatttggacatttgttctaaaccacttgtggtaggtattggtctctctgcaactcagccattaattagaaattag

SEQ ID NO: 7744 - DNA, 480 bp, Homo sapiens
agataattacaacagccaaagagagaaggaagtgaatttcccaaccagaagcgtagggaaattcagatggctttcttttctcccagcagaggaacagaaggcggagctaagggcaggaaccaggagttggtcaaggagctataggaggtgatgagagtagaaccaggggtaggagctggtctggtacccctcaccctctaattgggagcccagggagaaggactgaaaagaagatgggagtggaaaagaataaagccagtttctgcttcccagggatgcagagattggggcatgctgtgtctgcagaagctcctagtcatttccgccataattgtgagagagaggggcagccctcccacaagatttttcccttcccatatcacttccctgaatccccttcctttccccccagtacagttaaacctctctctaatttggaatgttatatttgagaagatggccactgtgaataagtgacaa

SEQ ID NO: 7745 - DNA, 197 bp, Homo sapiens
cccacctagttccaagaacccctgccccttctttgctcactcctattcaagccacgttgttcagcttcctctgcgctcttgggccagagggctagaagctgctgttttctggaatagagcacagggcagtatgatctgtagtttctccaggccctggccggtaccctgaaaacttggggacccatcacctctgttct

SEQ ID NO: 7746 - DNA, 437 bp, Homo sapiens
tgggtctccaacatgcctcacctgtcggctgacatcgagagtgcccacatcgagcgggaagagtacaagctcaaggagtactcaaaatcgatggatgagagccggctggatagggtacgatgggctctaccagctccaagccccagtgtttccttttacccacaggggagatctctagtcacttccaagggaaacctccagggtcagttatggtggtaagaaaaggcaaagacctgatcacctcttgagaagccttccgtccatctggggagaccagatacacacagttgttaaaagtcactttcaactctattttgtaggttatatatatcatagactatctggggatcatctattttaggcttacctccatgttcttccccaggaggaacataagccctggctcctgtgactgcttaggaaaggaaatgttactt

SEQ ID NO: 7747 - DNA, 480 bp, Homo sapiens; identical to SEQ ID NO: 7744

SEQ ID NO: 7748 - DNA, 997 bp, Homo sapiens
ggctcacatctgtaatcccagcactttgggaggccaaggtgggcagattgctggccaacatggtaaaaccccatctctaaaaatataaaaattagctgggcgtggtggcgcatacctgtaatcccagctacttgggaggctaaggcacaagaatcacttaaacaggaggcaggggttgcagtgagctgagatcacaccactgcactccagcctgggtggcagagcaaaactttgtccccacccctgacaaaaaacaaacaaacaaacaaaacaaaaaaaaacctgtcaattcagatgctaggttttcatcagacgtacttaatctgtatttagatttcttaaaacttactgtggaaaatgtatttacatactcaagttgtttgaaacataactcactgttttccaataactgaagtatccacttttacatgtattaaaattaaataaaattagaaattcagttctgcagttgcactagccacattttaagtgtttaatagccacacgtggttagtggcatctatattggacagggcagatctagagagaatcctgtatctaacaattttaatttttttccctttatgctgttattccttacctagagaaacaatttccctccaaagttcctttgaggggtctgtttaggccaggccaacacaagtgacctatgtggattttagcatcctttttttgaaatttgaggttttatgaagcttgagtttttctggatatttttagtaatttgctggtgtgtacttagctcaaatacttgattgcaactgtgttgggtcaactatttctaatgggacttttccatttgcatgtacagtcactggaaactgctgggcagagaaactctaaaaggtagttggggcacactttttccacctgtcagattggtgaagaattggtgaggctgtggggaaaatggcattctcccacttttgatggatatgtatccaaataaaagtcattcccatgctttctttcatcc

SEQ ID NO: 7749 - DNA, 793 bp, Homo sapiens
actccagcctgggtggcagagcaaaacttgtccccacccctgacaaaaaacaaacaaacaaacaaaacaaaaaaaaacctgtcaattcagatgctaggttttcatcagacgtacttaatctgtatttagatttcttaaaacttactgtggaaaatgtatttacatactcaagttgtttgaaacataactcactgttttccaataactgaagtatccacttttacatgtattaaaattaaataaaattagaaattcagttctgcagttgcactagccacattttaagtgtttaatagccacacgtggttagtggcatctatattggacagggcagatctagagagaatcctgtatctaacaattttaatttttttccctttatgctgttattccttacctagagaaacaatttccctccaaagttcctttgaggggtctgtttaggccaggccaacacaagtgacctatgtggattttagcatcctttttttgaaatttgaggttttatgaagcttgagtttttctggatatttttagtaatttgctggtgtgtacttagctcagatacttgattgcaactgtgttgggtcaactatttctaatgggacttttccatttgcatgtacagtcactggaaactgctgggcagagaaactctaaaaggtagttggggcacactttttccacctgtcagattggtgaagaattggtgaggctgtggggaaaatggcattctcccacttttgatggatatgtatccaaataaaagtcattcccatgctttctttcatcc

SEQ ID NO: 7750 - DNA, 994 bp, Homo sapiens
ggctcacatctgtaatcccagcactttgggaggccaaggtgggcagattgctggccaacatggtaaaaccccatctctaaaaatataaaaattagctgggcgtggtggcgcatacctgtaatcccagctacttgggaggctaaggcacaagaatcacttaaacaggaggcaggggttgcagtgagctgagatcacaccactgcactccagcctgggtggcagagcaaaactttgtccccacccctgacaaaaaacaaacaaacaaacaaacaaaaaaaacctgtcaattcagatgctaggttttcatcagacgtacttaatctgtatttagatttcttaaaacttactgtggaaaatgtatttacatactcaagttgtttgaaacataactcactgttttccataactgaagtatccacttttacatgtattaaaattaaataaaattagaaattcagttctgcagttgcactagccacattttaagtgtttaatagccacacgtggttagtggcatctatattggacagggcagatctagagagaatcctgtatctaacaattttaatttttttccctttatgctgttattccttacctagagaaacaatttccctccaaagttcctttgaggggtctgtttaggccaggccaacacaagtgacctatgtggattttagcatcctttttttgaaatttgaggttttatgaagcttgagtttttctggatatttttagtaatttgctggtgtgtacttagctcagatacttgattgcaactgtgttgggtcaactatttctaatgggacttttccatttgcatgtacagtcactggaaactgctgggcagagaaactctaaaaggtagttggggcacactttttccacctgtcagattggtgaagaattggtgaggctgtggggaaaatggcattctcccacttttgatggatatgtatccaaataaaagtcattcccatgctttctttcatcc

SEQ ID NO: 7751 - DNA, 227 bp, Homo sapiens
cctcaggtgagcagctttagtcaatgttgtgaattttagattttaattagacatgcaacagtttcactacctttcaggatttttgtcctgtaacagaggctcttgctttttgacagagaggtaggcaggtggagaggttatcctgctgctgcagttctcaagttgttaagtttcctctggaaggctaacccttgttgggaactaacagtttcaataccagcaagtct

SEQ ID NO: 7752 - DNA, 529 bp, Homo sapiens
agtagctgggactacaggcatgcgccaccacgcccagctaatttttgtgtttttagtagagatgggctttcaccatgctggccaggatggtctcgatctcttgacctcgtgatctgcccacctcggcctcccaaagtgctgggattacaggtgtgagccactgcgcctggcccgcatgtattacatttataattaaaaattcacaactcaatgtcaagtgtgaaccttgtgttgaccctgatttgagcaagcaataaaaagatatttttgagacatttagattatgaatttcacatttgatgatagttactattaattttgtgaggtgtgatattggcaatgtggttagatgacttcagagaaaaaggaaggtatagttaagcaagtatggcaacatctaataacttgggtctaggtgatgtgtatgggtttcattatactgtcctctttactgttgtatgtatttgaaaacattcatgacaaaaaaactttttaatcagttaaataaaccatgaagaacggttaaaga

SEQ ID NO: 7753 - DNA, 530 bp, Homo sapiens
agtagctgggactacaggcatgcgccaccacgcccagctaatttttgtgtttttagtagagatgggctttcaccatgctggccaggatggtctcgatctcttgacctcgtgatctgcccacctcggcctcccaaagtgctgggattacaggtgtgagccactgcgcctggcccgcatgtattacatttataattaaaaattcacaactcaatgtcaagtgtgaaccttgtgttgaccctgatttgagcaagcaataaaaagatatttttgagacatttagattatgaatttcacatttgatgatagttactattaattttgtgaggtgtgatattggcaatgtggttagatgacttcagagaaaaaggaaggtatagttaagcaagtatggcaacatctaataacttgggtctaggtgatgtgtatgggtttcattatactgtcctctttactgttgtatatatttgaaaacattcatgacaaaaaaactttttaatcagttaaataaaccatgaagaacggttaaagaa

SEQ ID NO: 7754 - DNA, 530 bp, Homo sapiens; identical to SEQ ID NO: 7753

SEQ ID NO: 7755 - DNA, 18038 bp, Homo sapiens
gggagcttcggacccggaagtggcgccctgggctcgcggcggtgccgcggggatggcgggagccggagctggagccggagctcgcggcggagcggcggcgggggtcgaggctcgagctcgcgatccaccgcccgcgcaccgcgcacatcctcgccaccctcggcctgcggctcagccctcggcccgcaggatggatggcgggtcagggggcctggggtctggggacaacgccccgaccactgaggctcttttcgtggcactgggcgcgggcgtgacggcgctcagccatcccctgctctacgtgaagctgctcatccaggtgggggaccagaggcgccgtagggagatgggaggctgatgtgaaggtgacaggccaggatttggaggattggggcgggcagtcaatggcgacggatttggggagaggggtggggacggcgggtttggggggccgagtgggtgggatgggagggaagccgtgagggagttgggaacgcaggggtcacgggttttaggatacagaaaggagaccaaggggttagagtaataacagatacgggagagggtggaaggaacaagcgatttgggggagtgccaaggagggagcgatgggctggaaaaacatatttgggagataaaggagtggggacgatggacttgggatagggaagggagcgaatttggggcgagggaagaagcaatagaattgggggaggggcaagaagtttgggtgaagagatggggaggaaggttgggggcccaggcaaagtgtttagagaatgaggagcacataattggggtagaggggaacggaggctctggatttgatagagatggatttaaaacgtcttggggtggggacaaagtgggcgccagggccagaaatttaggagggaaagaaggacaccagactgggggtggacagaggagacggaggtcttgggttgcattgtgatttaatttggtgggagagtgcgaaggcaaagacttttgcaggggaatgctatcggtttaccggagatgggggctctggatttgatggcgacgacggatttggtaggaggaggggacagggtgacgcgtatggggggaggggaacagatagggccagcattgggggaggggagtggcagcgatttgtctagagaggggagctaggaggaggctttaagcggggaagggggatgacgcatttggaggaggaaatggaagtcatagttggggtcagagagaggaatcacagtgcttgtatctgggcagatgaggagaaggggcacgggagtattgaaattgggcagaagggacagtggagacataggtggcaggataggtagggactaccagaaattgagaccgaggtagggatgtctctggaacagagggatgcataggcacttggcagatttggtggtggccagcaatgcggtacagatgaagtgtgctgcttgaggagtgagctggaatgaagggcgtgtggaggtgtgagaattaggtgggtgtggctgggatgggtacagttttgatgggggtcattaggccagaattttccagttaagaagcttggggggaggaaggtaaaaattgaattggagacccatccaagatttgagttgaggcaggtgggtgtcagattttaccatctttataattgaaccgagagaatgcaaaatacaactggaatgagaaggccttgagaatgagagtaattgaaatctgggatccgaggaatggtaatagatttgtgggtgtgaccaggaatatgacaaggaatgaggagattcagtcaggggcatcaaggtgcctgactagaccctaattgtgacagatttgaaaattgttgatggcggaaggtgtagaccagactggcatttggttgtgatttgggaatgagggctgtcttacagggttaagattgtatttacagcagttgaacttgaagtttgggagataaattggtgctttggacctgagaagtgagggttctggaaactgatggaatgagactgagtgagggctaggattttagggcacaggtgggagagtctgtggagtgaaggatactggagcacaagggctcagtgtgagggaaatgaagaagtggcttcatcatttggatgatggcagatctggtttgaaagaacattgaaatgagggtggtttgggaagggaatgggggaatgaaggacaccaaagcgtgagaagaactagatggtgggcaggtaaggatggatgagccctgttgaaggaccagaggtgcctgtctgatttgaacccagctggtgttgagtgtaacatatattagggtaagatcttcaatgggtatagtttgggaatcagagtaataacttgcagaaaggcaaattactgggagtgggggtgtcaggagtggagtgacagatttggggattgtctagattaggtgcgtaagaatgcagtgccttagattagtgcatgtggctgtcaggtttgggagtcggagattttaagatgacagactgtccctgctggtatctgatatagggccacagcatttgccgtagttaggactgggttaacagatttgaggttgaaattgggtttaatgacttgggaacaaataattaaaacttgaaggcaggaggaatgggggtgagatacagccagtgtgcctatgataacccaatagaagttaagaaaatagattcaacagatttgggagccatggggatatgggataacgttacaaatttaagtatgaaattggggtcagtgggactcccaaatagtgttgactaaactggataaggacagcaaaagagcagttgtggcgatttggagtggaggaataaaggaataccacctgtatttaagagaacacagatcaagacaaaacttaattcagaacaaccttggagcttttaacccagaagggaaaaggtctagaagggaagtactcactgcctgggtcagctgactcacccctttcctcctttgctccactgggtcaaaatttttttcttttaaagacagtccccatcatagaggagtttttaaatttacaatcattaatctgttaggcatctcagaatcagatccataggagatagcctgaactttgaaaagcacttgcttgataaaggcaaaaggggacagggttgatcccaaaaagcactggaagcatacctaatccagtttacaaggtagcgctttctaacttgccacttctactgcctcccacagctgcaggccaaatcctctcccacatgtcagaggaatcgctctggtccatgggcccagctggcctgcttagagggcacagggctggtatcctggccccttgccaagggaggaaggagccttctcactccccacctaggtgctggtctccttgacaccttgcctcctccctggcagcaggggctctcacccctcgacagagacttcctgctcctcacatggatatggatggtccttcacccacccgcgggtttaataaatatttcaggctgggcgcagtggctcatgcctgtaatcccagcactttgggaggccgaggcgggtggatcacctgaggtcgggagttcgagaccagcctgaccaacatggagaaaccccgtctctactaaaaatacaaaaaatttgccgggtatggtggcgggtgcttgtattcccagctacttgggaggctggggtaggagaatcacttgaacccgggaggtggaggaggtggaggttgcggtgagctgagagcacgccattgcactccatcctgggcaacaagagtgaaactccatctcaaaaaaaaaaataaataaataaatatttcagatataagaagcatctgtacagcaagaactatcatagccctacagaaatgagggggtcgttttgtcacagggatgtagggtgattgaggtgagaacgcagctaaggatatgtttgaggagtagctggaatttgaggtaacagtttgctaagcctgggaatgggaggaatagacatggaggtgtctgcagtagatttggtaagaaatttgagtttggggtgcactttggaatagatgacttaatggctgacctgtctgaggtttgggtatgatgtattttcttattgccacatttggaattgaggttggaatgaagtttttcatctggagatgagaataactgagatttgttctgagatgggagtagggtttgcagtacatacaaatggaggtttctctactgggaatatttgggatttgaatgtaagaatgttggggtgtgggtgtgacttggattgtggttggacagtgtctgggaccaggcatttctgttgattgggagtttacgtgctgccaatggttagagacactgacgagctttctggtatgctttgatggggaaaacatgaacaagagccacattagaatttgtgggagaagagttaagcaaagggggcaagaggtgtgaggagaggtggtgaggctgaatcaccacgagactctgagcgtccctttgtctttgttaattctgaaggtgggtcatgagccgatgccccccacccttgggaccaatgtgctggggaggaaggtcctctatctgccgagcttcttcacctacggtgagtgtgcctcccaagcaggaaagcccacaccaacagaaaagaggcctcaggtggggagcaggaccagctggccccggggaactcactgcgcagcatggcacgcagtcgagctggcatggaggaggggatctaagcgtgtacagagaggacatggtgtcggggtgcgagcaggtgaaccatacagctttggtccagctcctctgcctgtagctgccagctgccagcccagacagcaggaggggacagacacaggtgcctgagagaggagccaatctaggacactggtccctattatttctgctgccccgggttgtgcctggaacatgcgtgggggtgatttccttttgtcctgtgagcagcctggccctgctactccagcaggaggcccggggggtcctcttgagtttttttcttttatcccacctgggtgtcttgtttcccctgcattcctcaggcagtgagtggtgctcactcactctggtgtctccatctgttggttacagaatggtgtgcagtgaattgcagcttcacttctgtgtgctgcgtgagtttgggtgggccacttacctgctgtggcctggctgcaccccttgtctgcaaagtaaggtcagcttctcctgcccaggccttcctgcaagctccccaactgtcatcaagaagcccaccttgctgcctctgctgcccatcacctggcccacaggtgccgtctggccagggccttttcatgttcaccctcactgtccctctcccagtccctaccctcaccagatgaccatgatgaaggccttctttaaatgtgccctttttctccgtgttcacagctggagttccattgcaggcaaatcccctccagtttcctgcacctctgctcttacctgtttggttgtctagaatattctccagaatctatctttctgttgagtaacttggggcttggcctctgtcttaccttttccatttcacatgctgttggcagaattgggtgtcatatttctcttccagttttgtccctgtgttgttgagtgcagagtctagggccaggtggaatgtgtcatcttgtgaggaaatgtgtttgtgttgttttttacttaaaaattgtcagcgtagtggagaggggaatgacagaagtaggaaggcaccccaccattgtgtagtgaggcagtatacagagaggtaaggcagccggggcagatggctgcggccctgcacggggctttttctggatctggttgcacgtgctgtgttctgagaggcgaggttagagcccagatcatctctattcatgtgacacagccattcccaaaaggacttagagcagagggaacttgacccccatcttaactgtctcttttgaggatgagcagagttctcaggtgtgcccccagcctggtttatataaatgtagctttaatctaggtgtgagcagatgtctgttggggatctctggacaccaggcctactctggagtcagagaggggacccgccatttggctctctggtacagtgtggacagtgtctgctcctctacttgtcatggctgaaagtactgcagctgtcatgacattctctggtgtagaagaaagaacttcccagagggtttcctggcactgcagaaagacccagaatgagggaggccctgggacccacagaggcccctgcaggcatttcagcacgcctccctccgctctcacttgttcctcagttctctcagaaatggagagaaatgacggtccttattccttctttttttacaggtgggcagatggaagagggtcgatgttttgctcaggatcacaaacagaggtcctgaggctccctctcctcactaggatccaccctcccccaaagcaaattttccttttgcctgttcactctgtgaagagggctccttgccaagtcacccagcatcccctcccctcctcctcctctccttccagcccaccctcatctcaggcaatcacatatacaggtaacaggtgttctcagcctcatgaaaaacccatgctagctgtgacattgaattgctgggctggcagacatctgcggaggagcaaaaggcatatttgcttcttcctgcctctgcgcggtgccagagagctaaagtcatggtctaacagggggagcatgctgtctgagagaatgttctgctagcttccagatgcacaggtttataaaaataccaccctgccatttaaaacatgtttaaaatgttgatagaaaacaatgaatcgtatccttagaaagacagaccctagtgaaagaaacactaactcacacaggtagggtctagcttccataacatttaagtttattctatggaattgttcattggtgctcctgttttagttacttctccatagacttgtttttcccttgactaatcaatgccatctggtgccaggtggtatcctgggtgtagcacagtgacagggtggagactgccctggccgtggcatgtgcagggggcgttcttgagcctgtcttctgggagccctttcttttcctttttccctcctttaggttgaagacttcatcattccctgcgggcagtttctctgtttttcctattttcttttcctcaagaaaaatgtaatttttaagtaacagaattgttttctgtgttgcagcatttaagttgctgagttgagaaatcatggctgagtttgccaagtaaagtttttaaagcaaaaaaaaaaaaaaaaaaaaaaaggagggagggagggaaggaaggaagaaaatatatgaacttgtttgtcagaaatacattttgaggcttttactaaaagaaatgggctagaagacatttgggggttagggcctgactgcttccaggtcctggacagatgttaccttctgtgcctgtagtcagcagttacctgaaggacaagccgagcctggtctgggtgtgtgtgacccaggagtgggtgcccctgaactgggtgtgactcctctgccacctctgttttcttacagccaagtacatcgtgcaagtggatggtaagatagggctgttccgaggcctgagtccccggctgatgtccaacgccctctctactgtgactcggggtagcatgaagaaggtgagcccacacaaagccaggaacagtcgcccgaggtttcctcatactcccagccacccctgcagcagccagttaccctggtcttgcctcctccttcccagaccattgggggcttcactccagccccatgggggagctcccaccccacagttctgctttcccacagctgtgacaccagatagtggctttcttttccccccaagctccagacctggaggttacctgaggtgggcccagccaatagacactgcagaggaaatatttggagctggttcctgccgcccaagtccccgaagagttccatggaagaggcgtagctgaacttggttctttcccttctctgtttcaggttttccctccagatgagattgagcaggtttccaacaaggatgatatgaagacttccctgaagaaagttgtgaaggaggtgggtgttgagagttggagagggagaggtgcgtggaggggagcctgatgatttctcacccccaagttgggcgggtcattgacaagtcgaagagttgggtccttgtgtatgcatgggtgggatggtaagggaagaagccctggcctggatgtgccgggaaccccggaaagccttctcagccattgttgggcctagcctgggacccgacagcactcctgggtgggggactggggagtgggcaacaggtggagccatccttggcagaccgaccccatgtgcagtccctgggacaggtttctccctcctgagcacttgtagctcccctcgagggccagttccagagacaggccgagggtggcgagtccccaccccatgctctcttccagacctcctacgagatgatgatgcagtgtgtgtcccgcatgttggcccaccccctgcatggtaagccaccccccttcccccgagactgtatctaagctggcgtcgggggcgtggggtgaggggcgccccctcgtggactgtacatagacagccgtagacctgttgggaagtggtagtggggttgggggtattctactggaacccacctcactgaggagagattggaattctttccaaagggaggtggggctcttcccaggcagtagaaatggcatgctgtggtcatggggtgtaacagggaatccgaaaggccctcttcctctcctgctctctgaataggccacgttgttcagtggccactctgcacctggcacccggtggctggagcattatgaagtgtggcccaccacatcacctgtgtgtgttttcttttttttcctcagtcatctcaatgcgctgcatggtccagtttgtgggacgggaggccaagtacaggtgggtaactcttgggactggcagagtggccctgttaccctttcagagtcggccagggcaggccgtgctgggattggttgctgcaccttttctgccctagtgctgtgtgagttcagcctgctgcctggcttctgaggaatgtggcagtggcttcaatagtctgtccagggtcattttctcttcgtcatctcttatcaagggcagccctagatgagcctagatgcctttgcagaggggtgagtgggattgtagtcagcttggattaggatttctggccccagagctgattctgccacttaggactgagctggggtctccttttggactcccgaagtaatgctctaacgatttttccggccctcataggctgatagctctttttatcccctatgaagaagccatccaccccatgggcttggggctcatcccttccattgtgtaccagaccctcacctagatctgctgcgtgcagccctgggcaggtgccaggggcatatgtgttgacacggaggtgggtcttggaggcatgtgtgaaggacacacctgggttgcccttcctctcttaagattctcatttcctggggtcggtgttttttgcagctgtcctgcggggccaccatcccaggaagctcagctgccatggtgcctcattttggggtcattaatgggaaattggcccattcccctagactgattatgaggttggtagttgggaccagaagggtataatctggccaccactgttctgagtggtggggccgggcctggcagggctgggatgatctgggaccggggctacccagggctttgccttccactggctccctctgttagtaggttgttattgagcttccttggcatttcacacccaagaacccacagcctgtcctctcatccagcttgtcctctcatctctaacagggtgcagtggccagggcatgagtccccggctccctgctgaggagtgccagatgtcttctcctaggctggttccagtgcctcctcctgcagggccctgtattctttctctgccctctgggaaagtacttctctttgcttactaccccctcctactcttactcttgggcgggcctgtgggctcctctgctagagggttgtttaaccagagataagtgtgagggccgggtaagagaagggcctgccgcctctgcagcagtggcccaagttaggagatgcattcctaaactcctatctcccagaaaacaccagtagaggactgctagtgggctgctcccatgggtggttgggcttccccagtctccatgaactgtgtaaactcctcctcaccctgaacaagcgctctttgcctttctacttggttcttcatggtaatagtcctccccatccctgccaggactggctggatttgagcagaactggtgggctcagccccacaccaacgggtgggcttctggtaggtgactgcatgaccctgtatctctgtcttgccttcttcacagtggtgtgctgagctccattgggaagattttcaaagaggaagggctgctgggattcttcgtgtacgtgagtttatacaccccataactggccacgggcatggctctgctaacaggtgtgtcctcaacctctcagaccgcagctgctggcctgggacttcactacatggccctgccctagcctgagtgctgcagccagctctccagagctccatagcgtgtccaagctgcttagcccttttcaggccatggctcatgtaaaagtggaactgtgtgtctagtacatgggggagatgaactgaccagccccactgggcctcatccagttgtggtgggtgtggggctggtcttcatgagctaagtcactgcatagtccttggcctcactgctaaaacatgactgaaaatctgacttggactgagggtggagctctggaagctcacaggctgaccacagccagtggattctgtttgacattgcttttctgacaaattagttgttgccgttaacatttaagatatgttgcacaaaaatccacatgtctggcatctcttgaaaagccagaaaatcttgtcctgctgagcggttctttctgtagagcatccatcggccaggacccaggacctgcttctttggcagggcacatggtctccgagggccgcagacaccctgtacttcgtcacgtcacatccagtgtacttcacctctaaagaaagcacatactgaaaagactaagttcagaaagaataaggtgcagacagaagccaggcttgatgagttgtattttgatttgccgttttaaggtctaggcagtgacatacatgctgataagtatgtcacaaacgtggtagacacatggtatacaacagtatccgctgtactagatacagggctccatattattcataagaagtctttatatcatggttttcccggtttgtgagatgttttttatttatggccccttgtttaaccaattagtgactacttgtaggtgcatgtgtgtgtatatgatatagaaatatatatacggttctcagcaggaggtgattttgctccccggggaacatcggcagtgtccggagacatcttgtggttgtcacaactggcatctagtgggtagaggccagagacgctgctaaacatcctacagtacacaggacagccccgcaacaaagacttattcagtcaggtgtcgttgcttgcatctgtgatcccagttagttgggattagtctcagtggtttctgcagctgtcaggagaccaaggcgggaggattacttgaggccaggagttcaagaccagcctgagcaacatagtgagacttctgtctctacaaaaatgtttttaaaaattagttggccgtggcggcatgcacctgtagtcctagctacccgggaggctgaggtgggaggatggcttgagcccaggagttggagactgcagtgagctatgattgcaccactgcactccagcctgggtgatagagtgagaccctgtctcttggggaaaaaaaaaattattcagcccaaaatgtcaatagtgccaaggttgagaaactctgatttatattcacacacacacatatatgtatgtgtaagtatttatacatacatatatttgcacatgtacctggtaacaaaccaacatttgtgacatacctatcagcatgtatgtcaccgcctagaccttaaaacagcaagtcaaaaaacaactcatcaagcctggcttctgggttctgtctgtgctttattctttctgaacatagtcttttcagtatgtgctttctttagaggtgaagtaagttggatgtgaggtgacaaagtgcagggcatctgtggccctcagggaccatgtgccctgccaaaggggcagccccgggaccccagccaatggctgctctacagaaacagccacccatcttgaaacactgcacatgaccacctctggcatttttcacactgcgtagttctcttctggtgtttgaataggattcccgcacaacagatgcctactctttgggttctttctccccatgtgattttggaacaggtgatactcatacatgttacagtgcatagaaagcaccaaagggtatagcacaaagtcaatctgagcacaggcagggacgacaagattagaaattgcattcacagaggttccttttattaatactcttcatagatgtattacatatattcttttgagtttttcaaatataagatttttttttttaattcaaaaacaaaaattctgcttctcctcccaggagacagccatccttctcctggcgagcctcccagggcactctgtacctaaacaagcaaacacattgtaaaaaacacaagaggcacatgggactcactgacctcaaactggccttttgccctcagcactgcatcttggggaaccttccttagcagtttatagagctgtttatcctaaaggccatcacttaaaaagttagccctccttgtaaatgcttgcatagaatctttttgatagaatattttcaggggcaaagagaacagatgcattgagcagtgtgtcttctgagagttggttaggtaaagaggccaggagaaaattaccaacacgtcggcactcttattatctgcatttggaaattccaaatttggcagtattcacatcttgatccctggcttctgtggtttgaaaactgcttgagactgttagctaatttatggcatccaaagcggcatagaacacctccccatgggaaaaggagcactatcttcccagtgtgcatagctgctggaccctgcaggcctcctttctaaggctgtgccattggatatgctaagattttgagctcggaacatccctgcctgcttcctgggtgtggagcccccaggaactgctcctctccctctcctgctcatctctgcttaccttgttttttagtggattaatccctcacctcctgggcgatgtggttttcttgtggggctgtaacctgctggcccacttcatcaatgcctacctggtggatgacagcgtgagtgacaccccaggggggctgggaaacgaccagaatccaggttcccaggttggttggaacaaggacttgtccttctttccgtgtgctgctgatgcccagggtctgggacaaactcaaggattctgggattctcagcatcaggccgggagggtgagagaggacctctcattatccctggagtcatctttgtctaaggggagaacggcctcaagaggcgagattccagattagtacccagacctgggaggaattaatggaatgcttgtccctgggcgccttagaaacagaccccagcttatctaaggctgctccgaggcagtgacccaactagggctcaggaagtcagaagatagaccagctaatagtgatcacctcttgacctttgtgtcacgtcttttgctttttaaaacccttttgtgaacgttatggcctttgatctgacggcatcctagttgtgaagggaacagggcaggtataatgttcgtttaccaatacagaaatcgagacccagagatcacaaattctggagaggctctgggctctccagagtcactcagctggaactgacagggctggaattagatccctggccaggccaagggtgcattcctctgagttttttcagatctgctaggaagtgtacagtccgatacaccctcctattttgttagctgtggtctacacagcctagtatacatagacctttcagcaggtcgggtcaggcataggaaggcctggtccttctacacagcacttgttgaggaaggccatccaggtacctgaggggttgactggttctgcctgaaccaagataagaggtagggagcagcgatggctgggaattgcagtgtccagacattctcacagtggggatcaccttcaagaaggatggcattccttcttgaagtggctttccctcccaggaggctaggagggcctggggacgtgtctgccagaatcacctgggtgggaagggggtcatgttcagcatgtgtgtgtgtgtggtacatgtctgttctgtgtggtgaggagtgccccatcccagatgggagcctctgcttgcagggagactggccacttgacctgggcaggtgagtcttcactggcctttcgatgtaagcaaattaaagtggctccatagagacccaccccatctgcaatcacagtggtacattcctgcagttctgccccttctcggggggccttgtgggtgggtaagctgctgctgtcacatacagagcaagggtggccaggagtgcaccgctaagtggtttctcatctaggtgggcagctgtctgaccagaggctgccgtgcttacatcagcaacaacagcagtcaacagatttgtctaaagtgtttttcgagtgcttttctgtatgtggcttaaaggccgaggtgaggctgccgggctgtcaaagccactcaagcagacatctgagcaaatctctgaccaagaacccaggccatcgatctggtgggatggccgctccacaggaagctgagggtgggggagtcacctttcctcactaggagctgtttgcttcagcaaagcaggatttgaggagttggggtctgaagggggaaaagcttgctgaggtggaggtggcgataagcctggacttgccctcacctcaccccacaggccaggattcgtctttgggtttcagggtgcatgtctgtcttagcactgactgcgtgccaagccctggatgttgatcaggcagacacgggctcagcccttgaggctcacagtccggtgggttgcacaggcagcggcagctgatccctcttaccgggtctccttctcgggactcccttcagtccacttaccccgtttctgccccccaggccttctctgggcagtgactgtgagggctgacaggaaaggcatgtgcagcgtgcttgtgaggagctcagcacagagggtggggtgagggcatgtgttgctgaagtctgcatcctgaggtgcctgtggcaaaccactcttcccttctgtctcctcagttcagccaggccctggccatccggagctataccaagttcgtgatgggggtaagttgtgccagctgtccttccttcccactgccttgcggacccaagcggggcctaggaggccaaccctggtaatggctggaggcaggtcttggtacagggtgttggcgtggtgtgtccctgctccctgggccggggtgggtcactggcactcaggcctctctgggtttcagattgcagtgagcatgctgacctaccccttcctgctagttggcgacctcatggctgtgaacaactgcgggtaggtgtgcgcccctctacttgccactctacctaccaaggctgtggggtgggggagacccaccgagcccttccagcactctgccccctcccacctgctctgtgtgtaggcttggcctgccaggcaccctggcttccgctgggatttcccagcaccccctggggtaaactgtggtgtcaggggtcagggtgtggatgggtggtagcctgaaggcattccttcttgaagtggctttcccgtggctggctgtcttccactgttctctgcatctacactctccttctccggcaggctgcaagctgggctccccccttactccccagtgttcaaatcctggattcactgctggaagtacctgagtgtgcaggtgagcaagcactggacggcggaggcctttcctgttctttgctacatccttcagctgaaatggttttgtggatgcttcattgcatgcaaagataagtggtttcatggaattcaatattgtgaggagatacttggtatctataaggcatttaagttttcatcttacataatttcagaaaggatttgaggtggctaagtgtgggtttattttaagattatacatcagacaagaccttttcttctttgagtcttaaagactcttaggataaggataagagaactctggcccaggtggcaggtggtaaagcccaagaactgcttctccttcaagtaacatgggctgaaaattcgaggtctgtaaccagttgagctgagttcctgggttgttagggcggctggcattggaaaccgactcctccctcctgcaggacattcctgggcccaggagagcctgtgggtggggctgggccacgtggggaactggcagcagtaccaaccttgggttctcgtgttctgtaccgaagctacctctccgtagctggagctcttgggcccagcagtcaggggtccaggctttggccgagggcagaaccttgccttttcctggccttgatttgcctcgcagtgaaatggggcagtggcccggagggagccagaactctgagtggcctcgaggctgagaagaggacagatgggagggaagcagggaggagagccgcagttcttcccagtggccctggtcagcgtgagtgtgtctcgtcctccctatgagcactgaaagagtcctagaccacttgggctctgaagcaagaggggcaatgagcctcctctctagggctctcctacagagtagccccaaagacacccctgggcaggaaatgaaccgctcccttctgcttcaacacaggcagattctgccctccagggatgtaggccgaggccgtccaccccggagctgggtctttgagctcctggacccttctttgcctgacactggccttcctctcggagggacaaggaagcgtggcctccctttcactcaccttacttttccttctggtccagggccagctcttccgaggctccagcctgcttttccgccgggtgtcatcaggatcatgctttgccctggagtaacctgaatcatctaaaaaacacggtctcaacctggccaccgtgggtgaggcctgaccaccttgggacacctgcgagacgactccaacccaacaacaaccagatgtgctccagcccagccgggcttcagttccatatttgccatgtgtctgtccagatgtggggttgagcgggggtggggctgcacccagtggattgggtcacccggcagacctagggaaggtgaggcgaggtggggagttggcagaatccccatacctcgcagatttgctgagtctgtcttgtgcagagggccagagaatggcttatgggggcccaggttggatggggaaaggctaatggggtcagaccccaccccgtctacccctccagtcagcccagcgcccatcctgcagctcagctgggagcatcattctcctgctttgtacatagggtgtggtcccctggcacgtggccaccatcatgtctaggcctatgctaggaggcaaatggccaggctctgcctgtgtttttctcaacactacttttctgatatgagggcagcacctgcctctgaatgggaaatcatgcaactactcagaatgtgtcctcctcatctaatgctcatctgtttaatggtgatgcctcgcgtacaggatctggttacctgtgcagttgtgaatacccagaggttgggcagatcagtgtctctagtcctacccagttttaaagttcatggtaagatttgacctcatctcccgcaaataaatgtattggtgatttggagttttt

SEQ ID NO: 7756 - DNA, 13540 bp, Homo sapiens
aggtgggtcatgagccgatgccccccacccttgggaccaatgtgctggggaggaaggtcctctatctgccgagcttcttcacctacggtgagtgtgcctcccaagcaggaaagcccacaccaacagaaaagaggcctcaggtggggagcaggaccagctggccccggggaactcactgcgcagcatggcacgcagtcgagctggcatggaggaggggatctaagcgtgtacagagaggacatggtgtcggggtgcgagcaggtgaaccatacagctttggtccagctcctctgcctgtagctgccagctgccagcccagacagcaggaggggacagacacaggtgcctgagagaggagccaatctaggacactggtccctattatttctgctgccccgggttgtgcctggaacatgcgtgggggtgatttccttttgtcctgtgagcagcctggccctgctactccagcaggaggcccggggggtcctcttgagtttttttcttttatcccacctgggtgtcttgtttcccctgcattcctcaggcagtgagtggtgctcactcactctggtgtctccatctgttggttacagaatggtgtgcagtgaattgcagcttcacttctgtgtgctgcgtgagtttgggtgggccacttacctgctgtggcctggctgcaccccttgtctgcaaagtaaggtcagcttctcctgcccaggccttcctgcaagctccccaactgtcatcaagaagcccaccttgctgcctctgctgcccatcacctggcccacaggtgccgtctggccagggccttttcatgttcaccctcactgtccctctcccagtccctaccctcaccagatgaccatgatgaaggccttctttaaatgtgccctttttctccgtgttcacagctggagttccattgcaggcaaatcccctccagtttcctgcacctctgctcttacctgtttggttgtctagaatattctccagaatctatctttctgttgagtaacttggggcttggcctctgtcttaccttttccatttcacatgctgttggcagaattgggtgtcatatttctcttccagttttgtccctgtgttgttgagtgcagagtctagggccaggtggaatgtgtcatcttgtgaggaaatgtgtttgtgttgttttttacttaaaaattgtcagcgtagtggagaggggaatgacagaagtaggaaggcaccccaccattgtgtagtgaggcagtatacagagaggtaaggcagccggggcagatggctgcggccctgcacggggctttttctggatctggttgcacgtgctgtgttctgagaggcgaggttagagcccagatcatctctattcatgtgacacagccattcccaaaaggacttagagcagagggaacttgacccccatcttaactgtctcttttgaggatgagcagagttctcaggtgtgcccccagcctggtttatataaatgtagctttaatctaggtgtgagcagatgtctgttggggatctctggacaccaggcctactctggagtcagagaggggacccgccatttggctctctggtacagtgtggacagtgtctgctcctctacttgtcatggctgaaagtactgcagctgtcatgacattctctggtgtagaagaaagaacttcccagagggtttcctggcactgcagaaagacccagaatgagggaggccctgggacccacagaggcccctgcaggcatttcagcacgcctccctccgctctcacttgttcctcagttctctcagaaatggagagaaatgacggtccttattccttctttttttacaggtgggcagatggaagagggtcgatgttttgctcaggatcacaaacagaggtcctgaggctccctctcctcactaggatccaccctcccccaaagcaaattttccttttgcctgttcactctgtgaagagggctccttgccaagtcacccagcatcccctcccctcctcctcctctccttccagcccaccctcatctcaggcaatcacatatacaggtaacaggtgttctcagcctcatgaaaaacccatgctagctgtgacattgaattgctgggctggcagacatctgcggaggagcaaaaggcatatttgcttcttcctgcctctgcgcggtgccagagagctaaagtcatggtctaacagggggagcatgctgtctgagagaatgttctgctagcttccagatgcacaggtttataaaaataccaccctgccatttaaaacatgtttaaaatgttgatagaaaacaatgaatcgtatccttagaaagacagaccctagtgaaagaaacactaactcacacaggtagggtctagcttccataacatttaagtttattctatggaattgttcattggtgctcctgttttagttacttctccatagacttgtttttcccttgactaatcaatgccatctggtgccaggtggtatcctgggtgtagcacagtgacagggtggagactgccctggccgtggcatgtgcagggggcgttcttgagcctgtcttctgggagccctttcttttcctttttccctcctttaggttgaagacttcatcattccctgcgggcagtttctctgtttttcctattttcttttcctcaagaaaaatgtaatttttaagtaacagaattgttttctgtgttgcagcatttaagttgctgagttgagaaatcatggctgagtttgccaagtaaagtttttaaagcaaaaaaaaaaaaaaaaaaaaaaaggagggagggagggaaggaaggaagaaaatatatgaacttgtttgtcagaaatacattttgaggcttttactaaaagaaatgggctagaagacatttgggggttagggcctgactgcttccaggtcctggacagatgttaccttctgtgcctgtagtcagcagttacctgaaggacaagccgagcctggtctgggtgtgtgtgacccaggagtgggtgcccctgaactgggtgtgactcctctgccacctctgttttcttacagccaagtacatcgtgcaagtggatggtaagatagggctgttccgaggcctgagtccccggctgatgtccaacgccctctctactgtgactcggggtagcatgaagaaggtgagcccacacaaagccaggaacagtcgcccgaggtttcctcatactcccagccacccctgcagcagccagttaccctggtcttgcctcctccttcccagaccattgggggcttcactccagccccatgggggagctcccaccccacagttctgctttcccacagctgtgacaccagatagtggctttcttttccccccaagctccagacctggaggttacctgaggtgggcccagccaatagacactgcagaggaaatatttggagctggttcctgccgcccaagtccccgaagagttccatggaagaggcgtagctgaacttggttctttcccttctctgtttcaggttttccctccagatgagattgagcaggtttccaacaaggatgatatgaagacttccctgaagaaagttgtgaaggaggtgggtgttgagagttggagagggagaggtgcgtggaggggagcctgatgatttctcacccccaagttgggcgggtcattgacaagtcgaagagttgggtccttgtgtatgcatgggtgggatggtaagggaagaagccctggcctggatgtgccgggaaccccggaaagccttctcagccattgttgggcctagcctgggacccgacagcactcctgggtgggggactggggagtgggcaacaggtggagccatccttggcagaccgaccccatgtgcagtccctgggacaggtttctccctcctgagcacttgtagctcccctcgagggccagttccagagacaggccgagggtggcgagtccccaccccatgctctcttccagacctcctacgagatgatgatgcagtgtgtgtcccgcatgttggcccaccccctgcatggtaagccaccccccttcccccgagactgtatctaagctggcgtcgggggcgtggggtgaggggcgccccctcgtggactgtacatagacagccgtagacctgttgggaagtggtagtggggttgggggtattctactggaacccacctcactgaggagagattggaattctttccaaagggaggtggggctcttcccaggcagtagaaatggcatgctgtggtcatggggtgtaacagggaatccgaaaggccctcttcctctcctgctctctgaataggccacgttgttcagtggccactctgcacctggcacccggtggctggagcattatgaagtgtggcccaccacatcacctgtgtgtgttttcttttttttcctcagtcatctcaatgcgctgcatggtccagtttgtgggacgggaggccaagtacaggtgggtaactcttgggactggcagagtggccctgttaccctttcagagtcggccagggcaggccgtgctgggattggttgctgcaccttttctgccctagtgctgtgtgagttcagcctgctgcctggcttctgaggaatgtggcagtggcttcaatagtctgtccagggtcattttctcttcgtcatctcttatcaagggcagccctagatgagcctagatgcctttgcagaggggtgagtgggattgtagtcagcttggattaggatttctggccccagagctgattctgccacttaggactgagctggggtctccttttggactcccgaagtaatgctctaacgatttttccggccctcataggctgatagctctttttatcccctatgaagaagccatccaccccatgggcttggggctcatcccttccattgtgtaccagaccctcacctagatctgctgcgtgcagccctgggtaggtgccaggggcatatgtgttgacacggaggtgggtcttggaggcatgtgtgaaggacacacctgggttgcccttcctctcttaagattctcatttcctggggtcggtgttttttgcagctgtcctgcggggccaccatcccaggaagctcagctgccatggtgcctcattttggggtcattaatgggaaattggcccattcccctagactgattatgaggttggtagttgggaccagaagggtataatctggccaccactgttctgagtggtggggccgggcctggcagggctgggatgatctgggaccggggctacccagggctttgccttccactggctccctctgttagtaggttgttattgagcttccttggcatttcacacccaagaacccacagcctgtcctctcatccagcttgtcctctcatctctaacagggtgcagtggccagggcatgagtccccggctccctgctgaggagtgccagatgtcttctcctaggctggttccagtgcctcctcctgcagggccctgtattctttctctgccctctgggaaagtacttctctttgcttactaccccctcctactcttactcttgggcgggcctgtgggctcctctgctagagggttgtttaaccagagataagtgtgagggccgggtaagagaagggcctgccgcctctgcagcagtggcccaagttaggagatgcattcctaaactcctatctcccagaaaacaccagtagaggactgctagtgggctgctcccatgggtggttgggcttccccagtctccatgaactgtgtaaactcctcctcaccctgaacaagcgctctttgcctttctacttggttcttcatggtaatagtcctccccatccctgccaggactggctggatttgagcagaactggtgggctcagccccacaccaacgggtgggcttctggtaggtgactgcatgaccctgtatctctgtcttgccttcttcacagtggtgtgctgagctccattgggaagattttcaaagaggaagggctgctgggattcttcgtgtacgtgagtttatacaccccataactggccacgggcatggctctgctaacaggtgtgtcctcaacctctcagaccgcagctgctggcctgggacttcactacatggccctgccctagcctgagtgctgcagccagctctccagagctccatagcgtgtccaagctgcttagcccttttcaggccatggctcatgtaaaagtggaactgtgtgtctagtacatgggggagatgaactgaccagccccactgggcctcatccagttgtggtgggtgtggggctggtcttcatgagctaagtcactgcatagtccttggcctcactgctaaaacatgactgaaaatctgacttggactgagggtggagctctggaagctcacaggctgaccacagccagtggattctgtttgacattgcttttctgacaaattagttgttgccgttaacatttaagatatgttgcacaaaaatccacatgtctggcatctcttgaaaagccagaaaatcttgtcctgctgagcggttctttctgtagagcatccatcggccaggacccaggacctgcttctttggcagggcacatggtctccgagggccgcagacaccctgtacttcgtcacgtcacatccagtgtacttcacctctaaagaaagcacatactgaaaagactaagttcagaaagaataaggtgcagacagaagccaggcttgatgagttgtattttgatttgccgttttaaggtctaggcagtgacatacatgctgataagtatgtcacaaacgtggtagacacatggtatacaacagtatccgctgtactagatacagggctccatattattcataagaagtctttatatcatggttttccggtttgtgagatgttttttatttatggccccttgtttaaccaattagtgactacttgtaggtgcatgtgtgtgtatatgatatagaaatatatatacggttctcagcaggaggtgattttgctccccggggaacatcggcagtgtccggagacatcttgtggttgtcacaactggcatctagtgggtagaggccagagacgctgctaaacatcctacagtacacaggacagccccgcaacaaagacttattcagtcaggtgtcgttgcttgcatctgtgatcccagttagttgggattagtctcagtggtttctgcagctgtcaggagaccaaggcgggaggattacttgaggccaggagttcaagaccagcctgagcaacatagtgagacttctgtctctacaaaaatgtttttaaaaattagttggccgtggcggcatgcacctgtagtcctagctacccgggaggctgaggtgggaggatggcttgagcccaggagttggagactgcagtgagctatgattgcaccactgcactccagcctgggtgatagagtgagaccctgtctcttggggaaaaaaaaaattattcagcccaaaatgtcaatagtgccaaggttgagaaactctgatttatattcacacacacacatatatgtatgtgtaagtatttatacatacatatatttgcacatgtacctggtaacaaaccaacatttgtgacatacctatcagcatgtatgtcaccgcctagaccttaaaacagcaagtcaaaaaacaactcatcaagcctggcttctgggttctgtctgtgctttattctttctgaacatagtcttttcagtatgtgctttctttagaggtgaagtaagttggatgtgaggtgacaaagtgcagggcatctgtggccctcagggaccatgtgccctgccaaaggggcagccccgggaccccagccaatggctgctctacagaaacagccacccatcttgaaacactgcacatgaccacctctggcatttttcacactgcgtagttctcttctggtgtttgaataggattcccgcacaacagatgcctactctttgggttctttctccccatgtgattttggaacaggtgatactcatacatgttacagtgcatagaaagcaccaaagggtatagcacaaagtcaatctgagcacaggcagggacgacaagattagaaattgcattcacagaggttccttttattaatactcttcatagatgtattacatatattcttttgagtttttcaaatataagatttttttttttaattcaaaaacaaaaattctgcttctcctcccaggagacagccatccttctcctggcgagcctcccagggcactctgtacctaaacaagcaaacacattgtaaaaaacacaagaggcacatgggactcactgacctcaaactggccttttgccctcagcactgcatcttggggaaccttccttagcagtttatagagctgtttatcctaaaggccatcacttaaaaagttagccctccttgtaaatgcttgcatagaatctttttgatagaatattttcaggggcaaagagaacagatgcattgagcagtgtgtcttctgagagttggttaggtaaagaggccaggagaaaattaccaacacgtcggcactcttattatctgcatttggaaattccaaatttggcagtattcacatcttgatccctggcttctgtggtttgaaaactgcttgagactattagctaatttatggcatccaaagcggcatagaacacctccccatgggaaaaggagcactatcttcccagtgtgcatagctgctggaccctgcaggcctcctttctaaggctgtgccattggatatgctaagattttgagctcggaacatccctgcctgcttcctgggtgtggagcccccaggaactgctcctctccctctcctgctcatctctgcttaccttgttttttagtggattaatccctcacctcctgggcgatgtggttttcttgtggggctgtaacctgctggcccacttcatcaatgcctacctggtggatgacagcgtgagtgacaccccaggggggctgggaaacgaccagaatccaggttcccaggttggttggaacaaggacttgtccttctttccgtgtgctgctgatgcccagggtctgggacaaactcaaggattctgggattctcagcatcaggccgggagggtgagagaggacctctcattatccctggagtcatctttgtctaaggggagaacggcctcaagaggcgagattccagattagtacccagacctgggaggaattaatggaatgcttgtccctgggcgccttagaaacagaccccagcttatctaaggctgctccgaggcagtgacccaactagggctcaggaagtcagaagatagaccagctaatagtgatcacctcttgacctttgtgtcacgtcttttgctttttaaaacccttttgtgaacgttatggcctttgatctgacggcatcctagttgtgaagggaacagggcaggtataatgttcgtttaccaatacagaaatcgagacccagagatcacaaattctggagaggctctgggctctccagagtcactcagctggaactgacagggctggaattagatccctggccaggccaagggtgcattcctctgagttttttcagatctgctaggaagtgtacagtccgatacaccctcctattttgttagctgtggtctacacagcctagtatacatagacctttcagcaggtcgggtcaggcataggaaggcctggtccttctacacagcacttgttgaggaaggccatccaggtacctgaggggttgactggttctgcctgaaccaagataagaggtagggagcagcgatggctgggaattgcagtgtccagacattctcacagtggggatcaccttcaagaaggatggcattccttcttgaagtggctttccctcccaggaggctaggagggcctggggacgtgtctgccagaatcacctgggtgggaagggggtcatgttcagcatgtgtgtgtgtgtggtacatgtctgttctgtgtggtgaggagtgccccatcccagatgggagcctctgcttgcagggagactggccacttgacctgggcaggtgagtcttcactggcctttcgatgtaagcaaattaaagtggctccatagagacccaccccatctgcaatcacagtggtacattcctgcagttctgccccttctcggggggccttgtgggtgggtaagctgctgctgtcacatacagagcaagggtggccaggagtgcaccgctaagtggtttctcatctaggtgggcagctgtctgaccagaggctgccgtgcttacatcagcaacaacagcagtcaacagatttgtctaaagtgtttttcgagtgcttttctgtatgtggcttaaaggccgaggtgaggctgccgggctgtcaaagccactcaagcagacatctgagcaaatctctgaccaagaacccaggccatcgatctggtgggatggccgctccacaggaagctgagggtgggggagtcacctttcctcactaggagctgtttgcttcagcaaagcaggatttgaggagttggggtctgaagggggaaaagcttgctgaggtggaggtggcgataagcctggacttgccctcacctcaccccacaggccaggattcgtctttgggtttcagggtgcatgtctgtcttagcactgactgcgtgccaagccctggatgttgatcaggcagacacgggctcagcccttgaggctcacagtccggtgggttgcacaggcagcggcagctgatccctcttaccgggtctccttctcgggactcccttcagtccacttaccccgtttctgccccccaggccttctctgggcagtgactgtgagggctgacaggaaaggcatgtgcagcgtgcttgtgaggagctcagcacagagggtggggtgagggcatgtgttgctgaagtctgcatcctgaggtgcctgtggcaaaccactcttcccttctgtctcctcagttcagccaggccctggccatccggagctataccaagttcgtgatgggggtaagttgtgccagctgtccttccttcccactgccttgcggacccaagcggggcctaggaggccaaccctggtaatggctggaggcaggtcttggtacagggtgttggcgtggtgtgtccctgctccctgggccggggtgggtcactggcactcaggcctctctgggtttcagattgcagtgagcatgctgacctaccccttcctgctagttggcgacctcatggctgtgaacaactgcgggtaggtgtgcgcccctctacttgccactctacctaccaaggctgtggggtgggggagacccaccgagcccttccagcactctgccccctcccacctgctctgtgtgtaggcttggcctgccaggcaccctggcttccgctgggatttcccagcaccccctggggtaaactgtggtgtcaggggtcagggtgtggatgggtggtagcctgaaggcattccttcttgaagtggctttcccgtggctggctgtcttccactgttctctgcatctacactctccttctccggcaggctgcaagctgggctccccccttactccccagtgttcaaatcctggattcactgctggaagtacctgagtgtgcaggtgagcaagcactggacggcggaggcctttcctgttctttgctacatccttcagctgaaatggttttgtggatgcttcattgcatgcaaagataagtggtttcatggaattcaatattgtgaggagatacttggtatctataaggcatttaagttttcatcttacataatttcagaaaggatttgaggtggctaagtgtgggtttattttaagattatacatcagacaagaccttttcttctttgagtcttaaagactcttaggataaggataagagaactctggcccaggtggcaggtggtaaagcccaagaactgcttctccttcaagtaacatgggctgaaaattcgaggtctgtaaccagttgagctgagttcctgggttgttagggcggctggcattggaaaccgactcctccctcctgcaggacattcctgggcccaggagagcctgtgggtggggctgggccacgtggggaactggcagcagtaccaaccttgggttctcgtgttctgtaccgaagctacctctccgtagctggagctcttgggcccagcagtcaggggtccaggctttggccgagggcagaaccttgccttttcctggccttgatttgcctcgcagtgaaatggggcagtggcccggagggagccagaactctgagtggcctcgaggctgagaagaggacagatgggagggaagcagggaggagagccgcagttcttcccagtggccctggtcagcgtgagtgtgtctcgtcctccctatgagcactgaaagagtcctagaccacttgggctctgaagcaagaggggcaatgagcctcctctctagggctctcctacagagtagccccaaagacacccctgggcaggaaatgaaccgctcccttctgcttcaacacaggcagattctgccctccagggatgtaggccgaggccgtccaccccggagctgggtctttgagctcctggacccttctttgcctgacactggccttcctctcggagggacaaggaagcgtggcctccctttcactcaccttacttttccttctggtccagggccagctcttccgaggctccagcctgcttttccgccgggtgtcatcaggatcatgctttgccctggagtaacctgaatcatctaaaaaacacggtctcaacctggccaccgtgggtgaggcctgaccaccttgggacacctgcaagacgactccaacccaacaacaaccagatgtgctccagcccagccgggcttcagttccatatttgccatgtgtctgtccagatgtggggttgagcgggggtggggctgcacccagtggattgggtcacccggcagacctagggaaggtgaggcgaggtggggagttggcagaatccccatacctcgcagatttgctgagtctgtcttgtgcagagggccagagaatggcttatgggggcccaggttggatggggaaaggctaatggggtcagaccccaccccgtctacccctccagtcagcccagcgcccatcctgcagctcagctgggagcatcattctcctgctttgtacatagggtgtggtcccctggcacgtggccaccatcatgtctaggcctatgctaggaggcaaatggccaggctctgcctgtgtttttctcaacactacttttctgatatgagggcagcacctgcctctgaatgggaaatcatgcaactactcagaatgtgtcctcctcatctaatgctcatctgtttaatggtgatgcctcgcgtacaggatctggttacctgtgcagttgtgaatacccagaggttgggcagatcagtgtctctagtcctacccagttttaaagttcatggtaagatttgacctcatctcccgcaaataaatgtattggtgatttggagttttt

SEQ ID NO: 7757 - DNA, 309 bp, Homo sapiens
gagtgtcctcctcctcccgtcctgggaaacctcatccaatgggcaaagctgaaagggcctctgacaggcctttggggacctccttatatatatccttacgtatatacccaagataattggaaacttaacgttcacacaaaaactggtatatgaatgcttagtagtattattcgtagtagctcaggagtggaaacagcctgagtgtccgatgacaaataaaatggaaatgttctatagaatgtaatgaatattccatagaatggaatattacttggcaataaaaatgaatgaagttccgattcatgctac

SEQ ID NO: 7758 - DNA, 577 bp, Homo sapiens
tccgttcaaacagaaacttttattgcgaacccccaaaactagcacggttctgttgtaggtgttgttgcagagtgtcgggcacgtttacaaacaggaacagggcacttgctgtcctatcttcctcgcagggttcttgtgacgattacacttaaatcaacacgtataaagcattttaaaaagtgcctgtcacatagtccctgcaatttaaggtctagttgtgattattcacttgtattaactaagaatcaactacaggcgcctagcagtgcctgcatgtgctcacactgaggcactcactaaaaccctcaggatctagtgagggagacagtcaaatactttagagcaaaacaaattttacaaccacggactctgaggaaggcgtgcgaaggctccacagctggggagggtgcccacagtcgccgaggggacatctggatttgctctggttgggagagcattcctggcagaggagatggaaaatgcgatcggacaaagaggctgggaccgcggaggggatcgggctcggggtcggggctcgtcctgcagcaggagattcagctcgcgcagagttccacgc

SEQ ID NO: 7759 - DNA, 5488 bp, Homo sapiens
tttcagtgttatttgtacctgttctacagtccagccaggactatgaaggtggtgcttatgctgctctttatttgcctgggcaacatgtacctgcacgggctgaggaacctctggcaaatccttttccacataggagtggcttttctgtcttcatatcagatactaacaaggcagcttcaggagaagcagtctgactgtggagtatgaggatgacactgtgatgaatggattctttgattttcttttgaggatcaatctatgtttctctttctgcttctctactttacactccagtttccatccttttcagccaactggactgaaaaaccaggaattggggatgttaaacagttgcagtggaagtcatgaggttgcttgatacccagccttggttctgtgccaagcattactgcaggatctccagccagttcagcacgtttacctaggacagctggatctgggggctcatccagaaagagctttattggaagagagaaaggaaatattttggtcttttaagttgaatgatacagtaaaccacttgattcaataacactggttttagtcattgagagttgtctccaaggaaccactttaaaatccaaatcagctttcagtctaaacataacttgattagttttttttttcagagggtcagtacaggatgaattaaaaacctaaaaatatggttcataaatgtaagctagataaattttgtttacattttttcaatatcttaggttcgatatacctttggaatatttaattatattttggatataaattggacttcatttagggtgagggcaaacttaagctgagaaaatggttaagaaatctgagtttatttaatttatatgtaaccttttatagtggtgggactgtttgggtacagagatgttttatatttatttgcagggtatatccaaatattttaaaaattaattgaataaccagtacttctagatgataagtttgtcagcatgagcagaaatgagaatttcaggattacttacaattgaccacaacctggagtaggtgaatgaacatggattcagtggcactttacagatccgcttgggaggggctgctgtcatcagccttttcagtagagctgagtgcctgttgttttaatgatgatgactactgtaccctgtgtacctgttcccagagcgcctccaaaattaattactcctctgcacctttcccagtcatcttaattagcttgagggcctcattttttatgaacaagagttaagtatctgttaactttttaaagcttgatagagatataattaacacatactctggaaagttactctctttcactgtcaaaaaattgattgatcacagttttccaaaatatggttctggataagatcccttaggtttcccgaaatttcagcctggcttgttttgtaccacgcaggaggtcattttgggagtttgctctttggattgttcttggtagaagtctggaatctgaatagttcaaccacagttgcatggaacactttgagtgttcaactgcattatgtggtcttgataaatttttaaaaatcctattttgatagtttttaaaagtggaaaaccattacaagagttgagtggatagggaatgtaagaatgtagttttagaaaaattcaattatatttggttatcactggtattgtattgttattgagctaccttgttatcattttaagaaaaataagtttatatactgggaactatgttgggaaaatgttgccatagtaactttattttttataatagaattttctatttttgaccaaacataaaatatttggatatgggccaggcatgatggctcatgcctgtattcccagcactttggaaggccaaagcaggagactcggttgaggccagtagtttgagaccagcctggacaacatagtaagattcatctctacaaaaaaaaaaattagccggatgtgatggcacatgcctgtaatcccagcactttgggagtctgaggcaggaggatcccttgagtccaggagtttgaggcttccatgagctgtaatcacaccactgcaccccagcctgcgtgacagagtgaaaccctgtctctaaaaagtctgaatatgaaaattatattggcagcatactcagacataaactccaaagttgtctctacactgatttcacatctgcataattttctgcatacccagcaggtgaattttcagtttttctgggagacaattttgaagagatggtgaaatagaatgggaagttaaggaggggaggtaaaatgttttaaatgagaagaacaaaaaagctttaaaagtcaataacactttgggaagctgaggtgggcagatcacgaggtcaagagatcgagaccatcctggctaacatggtgaaaccccatctctactaaaaatacaaaaattagctgggcacggtggcttgtgcctgtagccccagctactcaggaggctgaggcaggagaatctcttgaacccgggaggtggaggttgcagtgagccgagatcgagccactgcactccagcctggtgacaaagcaagactccgtctcaaaaaaaaaaaaaaaaagtcggtaagaacggcttaaaaatggactgttttcttttcctgtgtggcattgggttgccatgtagacctgtaccccaggtgctttgggcatctgagcctatgatccatattcagcaggcagtaaagaaacggtccttgaagatgagtccttcctggtaatgcttcctgaccaccgaggcactaccagagatgttatccacaccaggtcgaatgtgtggatattagttaacatctacatggggtgagattgacttttgcaaacaaaagggaaaagatgcactagaaaaacagtacaagtaatgaccacaaaaacattgtttgactgaaatccagctagctaaaagaatcctcagctcactgaaggaagagactgaaaataggaaagaagttctggtgatttcatctgagggaaatccccaggcttaggtttgacttggttcagggttggaggtttatagcctcttgtgtgatccttgataccagcaaactggttccaaatcccaggagttatcctcactccaccatggactcactgttgttgtagcacttttgttttcccagtagttaaatgctacctgtgcagctgacatcactggactagatctgggaatagatgaaataatgttgaaaacaaaactttagaggtgccttctggtatcagatgctgcaaggccttgagcatcagagtgtgttaagtcccatctactgtatcaaggccagagtgtggctccatgctcttaggaagggtttcccaaccacggggccagagcccaaaaggtttccccttccctaatatgctaatgaacgaaacatgtaaatctgttttcccctgttaggctagtcttactgtgatgagaagtgtacctggctttccttttcctgggtggagacagctggggcatattcgggtggcactccctctcagtaccagaggccccactgcctgcagctggaggcatgtgaccataagctcctgcttttgctttttgggcttgcatccctcttttctgtgaactctggagaatgctggaattaaaacatttaagcattttgattaaatgagcttgagctcctctgttcttttctaggtgctcttgttctccaactctcctgcctctttctacctctgccctatacattccagctctggagacagagtctgaaactggagtctctggagggatgagaaaaccatctttaattgtaacaaatggggtgggtagacgagcttcagagtgggagcagattgcattgaggttcaactctcccacccatgcctgggagtcaagtcttggagaggagtaacactcttggtggtcagcacagctcagagtcagagacaatagccagcaggccagcaaggctggctgtgtgaggcacaggaagcagggcataggtagggagcagagctgggggttctctctctgctggaagatagcagctgccccttggcatatgggggttgcacactgcaccttgtagccagggctgctatttgctgttctgtgaaggagttggccactcattgtgacatgcaggacagtggccttctgagaacctgctgcttgcttgcatagtgcagcacaagtgaggacaggcaggggtgggagcatttatggtgatcagatgtgcctggcaagcccctgttcagacattgctcacattccaaatgttttcgtgtagaatattgcacaggtctggggacgctctacctgtgccctgtgagtgttaataatggtggagaaagagtgtagctgtgcccttgagagagaaggtgagggaaagagtgcaccagtcagctgaccgtcagctggctaggctcttcactgagtcctatgtcgcagtgcacaaatcactgcccatcaggcctcagtttcctcatctggtaaatggtgataacatcaatctgcccccccgccagggtgctgttatgagggtcaaaagtggtagtggagggtaatactgggtgagtccattgtgtgtgggaggagaaaggctttacattcacctggtacatgaaggtttttctgcttcaggcagcacagcacagccatttcttctggcctttacaaaaaggcattttgttatactacagtgtaaacctcatttttttcactccaaaaggtagcagcccctcttcttcccaccctggacctgcctttcactccctgggcacagagcgcatggtaccattgatgtttggtttattccaggatccaaggagctggttctgctggttggaccaaacctcgtgagccagccacccctgacccaaatgaggagagctctgattctcccatccgggagcagtgatgtcaaacttctgctgctggggaaatctcatcagcagggagcctgtggaaaagggcatgtcagtgaaatctgggaatggctggattcggaaacatctgcccatgtgtattgatggcagagctgttgcccacaagcgccttttatttagggtaaaattaacaaatccattctattcctctgacccatgcttagtacatatgacctttaacccttacatttatatgattctggggttgcttcagaagtgttatttcatgaatcattcatatgatttgatcccccaggattctattttgtttaatgggcttttctactaaaagcataaaatactgaggctgatttagtcagggcaaaaccatttactttacatattcgttttcaatacttgctgttcatgttacacaagcttcttacggttttcttgtaacaataaatattttgagtaaataatgggtacattttaacaaactcagtagtacaacctaaacttgtataaaagtgtgtaaaaatgtatagccatttatatcctatgtataaattaaatgaggtggcttcagaaatggcagaataaatctaaagtgtttattaaca

SEQ ID NO: 7760 - DNA, 23979 bp, Homo sapiens
  SITE (9003): n equals a,t,g, or c
tgcctcagcctcctgagtagctgggattacaggtgtgtgccaccacgcccggctaatttttgtatttttagtagagacggggtttcgccatgttggccaggctggtcagaatttttaaatgtttattttatatataatgtccagggtatttcaagggagaagtagggaaaagtacttctacttcatctttccagaagcagaagttcattctgttttgagcagtggtcagatctcttatttgagtacaggctgtctcataatagctcataacctgaattcacaaatatcaaatccctgtaaagataagccccttcctttttgtattattatttttccatcttttagaatacaaagtatatttttacaaaggaaaataatgtcaaggatgttgtcttcattcttatactcttccgtggcagcctataaaatcttttaacccttcaggcagctgccatcctgtacattcacatacactcacaaatacacacaaacaagttagtatcacagtgtcatcttcattaaaccatcacaaatatttaaaaaagacttttaaaaaatagatgtgagtttcactagtttgcagtactagtaacttgatagaactgaaaaacaagaggggtatttatttatcttgaatactaatatttgaggaaaagcaagtttgatcaccaaaggataggatggagaagtagagaacctggaggggtcatttgggtcctttagagagtggtaaaactagttcttctgattaccatcgcttggaaatgtcacccttttcttttttattggcttaagataatacctggcataaggtagatgctccataaagacagaactacagaggatgtttggaattgacagttggagtcagtgcacactgctttcctttagaggggcatacaatttactcagctcccaaaaaagtacctttcttattttgctttggggtgtttctgtcctgtctctaactgttttggtatctcattgactgtctctttttggctcaatgtcttcatatcttggcttatggttctttttggagttattgttgagagcctaagccctggtctcaaattgatcttgtagcctttccctatgtctgtcagggctttgtgccctataactctttttaaaaaatgttttaaaattaaatatttcaaatacttacgaaagtatagaagatagaacaaaaggaatcccctgattccttttgtggtgccttgaggtctcatcattggctaggcgtctgctgtaaaacccacagtgtcttctggcagttgacctggtcctgccgttggtgctgcaaacttagtagcttttatgtgtgggtcctggggcttttcacatttttactccccaatggaaggtgtggagaaatgggtcaaatggactgtgtaggatctgttggctggtagcctaatttttctttttgcctcctttgtgtttttatatcactgcagtttctacatgtatattgtggtaataattattcattcattcatccattccagacatggtctttattcttagaacttatattttggtagtggaaatgcaaaatcagtaaaatagagaacaaagaggtaggtttcctaagaatttaaaagagggagaaagtacttctagctggacaagtctgagaaggtggatttgagacagtctttgatttgcatttggatatggagagatgaaaggagtggcattgcagacacaagtgaagaatgcatagaggtacagagatgaagagtagtgtgcatctttggggttctgagatgaagaactgagatgccaaataaggttgcatccctagagttctttggaagagaggtccactggtatcctgttatcatcctatcaagtaaagggcctgatagtagaggatcctgtcaagtagaggatttgtgaaatacgatgtgtggacacatcctattggaaagacttatctgagctgtaatagccacctcactaatccctaattgcagggctgccactcacagatgtacaggttatgccctgaacaagcaccctgcagtgttaacagatagggctaaaacacagccaggctctgctagcagaaatggtgcaggcctgtttccaccaagagaggcatcctttcctaatctgcccaaggcaccacgagggttcagatctgtttctttctgtttcttaatggtattcacatatcactgtaatatgatttgctaaatgattgcctttagccatatgtagggattcagtcatcactttgaagactgactctgtatcaaacatttgcagaaattcagaaggacatgatctagaggtttcatttttgccttctgctttccttgtcaccagcattaggttagatgctcagaatctctccaccttcttctatctccttgcaagtgaggatatggcagctaaactgcttagtgcctatctccatgggtgacctgaagttcacaggtcactgacatcaatcctcgctgcttcagtgtctggtgcttcctgtctctttagggctgtcttgctctgtgtcctgctacctgccattactactgttggtcctgagccctctggtcctgcgtccgttcttctctattcctttccccatcatcccagttggcttaattctggaaagggagagactcattagagaaaaagaaaaagagaattacaactgcagaaaaggcagggaggataatgaagggaggaaagttgggagtgatatagcagtagaggccagggaaataacaataaaagcaacatttgcaattatagtaagaatgagggtgaaaaaccctagagtgggcatttcacaggtgggggtatttctggcactgtcatttgagcctcagtaacaaggtgaccttgctttcctcaggtgtcctcatgacttctcttgtggaccatgtccgtgatcttttttgcctgcgtggtacgggtaagggatggactgcccctctcagcctctactgatttttaccacaccccaagattttttggaatggaggagacggctcaagagtttagccttgcgactggcccagtatccaggtcgaggttctgcagaaggttgtgactttagtatacagtaagtgatcatattcactttttcagaatattagcaaaatttggattacttttaactacatgtagtgataatcttatgctgatcacattgtgtattaaaagtagatctagcatcagtggtctgagatcatgtgtgtctacaacagaatcataaaagaaatgggttttcttagagcctcaggaatggctgctccaacttttttttttttttttttcttttgaggcagagttttgctctgtcacccaggctggagtgcagtggcaccatcttggctcactgcaacctccgcctcctgggttcaagcagttctcgtgcctcagcctcctgagtagctgggatcataggcacatgccacgatgcccagctaatttttatatttttagtagagatggggtttcaccatgttgcccaggctggtctcgaattccagatctcaggtgatccacctgcctcgacctgtcagagtactgggattacaagtgtgagccactgcacccagccgtggctgctccacctcttaacttctgttagtggagtgcccatgagcattgggagacctgggttcatgtctttagttttgtagttttttcttcactcagatgcaggggaagagaaaaggtaaggagggaggagatactagattataatgtggggagggaaaataatgagagttagaaagccaagaaataagaaaaaaatttcatttttactttatttatacctttgctttttaattttttcacttttttatgttttaatttttcactttttaatttttatttatttatttttttgacacagttttgcccttgtggcccaggctggagtgcagtggcaaactctctgcacactgcaacctctgcctcctgggttcaagtgattcttctgcttcagcctcctgagcagctgggattataggcacctaccaccacgcccggctaatttttgaattttttagtagagacggggtttcaccatgttggccaggctgctcttgagctcctgacctcaggtgatctgcccaccttggcctcccaaagtgctgggattacaggcgtgagccactgcgcctggtcatttttaaatttttattatgtgacaggagcaggggagtgaaaaataagtgagagtaggtctcttttctcaaggaacttaaagtctaacaaggtaacaagagaaatatataactaactataatacagtggggaaaatgttccattggaagtaggaatcaagtgattacaataatcctggttacaataactgatattattgagtgttttctatatgccaggcactattctgtgttttatgtggctaatgatgtaggtaatagtgttacacctgttttgcagaggaggaaactgaggtaaaaaaaacttaactaagtttacactgttagtaatgggtcagcccaggatttgaatgcaggcagttaggcaccaaagtctgcttcttatgggttatacaatttcctgttctaggactcagagcaagaagccagtcattctatggaggcatcaggggcaaggcagattttagaatatcaaaatgacttgttagattttacgtctattttctcgttttagacctttacttagcaagtctcttttgctctccttatatttttattttttattttattttttagagacagggtcttagctgggtgcagtggctcacgcctgtaatcccagcactttgggaggctgaggcgggaagatcgcgaagttcaagaccagcctgggcaatatgataagaccccatctctacaaaaaaattaaaaattacccaagtgtggtagggtgcacctgtaccagctacttgggaggctgaggtgggaggattgctcaagccaggaggtcgaggccacagtgagccatgttcacacctcagcctccaaagtagctggaactctgtctccagatagataggtagattggatagattgattgattgatagatagcctcccaagtagctgagtctacacaccactatacccagctaatttatttttattttttagagacaaggtcttgccatgttgcccaggctggtcttaaactcctaggctcaagtgatcctcccgccttggccttccaaagccctgggattataggtatgagccaccttgccttgcacccttttgttctccttgaatagtaaatttttttttttttttttgagacggagtctcgctctgtcgcccaggctggagtgcagtggcacgatctcggctcactgcaagctctgcctcttgggttcacaccattcttctgcctcagcctcccgagtagctgggactacaggtgcccaccaccacgcctggctaatttttttttgtatttttagtagagacggcgtttcaccgtgttagccaggatggtctcgagctcctaacctcgtgattctcctgcctcggcctcccaaagtgctgggattacaggcgtgagccaccgcacccggccttgaatagtaaatttttagttgacctgctaagctgaggtccttttaggggaattcagtctcagaattataaaaacaaaaggaaaagtccaggcctgaccccaggctaggtggtaatgtcaggctagaagggccatgtcctgaagggggtgacaaataataggcacatgcagctgtcacctggtgatgtgggctctggatgtttaggagcaaacactgagttgcacctgcccacatgtgcagcccctttctctggacatgctgaacatgctgtccttgatggtctctcctttactatgctgtgattaactgatttgtacttcaaataggaaagcttttctctgttaaaggctatttttcacagaaaaaagaagtctaagacttcagatttaaatcctggatacttcagtagtattttggaaaaaggaataaaaaatgttctactcatttgtaattttgaattaaatatttaccattattttcgcagaggaaatagactttcttttcttacaggtgagcagtaccatagcttttaatagtaaggagtgtgttagttccctaaggctgccataacaaatgaccacaaactggcttcaaacaacagaattcgttctctcacaggtatcgcagggccatgttccctctacaaactttaaggaagaatccttcctaaacctctgctactttctggcagtcattggcaatccttggttttccttggcttgtagatgcgttactgcaggctctgtctccatggttgcatggtcttcttccttctgtctctgtgtccaaatttcctttcatataaggatactgatcattagatgagggcccaccctaatccagtatgacttcattttatcttggttacatcttcaaagactctgtttctttgagttaggacatcagtaaatctttttggggggacaaactcaacccacaccaggggtcctctttcaaatagaaacacctccatcctagagtggcctagacccttctgaaggatttcttccataaggaggagagttgtccttttttttagattggaaaagtttttatatagggagttacagtttcaaaaagttggtagaacaacataacctaaaaaccgtcctgctgaaaacatccagaaatgagggtaaatatatatcgacaattactttaaatgtgtagttaatcttgaaagaaagaaatcctaagatgctagaaatgaaaggggggcagaatattaaggtagtaagtgtgtgagcggacagtgaggctcctggcattcagtcaccataaaattggagcttggtttgggcttacataggatggagtgtcagaacaagacccttgtggctgggtgcagtggttcacgcctgtaatcccagcactttgggaggttgaggcaggcagattgcttgagcccagtggttcgagaccagcctgggcaacatagagagacccccatctctacaaaaacacgaaaattagccaggtgtggtggcacacgcctgtagtcccagctactcgggaggctgaggtgggaggatggcttgagcctgggaggttgaggctgcagtgagctgagattgtgccattgcactctagcatggatgacagagtgagaccctgtgtcaaaacaaaacaaaacaaaacactcttgcataaaggaaagttcttgtcaggccacaacctaatggaatggtgataggtgagggaaataattttcccattgatacagggtaactcacctctacttggctttgtgtgggaaggaaaaataaatttcacctaagaaattgaaatgttgttcttgcgcctcgtaaaaggttgaagttggagtgtatactccccaaagtctaggaattcctaagccaaggttgaaacatcagtattggtcccagagtgatgacactgctatggtagccagccagagcaaatgcagaaccacactggaagaagtgtgccacaacttgggcttcaggggattcttacaaaaaaaagtcccatagggatgagttctcagcaaaaaggacaaaacacaagaggagacattccacagtgagtgggagtcagtagacacacagataggtgacctagaacccctgtaccctgaacttgaaatgattgcatgacagcccaaaagggagtagaaaaagaagaaaagccctgtatttattttatgagaccaaaataacctaaataccacaatcagatgaagacagtataagaaaggaaaattataggccagtcttatttgcatagaaacaaaagtcccaattaaaatgttagcaaactaaatccagcagttgtatgtttatgaatatgtaggaacttagatccaacaagggcttattttaggatgccaggatcatttaacattaggaaatctgttgatgtagattaaagaagaaaaacgttttctcaatagatgtggagaagtctgaggctaattcccccaatagaatatgcatccctcatgcatgaataaataagagtgatcacaggctgtcattgattaagactactagacattttaaaggaagcggaagaaagacagtctcaggaataggtcgaactgaagagacaatatacctgcagcaaacagctacaggactgtttaaagccaagcaagtgcagaattcaggtaaggttgtgtctgggtgtgggatgggaatacatggggctgtttcctggtaatacagatattgcccttttgtttcagtttttcttctttcggggacgtggcctgcatggctatctgctcctgccagtgtccagcagccatggccttctgcttcctggagaccctgtggtgggaattcacagcttcctatgacactacctgcattggcctagcctccaggccatacgcttttcttgagtttggtttgtaaccctctttcatatttatttttctcttccatggtgttatatgtgtagaatttacagtttaggtttggctttgaccatcaaggaaaaccactggagatgcaaaaacatgtcattgaagaacagacttgtaccatgagatttcatatcaattgaagtgtcccggaaagcgtcaaggtttaacactctggcttttcatctccacagagcctgggggcagggtggaggaagggtgaaacgtgtaggttataacccacagctctctgaagctggggtcagcaaatgatggcccataggccagccgcctgttttataaataaagcagaacgtggctatgcttattcttttacatgttgtctgtggctgcttttgccccacgacagcagagttgagttgtgacagagaccatgtagccaccaacctaaaatatttactaactggcattgtaagaaacttttgttgacccctgccccagagcattactgctcaaagggtgtttaccatcaggaggtaagcacagaaagtgagaactggtgtttagaaattcttacagtaatttgacattcctgtgattattttttantgctttttttagagcagaatatcagtctgcggtggtttggaagtaagaaaaaaacagttccttgacccagaagtttgctctggaaaaatgatacttcttttctaggctctgccagaaaggccttgttgaggcttagagactttggaacacagcataataatcagtgtgtgccctattttggtcaggtgtgggtcattttgagctcttgggagaagaggaatggagatggcagttgggggacagtctgtgctctccgtgtaaacagctgctgactctgtgatgttcttaaacaaaggtttggcagcatttgttataaatggtcagggggcagaaccagcacctggaagtgttgccacttaggctttctggctactcctgccatagccctcacattccttcatgtgttctactggctagcccatcaggaatggggctagcaccctcttttggtgtcaccctggtaggcaggctccagcctggtaaagttctgcccctgagtctccctgtgaggtcttagtcaagcttgtgctctgggccacacttctttctctgaagagggctgctagtctaaaacagaccacagctgcagcatccctgggctgtgagttgatttggagctcggtagacctgtgttcttctctccccttatctctgcatgtgccttccttctaaagccatgtgcttgatctgatgggagccccttttccagcatcatgtttgctcattgttgagtgggagtagaatgagtcaaagtacactgagagtagaattatacagattttgctttgccagtttgtatgaaacttcaagaactgttcagatgtgataatggatttatactaacataaatttaagaattaaaatgaatacttttcaaatatataatcctagtttccacaacgtattcatttgtatttttttttcaaacaagccctttttttttgagttaatcaggtcaggaataactgtctccatttttcaagcttagaaatattctgtaaattgcctagggttgtaccgtactatcagaagtggtaaggggttaagacgcatgcccctttcccccgactctctcatcactgaggttctgtgatgcattattgcctttttagtcaatcacattttaattatcctgctttgaagtgattgatcagacagtgttcatattagcaatcatttggcctttgtgtttaacttgacgcttttcagaatctggctgatttattagctcttagaaatgtgaacttcagctgggtgcaatggttcacgcctattatcccagcactctgggaggctgaggcaggagaatcccttgagctcaggagtttgagaccagcctgggcaatacagtgagaccttgtctctacagaaaaacaatttaaaaatgaaaaaaattagccaggtgtggtggcacacatctgtggtctcagctacttgggaggcttaggtgggagaatcacttgagcctgggaggtcaaggctgcagtgagttgtgatcgcaccactgcactgcactccagagtgggcgacagtgagaccctatcttcaaaaaaaagaaatgtgaacttcattttgtacgtattgtcttataatatccattctgatgaaaatgcttaacttgtgttgctctctttttgcagacagcatcattcagaaagtgaagtggcattttaactatgtaagttcctctcagatggagtgcagcttggaaaaaattcaggaggagctcaagttgcagcctccagcggttctcactctggaggacacagatgtggcaaatggggtgatgaatggtcacacaccgatgcacttggagcctggtaagtggcttgttgttccctgatgttgatgaagtgatattgtgtatttcacatggacgttgatttttttttcactagaaagctatttttctggggagagggagtagtataaaatatgctgagaaaaatatgggcccatcctgtttcttggtggctgttataaaaactttgactacaggccaggcgtggaggctcatgcctgtaatctcagcactttgggaggccaagtcaggcggatcacttgagtccaggagtttgaaaccagcctgggcaacatggcaaaaccccatctctatcaaaaatacaaaaaattagccagaggtggtggctcgtgcctgtagtctcagctactgcagagactgaagtaggggaatcacctgagcccgggaagtcgaggctgcagcgagccatgattgtgagccactgcactctagcctgggtgacagaatgagaccctgtctcaaaaaagaaaaaaattgactattatgacagtggattggtttgaggggaaactattgtgatgaaattcaggagccgaagagtgacttggcaggttacttttgtttttcttttccttcttcttcttctttttttttttttcaaatagagacaaggtttcaccatgttacagcccaggctggtctcgaactcctgggctcaagccatcatcctcctgcctcggcctttcagagtgctgggattacaggtgtgagctaccacgcttagctggcaggttattttcttaattagggtgaagtctacaagtttattatttttaaattttatgtttttatttatttatttatttaagtccaagttgttctgacagaactacaagtttaaatgttataaagaagattcatctctctttcttctataagttacttattgaactgtatagattggtattatatatattatatatataatatatatattatatataaaatatatataatatatataaaacaattattatttatatatatatatatatagagagagagagagagagagagagaatccttatcatcttatttactgaaatgttgtagatctgaaacccccactcttcttgttggagggaggacagtggggatgagagcgttggacagggggctggagccagggcttctaacgttctcactgtctggctgtctctgagacctgggatctccctctatccctgtggatttcagagacctcatgtgaaggaagaggtcttaatgaacgtgatcacagtgtgctgatattccatgcctttgtcattaatgttattagccactcaatgcttatcacataacaaagtatgattttttgcattcctgtttatagttacatacaattaaactaatatttaattcaattggatatttatattcgaagaattctataatggcataagagctgaatcctttgctaaaagaagtgtctacactataatagtcttaattactttgtttttaactgttttatgctaaactcatttcttgaattttaaaagtgatgtattatattcatggttttgacttaactttgtgttttagtttaatgtgtttcaaccaatacttggattggctctcattccagtcaataagtgtttctagtttatgttgagaataaacttaatttttgtaaaaggaagactgggtaattgagctccaagattttcccttaccatatatgaatgcaggcatatctttgtaatgtatgttttgttttttaaacacttagacaagaggagcaaatccagaaagtgtcaccttgcccgtctttctaggacattttactgtgatttgatttaccctattgtcctgaggctagaatctttacaggtagcatattctgttctaacagtaacttttaattgctcagtggaaactctaacacactaacaataggcataagttggattgtggcgaggtatttgtgtgtgtgtgaaatataagtgtaagaaaggagtatagcgagagaatgggagggacaccatttaattgtgtgaaccaaaatcaatttcagtggttatctttacagagaaaatgagcatttgttctaattatagttctagaaacagcttgtaacctgaataatcaatgtttccctctttccaattattttagaattttaaaaattgcatttgctgtgaattgctctagaagtgcacgtgacatcgcatattgttattgtcagagaaagaggacaagttgaatgttgaggcatataatagaaatgctttaaacatttgacaaccaattacaaataaagccttggtcctctctggtagtataagaaactgttttatttacttacttatttaatttttttttgagacaggttcttgctctgtcgcccaggctgaagtaccatggtgcaatcttggcttactgcaacctccacctccagggctcaagctatcctcccaccttagcttcctgagtagcggggactacaggcacataccaccacacctggctaatttttgtattttttttttaatagagatggggtttcaccatgttgcccaggctggtcttgaactcctgagttcaagtgatcctctcaccttagcctcccaaagtgctgggattacaggcatgagctactgtgcctgaactttttttttttttttttttgagacaaggtcgctatgttgcctaggcttgagtgcaggggcgcaatcatggctcactgcagcctcaacctcccaggctcaggtgatcctcccacctcagcctcccaggtagctgggactacaggtatgcgtcaccatgcctggataagtttttgtattttttttttttgtagagacagggtctcactatgttgcccaggctggttttgaactcctgggctgacgtgatctgctgcctgcctcagcctcccagagtgctggcattacaggtgtgtgccaaaaattgttttaggatttttcagcctgatccctattgacatttttgcatcagataattctttattttggaggctgtcctgtgcattcattgtaggatgtttagaagcattcctggcctctatccactagatgccagtagcagcctgtctctagttgtgacaaccagaaatgactccagacatggccaaatatccactggggggcagattgcccctggttgagaaccactgctttagatagaaaggaaattaagcacttgaaaaacctgtgcttgcctggaaaagagcctttttctggaagaaactttactcaaatacccacatccattctgtccatcatttcttggcttttttccctctaacttctgctgcttttacaattaatatgtttgtaattctatgtttaacatagtgaacctatcattagtgtaggtctagttaatgtcttcgtttatttttctttcatgtagaaattacttacactagacacttgttttttttccattgtgaagctcctaatttccgaatggaaccagtgacagccctgggtatcctctccctcattctcaacatcatgtgtgctgccctgaatctcattcgaggagttcaccttgcagaacattctttacaggtaaccttttttttttttttaaaacagtttaaattgaaggacatatgatagaagaaagtgatagggatacattttatctataaaactgaggttttataatttttcaaaactaatatgaattttattataaattttattctttgtagtaagtgaatgaatatgaaggttgctcttttatgtctattgtcctaagaagcaggaggggcctgccaagatattggtaagaaatggagaatttgctacaaggacattagaccaccctgtggctcttgggaccccaggagtcactccagggactggattatttacccaggacaaaaggttcattctctgattttaaggttcaggttctttttctcctgagaaaaggattgttcccataatctgatttgtataatgcagatgccaccttccttgtgtctttgtcgaagaattatatgtcactaggaagttccttcactggtctgctcatttcaaaggaacttactatttcagtgctttttaaaaacagttttaaaattttgaagtattttgagaagtatttcaagaaggtatcggccgggtgtggtgactcactcctgtaattccagcacttctgggaggttgaggtgggtggatcacatgaggtcaggagtttgagaccagcctgatcaacatggtgaaaacccatctctactaaaaatacaaaattagctgggcgtggtggcgcatgcctgtaatcccagctactcaggaggctgaggtgggagagtcgcttgaaactgggaggcaggggttgcagtgagccaaaattgcgccactgcactctagcctgggcgacaaaagcaaaactccgtctcaaaaaaagaaaacaaaaacaaaaaagaggaggtataaaaccattattagcatcaacaaatagatattacttttaaagatagtgccaccatactcacacccatgcatatagtgggtaaagtctgaagcatgactgttgttgaacctcaggagactgatgtagactgacctgtttggagaatggcagcaggcctgtgttatgagtggtaactgcctgttaccacatcctgtctttgatcaatgtgtgttgtggtttctactcttattgtttatgattgctcttagccagatacttaccaactgtctgtttgtttgtatacattagaattagtacctggccagcaagatggttaagacatagtccctgccttgggggctctcatggcccaaaacagtgtatggtggcaatcctaaagaggcggcagtgcctggagatgggaggaattagagaaagctaggtcttaacagatgcttaggtttctgagaggtggagggattggcggcccattccaggttgcagacttagcacagtcacatggggacaggaggcacatgctgtgaccaagctgttgaaaacgattgtatgctaaccctgatctggtgcataaacaggaacttgtgtctcacccagccagggattttgtactgtcaaccataccagacagaaggcagagtaaagtgctttatgtcacagtgtttcctttcatctaaatatccctttccttgtgttccttgtatttgttttaggttgcccatgaggaaattggaaacattctggcttttcttgttcctttcgtagcctgcattttccaggtgggtgaaacgatattttggtcagtggattaaatccatgaccttactttgttcttctgttcatctatcagcaagtttctagatgtgatttttgttccaccaaggtcatggttcacatcatggacaataccaagcccttagtggaggaccttaggcccatcctggccagtcctctcattttacagaggaagaactttgtgctcataaagggaaagccccttgttcaaggccaaggggctattgacagcagcagaacagaaaccagcagtttggatttgacttcccagaagggagggatgagattacatagggattggattaggcctgactagtgagtggcaagatattgccttgtgcttattattaggacagtccaagcacagaaatgtccttctataaaagtagcatctgtgtacatgtagtttttaaaatataggtctaggcaggcattgtggctcacacctgtaatcccagtacttttcaaggccaaggtgggaggatcactttaggcctggagtttgagaccaaccagggcaacatagcaagaccccatctctgaactttttttttcttttttttttttgagacggagtcttgcactgttgcccaggctggagtgcagtggcacaatcttggctcactgcaagctctgcctcccgggttcacgccattctcctgcctcagcctcctaagtagctgggactgtaggtgcccaccaccacacctggctaattttttttgtacttttagtagagacggggtttcaccatgttagccaggatggtctcgatctcctgaccttgtgatccacccgcctcggccgcccaaagtgctgggattacaggcatgagccaccacgcccgacctctgcaaaaaattttttaaaaaatatatacatatataagactaggtcaaagaactgctgatttttttgttgttgttgttgttgttgttttaaatagtaataccttctgactcagacctgttctttaggaactgaagcaaacattagaacattaactagagggttttgattagttattttcatataagctgtgtactaaggggtggcataaagaggcgattttgagtccctcataggcagagttaattctagtgaaagcgtggctctaattctccttccttgtcctccgtatggactaggattttagcactgtctctgaatacatattttttctccctttttttaaaattaaaatttctgttcttaggacgctttccttctcttccacatacatcctagaatggtttattcttaagaattacccaggccaggtgtggtgactcatgcctgtaatcctagcactttgggaggccaagatgtgtggatcacttgaggccaggagttcaagaccagcctagggaaccccatctctattataataaaaatacaaaaatcagctgattatggtggtgcatacctgtagtcccagctacttgggaggcttaggcatgagaattgcttgaaccctggaggtggaggttgcggtgagctgagatcacgccactgtgttccagcctgggcaacagagaaagacattgcctaaaaaaaatgaaaaagcattacctgattatgcaaaaagaaattttcaacccatgaaaatgcattcattttttagaaaacaagtctccaagaccttggacatagccagtggcagtttcctagagctatgttttaggactgcagggattgtacagttccacctcattccttcaactgtgttcctggttggatagctcactccctccctctgtagattgaacctttgtcagattgatccatgttcagtgatgtcctttttttaaaaaaaaaaaacaaagcattgaaccaaaatgccgtttccaccttttgcagaacaagaatggccccttttatgtgtgatagtcatacacaaaataccagtcactctccctgctgtgagacctttccctgactcagagatgctttggaagacatgataaggagggtgcccaagggaagagtggtgctcaatgtagtcgtggctcaggagaaaccaaaatagtaaaagcatggctttctctcaccagcttgcttgcctgtcctggctccctgaagaaaaacttcactggggggccagtcagtcacgttagggtcccctgtctgcagcctggctgtctgcagcttatgtgcagctcttctttctctactgccaacagcctggtcatttctgtctatttctttaacttctttcagatgtgccatgcactgattcttcctgtgacatctatttcactttcctttaatcttccaaatcctcactttcgtccaataattagcagcctaaccagtgggtccacgctttactgtaatgaattcagtttaatcagctaatgtgagagaaatgacactcttcatggaagctgtgggaggtgaattttgcatatgatctagtggccattttatctctgattggaattcctcttctggtctcatttcagtgttatttgtacctgttctacagtccagccaggactatgaaggtggtgcttatgctgctctttatttgcctgggcaacatgtacctgcacgggctgaggaacctctggcaaatccttttccacataggagtggcttttctgtcttcatatcagatactaacaaggcagcttcaggagaagcagtctgactgtggagtatgaggatgacactgtgatgaatggattctttgattttcttttgaggatcaatctatgtttctctttctgcttctctactttacactccagtttccatccttttcagccaactggactgaaaaaccaggaattggggatgttaaacagttgcagtggaagtcatgaggttgcttgatacccagccttggttctgtgccaagcattactgcaggatctccagccagttcagcacgtttacctaggacagctggatctgggggctcatccagaaagagctttattggaagagagaaaggaaatattttggtcttttaagttgaatgatacagtaaaccacttgattcaataacactggttttagtcattgagagttgtctccaaggaaccactttaaaatccaaatcagctttcagtctaaacataacttgattagttttttttttcagagggtcagtacaggatgaattaaaaacctaaaaatatggttcataaatgtaagctagataaattttgtttacattttttcaatatcttaggttcgatatacctttggaatatttaattatattttggatataaattggacttcatttagggtgagggcaaacttaagctgagaaaatggttaagaaatctgagtttatttaatttatatgtaaccttttatagtggtgggactgtttgggtacagagatgttttatatttatttgcagggtatatccgaatattttaaaaattaattgaataaccagtacttctagatgataagtttgtcagcatgagcagaaatgagaatttcaggattacttacaattgaccacaacctggagtaggtgaatgaacatggattcagtggcactttacagatccgcttgggaggggctgctgtcatcagccttttcagtagagctgagtgcctgttgttttaatgatgatgactactgtaccctgtgtacctgttcccagagcgcctccaaaattaattactcctctgcacctttcccagtcatcttaattagcttgagggcctcattttttatgaacaagagttaagtatctgttaactttttaaagcttgatagagatataattaacacatactctggaaagttactctctttcactgtcaaaaaattgattgatcacagttttccaaaatatggttctggataagatcccttaggtttcccgaaatttcagcctggcttgttttgtaccacgcaggaggtcattttgggagtttgctctttggattgttcttggtagaagtctggaatctgaatagttcaaccacagttgcatggaacactttgagtgttcaactgcattatgtggtcttgataaatttttaaaaatcctattttgatagtttttaaaagtggaaaaccattacaagagttgagtggatagggaatgtaagaatgtagttttagaaaaattcaattatatttggttatcactggtattgtattgttattgagctaccttgttatcattttaagaaaaataagtttatatactgggaactatgttgggaaaatgttgccatagtaactttattttttataatagaattttctatttttgaccaaacataaaatatttggatatgggccaggcatgatggctcatgcctgtattcccagcactttggaaggccaaagcaggagactcggttgaggccagtagtttgagaccagcctggacaacatagtaagattcatctctacaaaaaaaaaaattagccggatgtgatggcacatgcctgtaatcccagcactttgggagtctgaggcaggaggatcccttgagtccaggagtttgaggcttccatgagctataatcacaccactgcaccccagcctgcatgacagagtgaaaccctgtctctaaaaagtctgaatatgaaaattatattggcagcatactcagacataaactccaaagttgtctctacactgatttcacatctgcataattttctgcatacccagcaggtgaattttcagtttttctgggagacaattttgaagagatggtgaaatagaatgggaagttaaggaggggaggtaaaatgttttaaatgagaagaacaaaaaagctttaaaagtcaataacactttgggaagctgaggtgggcagatcacgaggtcaagagatcgagaccatcctggctaacatggtgaaaccccatctctactaaaaatacaaaaattagctgggcacggtggcttgtgcctgtagccccagctactcaggaggctgaggcaggagaatctcttgaacccgggaggtggaggttgcagtgagccgagatcgagccactgcactccagcctggtgacaaagcaagactccgtctcaaaaaaaaaaaaaaaaaaagtcggtaagaacggcttaaaaatggactgttttcttttcctatgtggcattgggttgccatgtagacctgtaccccaggtgctttgggcatctgagcctatgatccatattcagcaggcagtaaagaaacggtccttgaagatgagtccttcctggtaatgcttcctgaccaccgaggcactaccagagatgttatccacaccaggtcgaatgtgtggatatcagttaacatctacatggggtgagattgacttttgcaaacaaaagggaaaagatgcactagaaaaacagtacaagtaatgaccacaaaaacattgtttgactgaaatccagctagctaaaagaatcctcagctcactgaaggaagagactgaaaataggaaagaagttctggtgatttcatccgagggaaatccccaggcttaggtttgacttggttcagggttggaggtttatagcctcttgtgtgatccttgataccagcaaactggttccaaatcccaggagttatcctcactccaccatggactcactgttgttgtagcacttttgttttcccagtagttaaatgctacctgtgcagctgacatcactggactagatctgggaatagatgaaataatgttgaaaacaaaactttagaggtgccttctggtatcagatgctgcaaggccttgagcatcagagtgtgttaagtcccatctactgtatcaaggccagagtgtggctccatgctcttaggaagggtttcccaaccacggggccagagcccaaaaggtttccccttccctaatatgctaatgaacgaaacatgtaaatctgttttcccctgttaggctagtcttactgtgatgagaagtgtacctggctttccttttcctgggtggagacagctggggcatattcgggtggcattccctctcagtaccagaggccccactgcctgcagctggaggcatgtgaccataagctcctgcttttgctttttgggcttgcatccctcttttctgtgaactctggagaatgctggaattaaaacatttaagcattttgattaaatgagcttgagctcctctgttcttttctaggtgctcttgttctccaactctcctgcctctttctacctctgccctatacattccagctctggagacagagtctgaaactggagtctctggagggatgagaaaaccatctttaattgtaacaaatggggtgggtagacgagcttcagagtgggagcagattgcattgaggttcaactctcccacccatgcctgggagtcaagtcttggagaggagtaacacttggtggtcagcacagctcagagtcagagacaatagccagcaggccagcaaggctggctgtgtgaggcacaggaagcagggcataggtagggagcagagctgggggttctctctctgctggaagatagcagctgccccttggcatatgggggttgcacactgcaccttgtagccagggctgctatttgctgttctgtgaaggagttggccactcattgtgacatgcaggacagtggccttctgagaacctgctgcttgcttgcatagtgcagcacaagtgaggacaggcaggggtgggagcatttatggtgatcagatgtgcctggcaagcccctgttcagacattgctcacattccaaatgttttcgtgtagaatattgcacaggtctggggacgctctacctgtgccctgtgagtgttaataatggtggagaaagagtgtagctgtgcccttgagagagaaggtgagggaaagagtgcaccagtcagctgaccgtcagctggctaggctcttcactgagtcctatgtcgcagtgcacaaatcactgcccatcaggcctcagtttcctcatctggtaaatggtgataacatcaatctgcccccccgccagggtgctgttatgagggtcaaaagtggtagtggagggtaatactgggtgagtccattgtgtgtgggaggagaaaggcttttacattcacctggtacatgaaggtttttctgcttcaggcagcacagcacagccatttcttctggcctttacaaaaaggcatttttgttatactacagtgtaaacctcatttttttcactccaaaaggtagcagcccctcttcttcccaccctggacctgcctttcactccctgggcacagagcgcatggtaccattgatgtttggtttattccaggatccaaggagctggttctgctggttggaccaaacctcgtgagccagccacccctgacccaaatgaggagagctctgattctcccatccgggagcagtgatgtcaaacttctgctgctggggaaatctcatcagcagggagcctgtggaaaagggcatgtcagtgaaatctgggaatggctggattcggaaacatctgcccatgtgtattgatggcagagctgttgcccacaagcgccttttatttagggtaaaattaacaaatccattctattcctctgacccatgcttagtacatatgacctttaacccttacatttatatgattctggggttgcttcagaagtgttatttcatgaatcattcatatgatttgatcccccaggattctattttgtttaatgggcttttctactaaaagcataaaatactgaggctgatttagtcagggcaaaaccatttactttacatattcgttttcaatacttgctgttcatgttacacaagcttcttacggttttcttgtaacaataaatattttgagtaaataatgggtacattttaacaaactcagtagtacaacctaaacttgtataaaagtgtgtaaaaatgtatagccatttatatcctatgtataaattaaatgaggtggcttcagaaatggcagaataaatctaaagtgtttattaaca

SEQ ID NO: 7761 - DNA, 23885 bp, Homo sapiens
gcccacctgccgtttgctgtcattggcagcacagaagaactgaagataggcaacaagatgatgagggcgcggcagtatccttggggcactgtgcagggtgagtgagtctccgggaagggctacacacaggaagccccttttgtctgtctctttgtttgtccccagccactatatgacaagtttctaaattgtcccaagtctctgctcattcggcatgggtcccaaatagccataggggtcactagcaagctaactctggctccatactgggatgctctgatgggagcaagctccctctaatttctaatgggaaaggtattcctaaaacacaaggacttgcaaggtaggaaggagtgtgcgaaaaagcatgtgttcttgcccaagtgcacctgaagaatgttcacagtagtgttgtttgtaatgacaaataattacaaacaattcagatattctttaaaatagactggataggccgggcacagtggctcacgcctgtaatcccagcactttgggaggccgaggcgggcggatcacgaggtcaggagattgagaccatcctggccaacatggtgaaaccccatctctactaaaaatacaaaaaaaaaaaaaaaaaaaaaaaagactggatagtgggagggtgggagggggataagggatttaaaaaaactacgtgttggggctgggcgcggtggctcactcctgtaattctagcactctgggaggccgaagaaggcggatcacctgaggtcaggagctcgagaccagcctggccaacatggtgaaaccccgtttctactaaaaatacaaaaaaaaaaaaattagtcaggtatggtggcatgtgcctgtagtcccagctactcaggaggctgaggcaggagaatcgcttgaacccgggaggtagagattgcagtgagctgagattttgccactgcattccagcctgggcgacagagtgagattcaaaaaaaaagaaagaaagaaacataccattggattccctttgtatgaattccaaaaggaggcaaaactaaacaagatatatattcttaggaatgcatacataagaggtaaaactataaagaaaaacaaaggaatgataatccccaaagtcaggagaaggattaagtctctgccaggggagttgagggatagagggggatgagattgggaaagggcactcaggggcttccaaggtactggtaatgtttaacctgagttgtggagacattggtgttaatttttcaaaaattctttaaattgtacatacacatttcatgctctttgtatgtatgattatttcacaattgaaaagcaattagacatattgtattacactcaggaaagttccttctgtgatctgcctgacatatgttaacttaccctcagggctagtcagttcagtgcacaagacaaggccaaggatggcgctgtgggtagaagaggtctctggtcctcagagtctacagctagaaactgggccgtggctgataggggcatcgtgtgaaagagtggctggttctctgtaaactcatccctaccactggggaaacacctgaaagtggatggcgagttgtccacatcacatacgaaggctggcatgttttaggacaccccacacacccactggcaatagctggattttccataggtaggacaagactggttatcagagctgtgctaagttctggtcttctctgctgttcggagctggggatgctccactaggaacgtttgcaaatggtttctggacccacagtgtcccaccctgggaatggacttgtggtctgagaaacaggaacctgaagtgagacgaggagaagccagtagacatggttccaatgacttatttcatctgatgtggactactctgaacctaaacagaaaagggggttttgaaagtttttcttgtaagtctaagttgactgttccgcttgaatgaggaagaagttgtatattgctcaggcagcctgcagggccctcggaggcactccttctgactcaccattagagatcactgtccagagatggaggaggagatggcatatagcatagtcctgagaagttgtcttactgatgtcatctttaatattagcctgtgttctatgacagcagggggctttattcctaattcagtgggtcttaagcagagggattatgtgagctgattcgggctttggaaagattaatgaccacaaggtagtctgcttcaactatggctgacccacttatcccagacccttctctgccctcactaccctcttccagaccctgcaagacagaatctggggtgattgcctgttcacttcagacaccatttttcctacttgttcagggcaaataccaccatccgacacagtgaagccatacctgtagccaccttgacaaagtgctcctcgtgacctggtccagccagaaatcgattttgctatgacttggtccacatctgtcattcttgaccactgccccaaattgcagacctttgcttgcactcttttgaggaggggacttgttcacacaggccagaaagtggggtccccttgctcctagtcaccactgctactgtcaggccattatctaccttctaaagaaaccacctccttggaagcttctaccatccaggtgggccatgcctgcggtccacacccctccttgtcactgtcatctatcaatatcctagttctttccccttattctttggagactttgtcacctcccctacattgcctgggtttgaaccctaattctgcaacttactagctacataaccttgcctagcctcattgacactttgcaaacaccattcccttctctggctgataaattgctattcttccttccagagtcatcttagagattttctcttcggtgaagtcttcactttcccaggagttcttaggttcccctcttctgagctttattgcaacttggctatccctctatttttgtagttgtgcactgaattgtatttgtctatttgtatctattcttcctctaaactataagctcctgagagcaagattccatcacttcgtttctgaattcccagtgcctcacacaatactgggaacagagattccacaaatattgattggatggatggatggatggatggatggatggatggatggatggatagatagatggatggatgagtggatggatggatggatagatggatggatggatggatggatgagtggatggatggatggatggatggatggatggatagatggatggatggatgagtggatggatggatggatggatggacagatgcatatatgctgttgtcctacaagtggtgcagaccaaacattcttttgagggttctgactgctgaatttagattgtggtgctactgactgtcttaataagtatttttatgatatcacagtttttcattactggcatttttgtaacctttcatttacattttcagtagaaaagagaggaggtaaatttgcaggatctaaatacacagattgcaaggcaacgtcactgttagacattttgcctctcgtttcatccatttctgcttctgctggccttcctttcaacatactttcaataccccaaatcctgctatgcagttgaaaacgaggcccactgcgactttgtgaagctgcgggagatgctgattcgggtcaacatggaggatctgcgggagcagacccacacccggcactatgagctgtatcgccgctgtaagctggaggagatgggcttcaaggacaccgaccctgacagcaaacccttcaggtaccgctcctgccagcccagcccagcccagcccagctcagctcagcccactcaggtggtgtggaagccttcccctggagaattcacaggggaggcgagacacgggtgctaagacctcaaggagcaggggcgactcacttgccagttctgcttgcctgttcaccctttgcctctgcacacctgccaggagagctgtggggagcaggcttgggaagtaccgccgccttgcttttaagggcaagggaagggaggatgcccagaggaccagcaaggctgatcaccacacacacatgcacgcatccatgacagctccaagcagctgcgctggggggaatccccaagctggggccctgttccacgaggtggcagttggtaactgtcctctgcccctctttcttcatcaggctcctggcgctcagacaggtttctagtctgttctttacccatttccccattctcaaacccagataggaccaggtagcatgcccttgccatgcatcgatgaactgcaggctctccaattgctgtccttagtgtctgcattcaagtgcaagttctgttttgaccgcaggatgttgatcatcactgccatatttcttaaatcagaatgcttttagagaaggggaatgtttttgaaagcaggttattatgcagagaggagtaatgcgccaagtagaagtgtctgatctatatgcgtgatgtgtgaaataagccccacagttgaaattaccacgtggtgccctttatggtggtcaggcattaataagcaagtgagggagatgtctaccagttaaaaaggctttcaaagagcctctgagatcttactctacctgtgcacagcctaaagctggcctggagtcagagcctaaccagtcccttggggatatttgcttcaggagggacaggctcatgccctatatactgacaggtggggctgggggaagccatgcttgtctttttctggtgggagctccctggctgtcttccccacctgcagctttcatctgcatttgtagaggagtaggtgtgcctccacctggtcattttgtctccttccctcctccttcactccatcctgaatacctctgtttcctgtgtcttcgccttcttcactccttctctgccagctccttcccatgctgcatgtaagcattcttgtgctgaagaaactctcccttaaccctgctctttcttaccagcctctgtcctgtcaagaagtccttgacaggatgaggagaaagagttgttctatgtttactggttcctcttccccatctctcattcattcctcaatccactgcagtctggcttctgtccccagcataaccactcaaatgcctctctccaaggccaggaatcgcagacttgtggccaagttcaatgtggcctttggtttccatcttatttgatatcaacgcagcactttatgccattccccactgcctccttgaaatgctctctgcctttggcttttctagcactggcctggctgattctattcctatctctcctactatttcttctcagcctcctttgcaggctcgttttcttcaccttactcctttaaatgttgatataccccccgggattctttcctagagcctctgctcctttcactttctgttctctttgcagctggttctttctactctcacagccctaattaccacctagaagtagatggttcccaagctagtcttacttctgaggtctaaacccattaatccaactgcatcctggatgtccactcagacatcccatagaggacctccccgaaaatcaagctctgtacaaattcatcttctgccctcttaagcatgtgtctccaacattccctgttgccattcatgataccaccatccacctggttgcccaaggataatcagaattacctttggctcctcccaagtcctgggagttctgcttcccttactgctccctccattccctcccagcccttaacattaagatcctatcacttcttcttttcttttctttctttttttttttttttttttgagacagagtcttgctctatcgcccaggctggagtacaatggcacaatctcggctcactgcaatcttggcttcccgggttcaagcgattctcctgcctcagcctccccagtagctgggattacaggcgcccaccacctcacccagctaatttttgtatttttattagagatggggtttcaccatattggccaggctggtcttgaactcctgacctcaagtgatctacccaccttggcctcccaaagtgctgagattacaggcatgagccaccacacctggccaagatcctgtcacttcttacttggattgatggacagtctatccttcccacagcacagccggaatggtccttctcattttcaaattggatctagtactacttcctgctttaaaaccatgcagtgtgtacatatccaatttttaaatatggcattcaaagcctgttctcttcctccaggctcaggaactttgtctgcctctactccaccactgccatggtgctctctggccatgttgaaccatacctggctccccaagaatgtcattctctcttcacacctgctttcttacatgctgccctctttggatcacagttccacctcttcttcaccaggctattgcttttttttttttttttttgagatggagtctcactctgtcacacaggctggagtgcagtggcgcaatctcggctcacttcaaccttcgcctagcaggttcaagtgattctcctgcctcagcctcccgagtagctgggattactggcgcccactacgacgcctggctaattttttgtattttttagtagagatggggtttcaccatgttggccaggctggtctcgaactcctgacctcaggtgatccacccgtcttggcctcccagagtgctggaattacaggcgtgagccactgcacccagcctatctcctatttctttaaaaataagcttaggccaggggcatctcccactagaccatgagttccttgatggcaggtatgatggctgttggctctagaggctgagtgactagcatcatgtcaattagtactgagtctagcacatatggagtctcctcaagcatttgttgaaatagttcattaatgtggtcagtttcagagccagggcctggcagcattgtgcagtgggaaaacccagatgaagagacaggagactcagcttctggtcaaagttctccctctaactagccgtggggccttgagtaagacacctcacctctctgggcctcagttttctcatccgtagaacaagagtatagaaccagatattctaagtctctccagttcactagggttgccccatccccctccagaatccctgtgggcatgctgtcatgggccaagccaggtgcccacagctttgtggttctatttttgtacctggctcacaactggggaagggaggacagaggaacccagtgaggatctttggggccagttttatcaaataggaatcattccaaaggaagaagaattaacctgaccatgttcgcagtttacaggagacatatgaggccaaaaggaacgagttcctaggggaactccagaaaaaagaagaggagatgagacagatgttcgtccagcgagtcaaagagaaagaagcggagctcaaagaggcagagaaagaggtaaatgtgagcctggtgattattaaaatgtcaagaaacaacagctgctggtgagactgtggaaaaataggaacgcttttacactgttggtgtgaatgtaaattacttcaaccactgtggaagacagtgtggtgattcctcaaagacctagaatcagaaatgccattcgacccagcaatcctatagatcactttattataaagatacacacacacatatgttcactgcaacactattcacaataggaaagacatagaatcaactcaaatgcccatcaatgatagattggataaagaaaatgtggtacatatacaccatggaatactatgcagccataaaaaggaatcagaggatgttctttagaaggacatgagtggagctgggagccattatcttcagcaaactaacacaggaacagaaatccaaacattgggccggacactgtggctcacgcctgtaatcccaacactttgggaggccgaggtagttggatcacctgaagtcaggagttcgagaccagcctggccaacatggtgaaaccctgtctctactaaaaatacaacaattagtggagtgtggtggcacatgcctatagtcccagctacttgggaggctgaggcaggagaatcgcttgaatctgggaagtggaggttacagtgagctgagatcatgccactgcactccagccttggtgacagagcaagactccatctcaaaaacaaaaaaaaagaaaggaaacacttaattacttcacgattctcttccacatttaacctgtcacactctcaagggttctcaccaaagcccatgacaagggtattgattttttttttcagtttcacttaaaaaaaaaaaatgtctgttggctgggcgcggtggctcacgcctgtaatcccagcactttgagaggccaaggcgggcggatcacaaggtcaagagttcgagaccatcctgcctaacacggtgaaaccccgtctctactaaaaatacaaaaaaattagccgggcgtggtggcgggcgcctgtagtcccagctactcgggaggctgaggcaggagaatggcgtgaacccggaaggcggagcttgcagtgagccgagatcgcgccactgtactccagcctgggcgacagagcgagactctgcctcaaaaaaaaaaaatgtcagacaggtgccttggctcaggtctgtaatcccagcactttgggaggcttaaagcgaggggattgcttgagcccaggagtttaagaccagcctgggcaacatactgagaccctgtttctattaaaaatagaaaaaattggctgggcgcagttgctcacacctgtaatcccagcactttgggaggtcgaggtgggtggatcacgagttcaggagtttgaggccagcctggctaatatggtgaaaccctgtctctgctaaaaatacaaaaattagccaggtgtggtggtacgcacctgtagtcccagctacttgggagactgaggcagaagaattgcttgaacccaggaggcggaggttgcagtgagccgagattgtcccactggactccagcctgggcaacagagcgagactccatctcaaaaaaaaaaaataattacaaatacaaaaaattagccaggcatggttgcacgtgcctgtagtcccagctacccaggaggctgaggtaggaggaatgcttcagccgagagatcgaggccactgcattccagcctgcgtgacagagtgagactctgtctcaataaaaaaaacaaaaatgtcacccagcacttttaggaggagaagtgaggggatctcaaagacaaatgaataaaagtgcaacaaacaaaaaccaggttaaggcaattgataggcagccctagtgactagtaagagctgctttaggccaggcgtggtggctcatgcctgtaatcccaacactttgggaggccaaggtgggcggatgacaaggtcaggagatcgagaccatcctggctaactcagtgaaaccccgtctctactaaaaatacaaaaaattagccaggagtggtagcacgtgcctgtagtcccagctacttgggaggccgaggcaggagaatcacttgaacctgggaggcggaggttgcagtgagccgagattgtgccactgcactccagcttgggcgacagagcgagactctgtctcaaaaaaaaaaaaaaaagaaaagaaaaaagaaaagatctggtttatacagcaagtctgtcactcacccacctaagtgacagtgccaaatacccccaggacccggagaactaaccttcttcatcgtatgctgcaagtgctacagaatcctaaactctctcctgaatccatgaaagaaagtgaaattcggcttgctctgctcttactattcagggtagtttattgcattctagtttgtgactgtctgtgcctcttgttctctgatccacttaccacaatggcatgccagaatattctttttttttttttccgagacagagtctcactcttgcccaggctggagtgcagtggtgcgatctcggctcactgaaagctccgcctcccgggttcaagtgattctcctgtctcagcctcccaagtagctgggattataggcaagcgtcaccacgcccagctcatttttgtatttttagtagagacgaggtttcaccatgttggccatgctggtctagaactcctgaccttatgccacccaccttggcctcccaaagtgctgggattgagccgactactgggattacagcactcccaaagtgctggtattacaggcgtgagccactgtgcctggcccagaatattcttcttgttcttctttgggtttctggttctattcaggactaattaagcctccctttagttaaggctgaggtgtctgtactcattccatgtcataaagtcctttttatttccttccatgtccaaagccaagtatttccttgactggctttcccatactgaagttttctctgagatccatggtgatccttcctgattgcaggggttaagaaaagacaggggttccttacacataagaggtcccattatataatgttctaaatactgggttgaccatagtcaaattccttacttctcagaccttctgtttcctcataaaatggagataataacggaacctacctcataggaatgtggtaacaattaaataaattaatatacataaaggacttataaaagtcagtgcttagcctgtaattactcggtaatttctttttttattttttgagacggagtcttcctctgttgcccaggctggagtccagtggcacaatcttggctcactgcaacctccgcctcctgggttcaggtgattcttctgcctcagcctgctgagtagctgggactacaggcacatgccacaatgcctggctaatttttgtatttttagtagagacggggtttcaccatgttggccaggctggtgtcgaacacctgacctcaagtaatctgcccaccttggcctcccagagtgctaggattacaggcctgagcccggccagcactcagtaaatgttatattattataattgatgttattattgaccatgtgtggtaactatggggactctttttaacaaaatgtctgactaaacacaatgcagtattcctttaccatattcaggagcagagacttggagataaaatggcaggaagagagaacgatccagagcatggtgcctttggtgccatcatagcaatccctgacagaaatgccccctgaggttccagggtcctgcagggtcacagccctactggtccccacccacctgggcttggccaggctggggactgctcacaggggattctctccaatctccctgtgcttccctgccagctgcacgagaagtttgaccgtctgaagaaactgcaccaggacgagaagaagaaactggaggataagaagaaatccctggatgatgaagtgaatgctttcaagcaaagaaagacggcggctgagctgctccagtcccagggctcccaggctggaggctcacagactctgaagagagacaaagagaagaaaaagtaagtagcaggctgctctggggtggtgccttctctttcctcctgctcatcctcccagggcaggacgtggcacctgaaggggctgaggactggtgaccagaggtgagctgtgggctgtcagactggttgaggtacctataactggtcccagcatccctgtggcacctttggattccctgagcttggggagttgagagtagcagaggggtgtggtcccagaggcccagcccatctgtccagcttgctcaggaaagccctgcaaactcaaggtccataggaaaggaagggaaaagaggaaaagcaaaggagagtgagagagcagaagggaagaaaaaaattagaggtgcagcaatataagagaggaacaaggccgggcacggtggctcacacctataatcccagcactttgggaagccaaggcaggaggaacacttgaggtcaggagtccaagaccagcctggcctatatggcgaaaccccgtctctgcttaaaaaaaaaagaaaaaaaaaataggctgggcacggtggctcacacctgtaatcccagcactttgggaggccgaggcaggcagatcacaaggtcaggagatcgagaccatcctggttaacacagtgaaaccccatctctactaaaaatacaaaaaaattagctgggtgtggtggtgggtgcctgtagtcccagctactcgggaggctgaggcaggagaatggggtgaacctgggaggcggagcttgcagtgagcagagatcgtgccactgcactccagcctgggcgacagagcgagactccgtctcaaaaaaaaaaaaaaaaaaagagttcaagaccagcctgaacaacatggtgaaaccctgtctctactaaaaatacaaaaattagccaggcgcggtggcgcgcgcttataatcccagctactcaggaggctgaggcaggagaattgcttgaacccaggaggcagaggttgcagtgagttgagatcgcaccactgccctccagcttgggcgacagagcgagactccatctaaaaaaaaaaaaaaaatacagaaattagctgcctgtagtcccaactactcaggaggctgaggcaggagaatcacttgaacccgggaggtgtaggttacagtaagctgagatcacaccactgcactccagcctgggcaacggagtgagactccatctgaaaaaaaaaaaaatagaaaagaaagagaggaacaaaaagaactgcagctacgggccgggcgtggtgtaatcccagcactttgggaggccaaggcgggtggatcacttgagttcaggagttcgagaccagcctggcctacatgatgaaaccttgtctccactaacaatacaaaaaattagccaggcgtggtggcgtgcgcctgtaatcccagctacttgggaggctgagcaggagaattgcctgaactgaggaggcagaggttgcagtgagctaagatagcaccattgcactccagcctgggcgacagattgagactctgtctcaaaaaaaaaaaaaaaaaaaaaaaaaagaagtgcagatacaggatagtggaagaaagagagagcctttagcagaaactcggtgcaccctctccccacccttgccctatatctgaggttgctcacctctccatggccgtagtcccaccctcaccctgcctcagttattactctctgcagccaacagaatttaactgctgccagtgaaggctgcagctcagccctgatttcccacccctttgtgatccctccctgctggcttagttctgcctagcctggggtgctgagaacttatgggggagccctcagatgccagtgtatgctgcatgtgccccatcctcaatctgtggaatgactgtaagaccttctgatctcccctggtattagaacagtggctcctggataccatgtgggtcaataatcctcacccaaccccagtctctgcttgctgaagttacccattcctcatcccagaactggagaaaaatatttcaacgggatctagaaaaactcctgtggtgcccttgtgccctgcagttgtttgtgcagtgtggcttgaggagttcccaggtggactgtttagctgtgtctttactgaagggtactgaggatccaaaaggtgtccatggtcattgccttctgttttcagccatttgttcctggacttaactatgggatatttttgccagaaggaagaaacaccttcctttcctctggcttatcacttaggaataacatggtaacttttgcataacagtaaaatatgttatatttgaaggcattcagctttgcaatccaattactctttatgcaaatgtgtaatttaaacatcttggccgggtacggtggctcacgcctgtaatcccagcactttgggaaactgacgcaggcagatcacctgaggtcaggagtttgagaccagcctgggcaacatggcgaaaccccgtctctactaaaaatacaaaaattagctgggcatggtggcccacacctgtagtcccagctactcaggaggctaaggcaggagaatcacttgagcctgggaggtggaggttgcagaaccaagatcatgccactgcacttcagcctgggtgacagagtgagactttgtctaaaaaaaaaaaaagaacatcttcaccaattagtccagaaatttttcttactgaatcttaatactatatgtcaaattcactgatgaatgaaattttttggtattacctgatggataaagttcaactagccagaaaaaagtctctttggacacaccctgtactgtattaacttatctgtcatggtgtattagttgcaccagcaggaatgaattcctatttttaagatcagaaaaatctaaatttgtcatccagctgtaacctgctgccttcatagtcctgtggtatttgttaactcagtacctggggcagtttcatagcctgcttgtgggagttaggaattggtttgttcaggctacaatgaaactataaatattccctattcagatgttcagtaaaagttcttcttacatcaagctttccccttgttgcctcatactgactgacttctcccaccccaggcaggagaccccaacagggagatacccctctctactcttcaggaatatttggggttggtgacagtgcccctttccaattctgaaatgggtgaaaaccctgctggcatgtggcaccttatattagcaataagggcctaacagaatgacctgtcttcttctgtacttccagatgcagaagtggccctgaatcttggcttcttatgtaatttcatgagcaatttgttaacttctggaagagccaccgttagacctgtgctaccctcctcccatagtcacggtagtgagttttgagggcagaaatggtggtagtagtatttcttcttgagagatggtggttggatctaagagtcacatattcagaatttcctttagctgcccctaaagagattaagaaagtactggccagccgtggtggctcatgcttgtaatcccaatactttgggaggccaaggcgaaggattgcttgagtccaggagtttgagatcagcctgggcaacatagtgagacctttgtctctacaaaaaaaataaataaataaacattagctgggcctggtggcacttgcctataatcccagctactcaggagactgaggtgggagaactgcttgaacccgggaggttgaggctgcagtgagccatgattgcgccactgcactccagtctgggcaacagagagagaccctgactcaaaaaaaaaaaaaaaagagtatcagtgtttcaggggttcctaccagtccacccttcccacttccccttcctgctactcctaatcacctttgacctctaacccttcattgtttgtgtcaagtcataatatttgatttcccctcatgctcactccatcttcatcagctcttactgttttacagttaactctgctgtttgctgcatgctgcatgagacccagggtcctggtaagcttgattaactctaaatagaactggcagtggcttctagaacatatctcccccaatcccgcacccccaacacaagcatctaatcgtagaagaagctgcttcattggtctagctggttttctctcgtgacttataatatgcagaaatagtctggtgtggtttcaggtgtacatgtggaatgcctgcctgcctgcctgattaaagtgaggggtcgttttcagacttttgctgctagaacagctgggtaacacaggtggatcctgtgatcagtatttgaggtttcagtgtgggaagtttttttcttaaagagccataatcgggccggacgcagtggctcacagacctgtaatcccagcactttggtaggccgaggagggcagatcacctgaggtcagaagattgagaccatcctggctaacacggtgaagctccatctctactaaaaatacaaaaaattagccggacatggtggcacaggcctgtaatcccagctactctggaggctgacacaggagaatcgcttgaacctgggaggcggaggttgcagtgagccgagattgcaccattgtactctagcctgggcaacaagagcgaaactccatctcaaaaacaaaaggagctataaccattattttcaaaattaatgaaaccgtggtgatgagagaaactgggtttcacaagctccgtcctgcaatgtcacagtcagcatcaaccctctcccatccccctgcatcaggtttgagaatgtccagagtcaatggaaactcacttctctgtttcccgctggtggcagtttcatatctgaggggttcaagtcctcaaatttcctttgactgtacccctcaaaaccataataaggctgagagcagtggctcacgcctgtaatcttagcactttgggaggccgaggcgggcggatcacctgaggtcgggagttcgagaccagcctgaccaacatggagaaatcctgtctctactaaaaatacaaaattagccgggcgtggtggtgcatgcctgtaatcccagctactcgggaggctgaggcaggagaattgcttgaacctgggaggcggaggttgcagtgagccgagatcgcacctttgcactccagcctgggcaataagagcgaaactccgtctcaaaaaaacaaacaaacaaacaaacaaaaaaaaaaacaaaaaaaaaaaacccataataaaagcggaggaaaatgaagagatcttagaaattatagagaattccttacatttaatcctacaagtactggcttcatgaaaacctcttataaggagatcagcaggtaaggattcctgagtgctagatgttgtgttaatagaagtttataaagtttcacatagtttatagggagactgaaagcagggattaaggaccttctatctcctctactagactcaggtagtggatggaaaggaaatacaaacatttttaatttaacataattagggttttttttgtttgtttgtttctttttttgagacggagtctcactctgtcaccgaggctggagtgcagtggcacaacctcagctccctgcaacctccgcctcctgggttcaagcaattctcatgcctcagcctcccaagtagctgggattataggcatgtgccaccattcctggctaatttttgtatttttagcagagaccgggtttcaccacgttggcccaggctggtctcaaactcctgacctcaggtgatctgcctaccttggcctcccaaagtgctgagattacaggcgtgagccaccgcgcccgatgaagggttattattattttttttaaactttaccgtggaaactttcaaacatgagcaaaataagaggataatacagttcagcccccaggcaaccataaacatatgcctaatcttgtttcatcaattactacagacctgctgaattattataaagcaaaactatatcattttatctgtaaatactttagtatatatttccaagagataatgattctttaaaaaaacataaccacaaccccaccattatcacacctacaaaatgaacaataattcattaacatgaaatgtctagtcagtgtttgaaacatcccggttgtctcataaatgcccttttacatttggtttgtttggatcagggaatataaaatatagagaagacttttccccactcacccatgtagtttatgatttaaatggagagcctgctgttagtcaccaaactgattgccgcagctattgcactggggactcggggcagctggcaaaacatcctgcttggaagcaaatcctgaagaggaagtccatagaggtttctgcaacataaggcccatgaaaccgggccaaaggaaacaatcttaaaagaacagtgacttgatttactgtctggcttaacagcaagtcttggagcccctgctagttgactggaattaaacagcagatttccatttaggaagacagtcagttcctagaatgcctgtccattctttgcactgtatgtagttccagtgcgtagtgaagtgtctgacatgtaataggaactcagttcatgtgttatgttctttgttctcccatttttaatgaggtgagcaggaaatatgtattctagttaatgagatttcagttaattcaggtttcactgcacgtggcttgacacagttgcttacaggtttccccaagtaaatcattgttagtggccattcctaaaatgaattctggcaaaactataattaaagctacactttacaagtgagaggcaattggtaaacagctggaacagccaaccccaaccccaagtaggttggctcttcctggcaggattctccctggcagaccacgaaagcaatttcagaccaacgagtcaggggaggctttggctccccaggatctgaaagcagcaaaggcaacccgccccctcctcaaagccctcattcaaggggtggatcacgaaggccacctagaatgcaggcagagtgaggcttactgtgcctccacattttgaaattgcttgaggcactacttatagctctctgcatttgtaaaagcgattcctttgtgaccccctacatcgttgcagatactctacctcaatcattattggtccttaggagtgcacagtatatggatagtatacacacatcaaaatacgtcagccttcccatgaaacctagaacataggccattgcagtgttttttagattactcttcccctaggaagtagacaaagaataaaaataagatatgagcatttgtatagcttttattactttccaaagtgtttttttttgttgttgttgttttgtttttgtttttgtcttttgtatagtatctcattttatacttacaacaggtctgtgaggtagagaaggaataatccccagtttgcaagatgagtaaatggaagctgggcgaggtggctcacttatgtaatcctagcactttgggaggctgaggtgggaggatcacttgagcccaggagttggagaccagcctgggcagcatggtgaaaccctatctctctattttttttttttttttttaagagagttggctgggcatgatggctcacgcctgtaatcccagcactttggaaggccgaggcaggaggatcacccgaggtcaggagttcaataccagcctggccaacatggtgaaaccctgtctctactaaaaatacaaaaattagctgggcatggtggcgggtgcctataatcccagctacttgggaggctgaggcaggagaattgcttgaaccccagaggcggcggttgcagtgagccaagatcgcaccattgcactccagcctgggtgacagagcaagactccatctcaaaagaaataaaaatacacacacacacacacacacacacacacacacacacacacacacacaccagctctgggcccagctgtgactctttgcagccacaggcaagtctgttgacttctctgtgtttcttggtctactcatatgaaatggggatcagttctacttgctgtatttatgtcacaggaatgaaatttacatggaagagaggtcaaagtattatttaagcacaaaccaatgatgggtttccatagttcacattttcaggtaactgtggtctggaccctagaacagagttctgcaatcatccccatatgctctgcaaacaggtcttgccccagagtaccagttagctgactaggacagctctaaggatctcctggggtgaaacctcagcctcctctactttcccaatgggacaggaaatgcagtggctagagcctggggctctatccagtggcctgaggccacttagagatttgtggaaggtattcctgtacaaggtattgggtggtggtgctgggggtgggtggtggtgctgggggtgggtggtgggggacactagtcaggacctagtcattaagaagagataggccgggctcagtgcctcacgccagtaatcccagcactttgggaggctgaggcgggtggatcacttgaggtcaggagttcgagaccagcctggccaacatgatgaaacccccgtcgctactaaaaatacaaaaattagccgagcgtggtggcaggcgcctgtaatcccagatactcaggaggctgaggcaggagaatcgcttgaaattggaagatggaggttgcagtgagccaagatcacggccactgcactccagcctgggcaaaagaccaaaactccatctcaacaacaacaacaaaaaagagccgggtgcagtggctcacgcctgtaatcccagcactttgggaggccaaggcgggcagatcatgaggtcaggagatcgagaccatcctggctaacacggtgaaaccccgtctctactaaaaatacaaaaaaattagccgggtgtggcggcgggctcctgtagtcccagctgctggggaggctgaggcaggagaatggcgtgaacccgggaggcagagcttgcagcgagccgagatcgcaccactgcactccagcctgggtgacagagcaagactctgtctcaaaaaaaaaaaaaaaaagaaagaaagataaaatgtatttttgtggttgttgatcattattttgctggctaatgccactgctgccatcatgtgggagtgtgtgtggagtgtatgagagagaaagcatgttccccggagccaatgcaataagaccttaagaccatctaacatagctatattctaatttagccattagtcctcattacttaattttcttctgacttttttttttttttggtacattaatctatccattcattaactcagcttctcttttcattttcagtttgggcttcctgtagacacccttttcctgcgcaacagagctgggcctccctttctctaatttcccccttaacatgcctggggggcatacaatccaacccgcgccctctcctctcttcctgccaaggtttatagaaacctgagaatctgagggtgatgtctggccgctggtcaagaagccaacagtcatgtggctcgcagatgcatcctgcatcccagtccccctcccagcacccccagccatcccccctgtcttcccccacatctttgccagaggtgtgacatggtcagggggcccatctgctactctttcccaccagctcccctgttccagttctggttgctgttagtttccctgaggtatttgcaaccaccatggctgggtaaccaccgatcagcacagctgtccccttggtctcctgtatcccagtcactagtcctccctggtccaccccaccctcatcctcaggagccacagccatttcttagagggtttcaaaaggacagcctttggcgccttttccttctaacctttgagtccagccctttccagttttcattcactcgaagtaactgcactcaagctgtgctcaaaatcggcaacgcatttatttacaccaagcccttcccataaaacacaactgctgaagaaaatagcagacgtttcccctctctctaactctgggtatcccacagatgcaaaagggagaataaacctgaatattattaccagcctagagtcttgaatgatagccttaccgaattcttcttgtgaggtatttcagcatctcggggggtaatttccggaagggctccatactgtcccaataaggtgaggccagtagcaggaataataaatcccactttgtaggctggaaaactgagctgtcaaaagaatcaagtgtttgggggtttgctctgatgagtcttctagttcatttggtgaatgtcatgatgatttttaacatgcattttgcatgcatcccccaataagaagagatgagactcggccggagagaagaaaaggcccttaactttctttccaatttaaggagttgagagtttaaaaatattccagccctaagtttttatcatgggtcccatctgatagtggctttgggaacctctgtgaagtagagagccctcccttgtcagggttatgaggcacagtggcctttggtgtttggccagtgacagtgtgagagatggagttgacctggcaatgatctgtggctaacatgccgtctctctgcccttcctttgcagtaatccatggctgtgtactgaatagtattccccgctacagctggactggactccatttagccttttaagccgaggttcctattttaactgacagctttcctttggggtgccaggcagcgaggccccccacccctatcctgccatgtacttcaagctcacttcttctttttgagttccgcaacttgctcctgcctcccagccccactggcactgaccatgaccacctacttctattttttttttagagtttctttttttgatcacttactttcaaagcacacagtcaaacaaggttatgccaaatttccaggcctttttgaagtattgagaaggggaaggggatttctcacttcaattatagatcataataggaagcaaaaagaaaaaaatgaaaagcaaacatatgcacgcacttttcttgttgacaaagcaagaatataggtttgctgtgtaggtttggtgctctattgattggtgagtgaccagagcaagtatgaaggtgatgctgccaaagcacaagccagtttcttgggaaaattcaagttacagtggagtatttttttgaagaccatatgcttggaggtagaaacaaaccaacgaccaaaaaaaaaaaaaaaaaaatctgctcagatactcagccagtagctcagagagatgctgagttaggcctgtcaggtctccttgggaaaggcttcatatttgcaactttgatgattctatgtccagcttcagagctgctttcccagaaattcacgcttaaacaaccaaccggtaaccaccacttccccacaccgccgcccggtaattatttgcattacaaaccggaggcgccctcatttgcatttgtgtacagattaactagttaaggcttgagaagctctgaataattcaaaagtattagacccacacagccttggagagaccttcagaaactaaggaggagttttatattaagggagacattttagtcagtaagacgatataacctacttactccgtaaggggaaatgaaggcccagagaagggaagggacttgaccgaggtcccacttctgtttcgaggcagaagccagactaattttcatgcctcctgactcccaatcagtttcacaaagggattcaatctgtttatatacgttacattcctggatacgaggtcttttgatgttcagagtaactgactagttagtattagaagaccctcgaggtttttttccacagaaaaacatctgaagatggattgggtgagggctggcaaaacgaaggcatgccgggccagctccttaacccaatgacccagtgatgctgcaaggctggaacggggtccaggagactgtgtgtaacaggtgccctaggtgacccttataatcagggaagtttggtgaacaaaaatcgaacccatgagtgaacataaattaaaaagttgatcaacctattaaaatgtgtatttcattgggtagcttttctcactgtagacagattttttccttcttcaatgaaaaggcttttaaattagtacaactgttactatttaaaaaaaaaataccctaagtactctgtttacttctggtgaaacaaaaccagtcattagaaatggtctgtgcttttattttcccagactggagtggcttttctgaaacacacacacacacacacacacacacacacacacacacacacacacacacgtacacacatccctcacttctcttaagccaagaagtttgctttccctagctgcagtgtagatggctcttgtttttgtttttttgttttaatcatttggcattcacatgtggctgttaatatgtgcttgtttttaattaaaacaagaagctttaaactggtgtgtggtgttcttaaaaccttctcagcagatttccc

SEQ ID NO: 7762 - DNA, 16555 bp, Homo sapiens
cagtttacaggagacatatgaggccaaaaggaacgagttcctaggggaactccagaaaaaagaagaggagatgagacagatgttcgtccagcgagtcaaagagaaagaagcggagctcaaagaggcagagaaagaggtaaatgtgagcctggtgattattaaaatgtcaagaaacaacagctgctggtgagactgtggaaaaataggaacgcttttacactgttggtgtgaatgtaaattacttcaaccactgtggaagacagtgtggtgattcctcaaagacctagaatcagaaatgccattcgacccagcaatcctatagatcactttattataaagatacacacacacatatgttcactgcaacactattcacaataggaaagacatagaatcaactcaaatgcccatcaatgatagattggataaagaaaatgtggtacatatacaccatggaatactatgcagccataaaaaggaatcagaggatgttctttagaaggacatgagtggagctgggagccattatcttcagcaaactaacacaggaacagaaatccaaacattgggccggacactgtggctcacgcctgtaatcccaacactttgggaggccgaggtagttggatcacctgaagtcaggagttcgagaccagcctggccaacatggtgaaaccctgtctctactaaaaatacaacaattagtggagtgtggtggcacatgcctatagtcccagctacttgggaggctgaggcaggagaatcgcttgaatctgggaagtggaggttacagtgagctgagatcatgccactgcactccagccttggtgacagagcaagactccatctcaaaaacaaaaaaaaagaaaggaaacacttaattacttcacgattctcttccacatttaacctgtcacactctcaagggttctcaccaaagcccatgacaagggtattgattttttttttcagtttcacttaaaaaaaaaaaatgtctgttggctgggcgcggtggctcacgcctgtaatcccagcactttgagaggccaaggcgggcggatcacaaggtcaagagttcgagaccatcctgcctaacacggtgaaaccccgtctctactaaaaatacaaaaaaattagccgggcgtggtggcgggcgcctgtagtcccagctactcgggaggctgaggcaggagaatggcgtgaacccggaaggcggagcttgcagtgagccgagatcgcgccactgtactccagcctgggcgacagagcgagactctgcctcaaaaaaaaaaaatgtcagacaggtgccttggctcaggtctgtaatcccagcactttgggaggcttaaagcgaggggattgcttgagcccaggagtttaagaccagcctgggcaacatactgagaccctgtttctattaaaaatagaaaaaattggctgggcgcagttgctcacacctgtaatcccagcactttgggaggtcgaggtgggtggatcacgagttcaggagtttgaggccagcctggctaatatggtgaaaccctgtctctgctaaaaatacaaaaattagccaggtgtggtggtacgcacctgtagtcccagctacttgggagactgaggcagaagaattgcttgaacccaggaggcggaggttgcagtgagccgagattgtcccactggactccagcctgggcaacagagcgagactccatctcaaaaaaaaaaaataattacaaatacaaaaaattagccaggcatggttgcacgtgcctgtagtcccagctacccaggaggctgaggtaggaggaatgcttcagccgagagatcgaggccactgcattccagcctgcgtgacagagtgagactctgtctcaataaaaaaaacaaaaatgtcacccagcacttttaggaggagaagtgaggggatctcaaagacaaatgaataaaagtgcaacaaacaaaaaccaggttaaggcaattgataggcagccctagtgactagtaagagctgctttaggccaggcgtggtggctcatgcctgtaatcccaacactttgggaggccaaggtgggcggatgacaaggtcaggagatcgagaccatcctggctaactcagtgaaaccccgtctctactaaaaatacaaaaaattagccaggagtggtagcacgtgcctgtagtcccagctacttgggaggccgaggcaggagaatcacttgaacctgggaggcggaggttgcagtgagccgagattgtgccactgcactccagcttgggcgacagagcgagactctgtctcaaaaaaaaaaaaaaaagaaaagaaaaaagaaaagatctggtttatacagcaagtctgtcactcacccacctaagtgacagtgccaaatacccccaggacccggagaactaaccttcttcatcgtatgctgcaagtgctacagaatcctaaactctctcctgaatccatgaaagaaagtgaaattcggcttgctctgctcttactattcagggtagtttattgcattctagtttgtgactgtctgtgcctcttgttctctgatccacttaccacaatggcatgccagaatattctttttttttttttccgagacagagtctcactcttgcccaggctggagtgcagtggtgcgatctcggctcactgaaagctccgcctcccgggttcaagtgattctcctgtctcagcctcccaagtagctgggattataggcaagcgtcaccacgcccagctcatttttgtatttttagtagagacgaggtttcaccatgttggccatgctggtctagaactcctgaccttatgccacccaccttggcctcccaaagtgctgggattgagccgactactgggattacagcactcccaaagtgctggtattacaggcgtgagccactgtgcctggcccagaatattcttcttgttcttctttgggtttctggttctattcaggactaattaagcctccctttagttaaggctgaggtgtctgtactcattccatgtcataaagtcctttttatttccttccatgtccaaagccaagtatttccttgactggctttcccatactgaagttttctctgagatccatggtgatccttcctgattgcaggggttaagaaaagacaggggttccttacacataagaggtcccattatataatgttctaaatactgggttgaccatagtcaaattccttacttctcagaccttctgtttcctcataaaatggagataataacggaacctacctcataggaatgtggtaacaattaaataaattaatatacataaaggacttataaaagtcagtgcttagcctgtaattactcggtaatttctttttttattttttgagacggagtcttcctctgttgcccaggctggagtccagtggcacaatcttggctcactgcaacctccgcctcctgggttcaggtgattcttctgcctcagcctgctgagtagctgggactacaggcacatgccacaatgcctggctaatttttgtatttttagtagagacggggtttcaccatgttggccaggctggtgtcgaacacctgacctcaagtaatctgcccaccttggcctcccagagtgctaggattacaggcctgagcccggccagcactcagtaaatgttatattattataattgatgttattattgaccatgtgtggtaactatggggactctttttaacaaaatgtctgactaaacacaatgcagtattcctttaccatattcaggagcagagacttggagataaaatggcaggaagagagaacgatccagagcatggtgcctttggtgccatcatagcaatccctgacagaaatgccccctgaggttccagggtcctgcagggtcacagccctactggtccccacccacctgggcttggccaggctggggactgctcacaggggattctctccaatctccctgtgcttccctgccagctgcacgagaagtttgaccgtctgaagaaactgcaccaggacgagaagaagaaactggaggataagaagaaatccctggatgatgaagtgaatgctttcaagcaaagaaagacggcggctgagctgctccagtcccagggctcccaggctggaggctcacagactctgaagagagacaaagagaagaaaaagtaagtagcaggctgctctggggtggtgccttctctttcctcctgctcatcctcccagggcaggacgtggcacctgaaggggctgaggactggtgaccagaggtgagctgtgggctgtcagactggttgaggtacctataactggtcccagcatccctgtggcacctttggattccctgagcttggggagttgagagtagcagaggggtgtggtcccagaggcccagcccatctgtccagcttgctcaggaaagccctgcaaactcaaggtccataggaaaggaagggaaaagaggaaaagcaaaggagagtgagagagcagaagggaagaaaaaaattagaggtgcagcaatataagagaggaacaaggccgggcacggtggctcacacctataatcccagcactttgggaagccaaggcaggaggaacacttgaggtcaggagtccaagaccagcctggcctatatggcgaaaccccgtctctgcttaaaaaaaaaagaaaaaaaaaataggctgggcacggtggctcacacctgtaatcccagcactttgggaggccgaggcaggcagatcacaaggtcaggagatcgagaccatcctggttaacacagtgaaaccccatctctactaaaaatacaaaaaaattagctgggtgtggtggtgggtgcctgtagtcccagctactcgggaggctgaggcaggagaatggggtgaacctgggaggcggagcttgcagtgagcagagatcgtgccactgcactccagcctgggcgacagagcgagactccgtctcaaaaaaaaaaaaaaaaaaagagttcaagaccagcctgaacaacatggtgaaaccctgtctctactaaaaatacaaaaattagccaggcgcggtggcgcgcgcttataatcccagctactcaggaggctgaggcaggagaattgcttgaacccaggaggcagaggttgcagtgagttgagatcgcaccactgccctccagcttgggcgacagagcgagactccatctaaaaaaaaaaaaaaaatacagaaattagctgcctgtagtcccaactactcaggaggctgaggcaggagaatcacttgaacccgggaggtgtaggttacagtaagctgagatcacaccactgcactccagcctgggcaacggagtgagactccatctgaaaaaaaaaaaaatagaaaagaaagagaggaacaaaaagaactgcagctacgggccgggcgtggtgtaatcccagcactttgggaggccaaggcgggtggatcacttgagttcaggagttcgagaccagcctggcctacatgatgaaaccttgtctccactaacaatacaaaaaattagccaggcgtggtggcgtgcgcctgtaatcccagctacttgggaggctgagcaggagaattgcctgaactgaggaggcagaggttgcagtgagctaagatagcaccattgcactccagcctgggcgacagattgagactctgtctcaaaaaaaaaaaaaaaaaaaaaaaaaagaagtgcagatacaggatagtggaagaaagagagagcctttagcagaaactcggtgcaccctctccccacccttgccctatatctgaggttgctcacctctccatggccgtagtcccaccctcaccctgcctcagttattactctctgcagccaacagaatttaactgctgccagtgaaggctgcagctcagccctgatttcccacccctttgtgatccctccctgctggcttagttctgcctagcctggggtgctgagaacttatgggggagccctcagatgccagtgtatgctgcatgtgccccatcctcaatctgtggaatgactgtaagaccttctgatctcccctggtattagaacagtggctcctggataccatgtgggtcaataatcctcacccaaccccagtctctgcttgctgaagttacccattcctcatcccagaactggagaaaaatatttcaacgggatctagaaaaactcctgtggtgcccttgtgccctgcagttgtttgtgcagtgtggcttgaggagttcccaggtggactgtttagctgtgtctttactgaagggtactgaggatccaaaaggtgtccatggtcattgccttctgttttcagccatttgttcctggacttaactatgggatatttttgccagaaggaagaaacaccttcctttcctctggcttatcacttaggaataacatggtaacttttgcataacagtaaaatatgttatatttgaaggcattcagctttgcaatccaattactctttatgcaaatgtgtaatttaaacatcttggccgggtacggtggctcacgcctgtaatcccagcactttgggaaactgacgcaggcagatcacctgaggtcaggagtttgagaccagcctgggcaacatggcgaaaccccgtctctactaaaaatacaaaaattagctgggcatggtggcccacacctgtagtcccagctactcaggaggctaaggcaggagaatcacttgagcctgggaggtggaggttgcagaaccaagatcatgccactgcacttcagcctgggtgacagagtgagactttgtctaaaaaaaaaaaaagaacatcttcaccaattagtccagaaatttttcttactgaatcttaatactatatgtcaaattcactgatgaatgaaattttttggtattacctgatggataaagttcaactagccagaaaaaagtctctttggacacaccctgtactgtattaacttatctgtcatggtgtattagttgcaccagcaggaatgaattcctatttttaagatcagaaaaatctaaatttgtcatccagctgtaacctgctgccttcatagtcctgtggtatttgttaactcagtacctggggcagtttcatagcctgcttgtgggagttaggaattggtttgttcaggctacaatgaaactataaatattccctattcagatgttcagtaaaagttcttcttacatcaagctttccccttgttgcctcatactgactgacttctcccaccccaggcaggagaccccaacagggagatacccctctctactcttcaggaatatttggggttggtgacagtgcccctttccaattctgaaatgggtgaaaaccctgctggcatgtggcaccttatattagcaataagggcctaacagaatgacctgtcttcttctgtacttccagatgcagaagtggccctgaatcttggcttcttatgtaatttcatgagcaatttgttaacttctggaagagccaccgttagacctgtgctaccctcctcccatagtcacggtagtgagttttgagggcagaaatggtggtagtagtatttcttcttgagagatggtggttggatctaagagtcacatattcagaatttcctttagctgcccctaaagagattaagaaagtactggccagccgtggtggctcatgcttgtaatcccaatactttgggaggccaaggcgaaggattgcttgagtccaggagtttgagatcagcctgggcaacatagtgagacctttgtctctacaaaaaaaataaataaataaacattagctgggcctggtggcacttgcctataatcccagctactcaggagactgaggtgggagaactgcttgaacccgggaggttgaggctgcagtgagccatgattgcgccactgcactccagtctgggcaacagagagagaccctgactcaaaaaaaaaaaaaaaagagtatcagtgtttcaggggttcctaccagtccacccttcccacttccccttcctgctactcctaatcacctttgacctctaacccttcattgtttgtgtcaagtcataatatttgatttcccctcatgctcactccatcttcatcagctcttactgttttacagttaactctgctgtttgctgcatgctgcatgagacccagggtcctggtaagcttgattaactctaaatagaactggcagtggcttctagaacatatctcccccaatcccgcacccccaacacaagcatctaatcgtagaagaagctgcttcattggtctagctggttttctctcgtgacttataatatgcagaaatagtctggtgtggtttcaggtgtacatgtggaatgcctgcctgcctgcctgattaaagtgaggggtcgttttcagacttttgctgctagaacagctgggtaacacaggtggatcctgtgatcagtatttgaggtttcagtgtgggaagtttttttcttaaagagccataatcgggccggacgcagtggctcacagacctgtaatcccagcactttggtaggccgaggagggcagatcacctgaggtcagaagattgagaccatcctggctaacacggtgaagctccatctctactaaaaatacaaaaaattagccggacatggtggcacaggcctgtaatcccagctactctggaggctgacacaggagaatcgcttgaacctgggaggcggaggttgcagtgagccgagattgcaccattgtactctagcctgggcaacaagagcgaaactccatctcaaaaacaaaaggagctataaccattattttcaaaattaatgaaaccgtggtgatgagagaaactgggtttcacaagctccgtcctgcaatgtcacagtcagcatcaaccctctcccatccccctgcatcaggtttgagaatgtccagagtcaatggaaactcacttctctgtttcccgctggtggcagtttcatatctgaggggttcaagtcctcaaatttcctttgactgtacccctcaaaaccataataaggctgagagcagtggctcacgcctgtaatcttagcactttgggaggccgaggcgggcggatcacctgaggtcgggagttcgagaccagcctgaccaacatggagaaatcctgtctctactaaaaatacaaaattagccgggcgtggtggtgcatgcctgtaatcccagctactcgggaggctgaggcaggagaattgcttgaacctgggaggcggaggttgcagtgagccgagatcgcacctttgcactccagcctgggcaataagagcgaaactccgtctcaaaaaaacaaacaaacaaacaaacaaaaaaacaaaaaaaaaaacccataataaaagcggaggaaaatgaagagatcttagaaattatagagaattccttacatttaatcctacaagtactggcttcatgaaaacctcttataaggagatcagcaggtaaggattcctgagtgctagatgttgtgttaatagaagtttataaagtttcacatagtttatagggagactgaaagcagggattaaggaccttctatctcctctactagactcaggtagtggatggaaaggaaatacaaacatttttaatttaacataattagggttttttttgtttgtttgtttctttttttgagacggagtctcactctgtcaccgaggctggagtgcagtggcacaacctcagctccctgcaacctccgcctcctgggttcaagcaattctcatgcctcagcctcccaagtagctgggattataggcatgtgccaccattcctggctaatttttgtatttttagcagagaccgggtttcaccacgttggcccaggctggtctcaaactcctgacctcaggtgatctgcctaccttggcctcccaaagtgctgagattacaggcgtgagccaccgcgcccgatgaagggttattattattttttttaaactttaccgtggaaactttcaaacatgagcaaaataagaggataatacagttcagcccccaggcaaccataaacatatgcctaatcttgtttcatcaattactacagacctgctgaattattataaagcaaaactatatcattttatctgtaaatactttagtatatatttccaagagataatgattctttaaaaaaacataaccacaaccccaccattatcacacctacaaaatgaacaataattcattaacatgaaatgtctagtcagtgtttgaaacatcccggttgtctcataaatgcccttttacatttggtttgtttggatcagggaatataaaatatagagaagacttttccccactcacccatgtagtttatgatttaaatggagagcctgctgttagtcaccaaactgattgccgcagctattgcactggggactcggggcagctggcaaaacatcctgcttggaagcaaatcctgaagaggaagtccatagaggtttctgcaacataaggcccatgaaaccgggccaaaggaaacaatcttaaaagaacagtgacttgatttactgtctggcttaacagcaagtcttggagcccctgctagttgactggaattaaacagcagatttccatttaggaagacagtcagttcctagaatgcctgtccattctttgcactgtatgtagttccagtgcgtagtgaagtgtctgacatgtaataggaactcagttcatgtgttatgttctttgttctcccatttttaatgaggtgagcaggaaatatgtattctagttaatgagatttcagttaattcaggtttcactgcacgtggcttgacacagttgcttacaggtttccccaagtaaatcattgttagtggccattcctaaaatgaattctggcaaaactataattaaagctacactttacaagtgagaggcaattggtaaacagctggaacagccaaccccaaccccaagtaggttggctcttcctggcaggcttctccctggcagaccacgaaagcaatttcagaccaacgagtcaggggaggctttggctccccaggatctgaaagcagcaaaggcaacccgccccctcctcaaagccctcattcaaggggtggatcacgaaggccacctagaatgcaggcagagtgaggcttactgtgcctccacattttgaaattgcttgaggcactacttatagctctctgcatttgtaaaagcgattcctttgtgaccccctacatcgttgcagatactctacctcaatcattattggtccttaggagtgcacagtatatggatagtatacacacatcaaaatacgtcagccttcccatgaaacctagaacataggccattgcagtgttttttagattactcttcccctaggaagtagacaaagaataaaaataagatatgagcatttgtatagcttttattactttccaaagtgttttttttttgttgttgttgttttgtttttgtttttgtcttttgtatagtatctcattttatacttacaacaggtctgtgaggtagagaaggaataatccccagtttgcaagatgagtaaatggaagctgggcgaggtggctcacttatgtaatcctagcactttgggaggctgaggtgggaggatcacttgagcccaggagttggagaccagcctgggcagcatggtgaaaccctatctctctattttttttttttttttttaagagagttggctgggcatgatggctcacgcctgtaatcccagcactttggaaggccgaggcaggaggatcacccgaggtcaggagttcaataccagcctggccaacatggtgaaaccctgtctctactaaaaatacaaaaattagctgggcatggtggcgggtgcctataatcccagctacttgggaggctgaggcaggagaattgcttgaaccccagaggcggcggttgcagtgagccaagatcgcaccattgcactccagcctgggtgacagagcaagactccatctcaaaagaaataaaaatacacacacacacacacacacacacacacacacacacacacacacacacacacacacacacaccagctctgggcccagctgtgactctttgcagccacaggcaagtctgttgacttctctgtgtttcttggtctactcatatgaaatggggatcagttctacttgctgtatttatgtcacaggaatgaaatttacatggaagagaggtcaaagtattatttaagcacaaaccaatgatgggtttccatagttcacattttcaggtaactgtggtctggaccctagaacagagttctgcaatcatccccatatgctctgcaaacaggtcttgccccagagtaccagttagctgactaggacagctctaaggatctcctggggtgaaacctcagcctcctctactttcccaatgggacaggaaatgcagtggctagagcctggggctctatccagtggcctgaggccacttagagatttgtggaaggtattcctgtacaaggtattgggtggtggtgctgggggtgggtggtggtgctgggagtgggtggtgggggacacctagtcaggacctagtcattaagaagagataggccgggctcagtgcctcacgccagtaatcccagcactttgggaggctgaggcgggtggatcacttgaggtcaggagttcgagaccagcctggccaacatgatgaaacccccgtcgctactaaaaatacaaaaattagccgagcgtggtggcaggcgcctgtaatcccagatactcaggaggctgaggcaggagaatcgcttgaaattggaaggtggaggttgcagtgagccaagatcacggccactgcactccagcctgggcaaaagaccaaaactccatctcaacaacaacaacaaaaaagagccgggtgcagtggctcacgcctgtaatcccagcactttgggaggccaaggcgggcagatcatgaggtcaggagatcgagaccatcctggctaacacggtgaaaccccgtctctactaaaaatacaaaaaaattagccgggtgtggcggcgggctcctgtagtcccagctgctggggaggctgaggcaggagaatggcgtgaacccgggaggcagagcttgcagcgagccgagatcgcaccactgcactccagcctgggtgacagagcaagactctgtctcaaaaaaaaaaaaaaaaagaaagaaagataaaatgtatttttgtggttgttgatcattattttgctggctaatgccactgctgccatcatgtgggagtgtgtgtggagtgtatgagagagaaagcatgttccccggagccaatgcaataagaccttaagaccatctaacatagctatattctaatttagccattagtcctcattacttaattttcttctgactttttttttttttggtacattaatctatccattcattaactcagcttctcttttcattttcagtttgggcttcctgtagacacccttttcctgcgcaacagagctgggcctccctttctctaatttcccccttaacatgcctggggggcatacaatccaacccgcgccctctcctctcttcctgccaaggtttatagaaacctgagaatctgagggtgatgtctggccgctggtcaagaagccaacagtcatgtggctcgcagatgcatcctgcatcccagtccccctcccagcacccccagccatcccccctgtcttcccccacatctttgccagaggtgtgacatggtcagggggcccatctgctactctttcccaccagctcccctgttccagttctggttgctgttagtttccctgaggtatttgcaaccaccatggctgggtaaccaccgatcagcacagctgtccccttggtctcctgtatcccagtcactagtcctccctggtccaccccaccctcatcctcaggagccacagccatttcttagagggtttcaaaaggacagcctttggcgccttttccttctaacctttgagtccagccctttccagttttcattcactcgaagtaactgcactcaagctgtgctcaaaatcggcaacgcatttatttacaccaagcccttcccataaaacacaactgctgaagaaaatagcagacgtttcccctctctctaactctgggtatcccacagatgcaaaagggagaataaacctgaatattattaccagcctagagtcttgaatgatagccttaccgaattcttcttgtgaggtatttcagcatctcggggggtaatttccggaagggctccatactgtcccaataaggtgaggccagtagcaggaataataaatcccactttgtaggctggaaaactgagctgtcaaaagaatcaagtgtttgggggtttgctctgatgagtcttctagttcatttggtgaatgtcatgatgatttttaacatgcattttgcatgcatcccccaataagaagagatgagactcggccggagagaagaaaaggcccttaactttctttccaatttaaggagttgagagtttaaaaatattccagccctaagtttttatcatgggtcccatctgatagtggctttgggaacctctgtgaagtagagagccctcccttgtcagggttatgaggcacagtggcctttggtgtttggccagtgacagtgtgagagatggagttgacctggcaatgatctgtggctaacatgccgtctctctgcccttcctttgcagtaatccatggctgtgtactgaatagtattccccgctacagctggactggactccatttagccttttaagccgaggttcctattttaactgacagctttcctttggggtgccaggcagcgaggccccccacccctatcctgccatgtacttcaagctcacttcttctttttgagttccgcaacttgctcctgcctcccagccccactggcactgaccatgaccacctacttctattttttttttagagtttctttttttgatcacttactttcaaagcacacagtcaaacaaggttatgccaaatttccaggcctttttgaagtattgagaaggggaaggggatttctcacttcaattatagatcataataggaagcaaaaagaaaaaaatgaaaagcaaacatatgcacgcacttttcttgttgacaaagcaagaatgtaggtttgctgtgtaggtttggtgctctattgattggtgagtgaccagagcaagtatgaaggtgatgctgccaaagcacaagccagtttcttgggaaaattcaagttacagtggagtatttttttgaagaccatatgcttggaggtagaaacaaaccaacgaccaaaaaaaaaaaaaaaaaaaaatctgctcagatactcagccagtagctcagagagatgctgagttaggcctgtcaggtctccttgggaaaggcttcatatttgcaactttgatgattctatgtccagcttcagagctgctttcccagaaattcacgcttaaacaaccaaccggtaaccaccacttccccacaccgccgcctggtaattatttgcattacaaaccggaggcgccctcatttgcatttgtgtacagattaactagttaaggcttgagaagctctgaataattcaaaagtattagacccacacagccttggagagaccttcagaaactaaggaggagttttatattaagggagacattttagtcagtaagacgatataacctacttactccgtaaggggaaatgaaggcccggagaagggaagggacttgaccgaggtcccacttctgtttcgaggcagaagccagactaattttcatgcctcctgactcccaatcagtttcacaaagggattcaatctgtttatatacgttacattcctggatacgaggtcttttgatgttcagagtaactgactagttagtattagaagaccctcgaggtttttttccacagaaaaacatctgaagatggattgggtgagggctggcaaaacgaaggcatgccgggccagctccttaacccaatgacccagtgatgctgcaaggctggaacggggtccaggagactgtgtgtaacaggtgccctaggtgacccttataatcagggaagtttggtgaacaaaaatcgaacccatgagtgaacataaattaaaaagttgatcaacctattaaaatgtgtatttcattgggtagcttttctcactgtagacagattttttccttcttcaatgaaaaggcttttaaattagtacaactgttactatttaaaaaaaaaataccctaagtactctgtttacttctggtgaaacaaaaccagtcattagaaatggtctgtgcttttattttcccagactggagtggcttttctgaaacacacacacacacacacacacacacacacacacacacacacgtacacacatccctcacttctcttaagccaagaagtttgctttccctagctgcagtgtagatggctcttgtttttgtttttttgttttaatcatttggcattcacatgtggctgttaatatgtgcttgtttttaattaaaacaagaagctttaaa

SEQ ID NO: 7763 - DNA, 887 bp, Homo sapiens
cacacatacaccacaccactcaacaagtgttcatgtgtccctgtgtccaggcaagaagctctcttcctgactcacatggtattttaaatggaagtgtcttgtcctaactaacaaggcaggaaaagaaccatcagagctggaaaatggacgaaatgtaacctcagagaaacaactacaggaccactcacccaagtgtaagtgactggggcaggacacctcagctgtgggtatgaaagtactgttctgttcacaaggttttgtttgagttttatgtttttcttttaaacatttctctggttcgatgggttgactgtctacagccactgttaaacatttctgaatatgcaagagaaagtcaagtgacatttgtatcttcttcagcattcgcagaccttctatagattccagcaaagggggaaaatgtatccactatctaacacttaggtagagaagggagggggtttaagcttagtgagggcaaaattactccattccaccttccgagaccagttagggttttgagagaggtttctgctcaacctgggatctggagggagagctttgatgttggtaaatctgccttgaattcattggtttaacttgcatcaaaataccatgtgagtgtgctcattctcatatatcccctaccaccatcaccaccattctgctgttcagtgtctcttgagagagcctctttgcatgttttccagaatctgtgtgtgtttttcctttcttctcctttgttctttttgctcaaaggtgtgaccagtcattgcccctctggggctttcattctccaggagaaacatcccagaaccagcactgtttagcctgatacctttctaatgtccatgtcaattttcaataaaattcaaagaaatgctaaa

SEQ ID NO: 7764 - DNA, 511 bp, Homo sapiens
ggcaaatgggtcagaatatctgagatcatggcctgtttctgcaggcaggctaagaaactttccccataggctctttacctgttggtgtaaagcccttttgggcaaagccccacctgggctcacctggtcagtaaacattgattccgtggttccatctggctgtggtgacttagcacttacaagctggctagctccttgtggattacggctctgtgagtgtttcctaggccccatactgccaagtcggggcagctctctcttctctcatccataaagccaggccaagctcctcattttccctgtgagcaccaagctcataaacctatttgtcctttgcctttctttcctctttccctagccctaccactgccattcaggaagtatttattaagcacctactatgtacagggtaccagaccatatacttgagcccttgatcacatactatcttatatgacttgagttatgtaatttgggcttcctcaacaagactgtaagctcctagagggcg

SEQ ID NO: 7765 - DNA, 887 bp, Homo sapiens; identical to SEQ ID NO: 7763

SEQ ID NO: 7766 - DNA, 3693 bp, Homo sapiens
cggtccagtaggatggataatgttcttatttcacagatgaggaaactgagaacaggaaggtgagttacagaactctggctactgttctgctcatctcccagccccgtgaattttcatctctctcttcccccagtttatttatggagattcttagttcctgttcagattgtgatgagatccaattcatggtagatggatcctggtgcccaatgaaacccaagaaggaggcatctgaggtttgccccccgccagggtatgggctggatggtgagtgaccccctgttccccagctaagctaaatcttggatggcctcttctctgagacgtagtcttcttaatacccacaggcctccagtacagcccagtccaggggggagatccatcagagaataagaagaaggtcgaagttattgacttgacactagaaagctcatcagatgaggaggatctgccccctaccaagaagcactgttctgtcacctcagctgccatcccggccctacctggaagcaaagggtatgagaaaataggctgagtctacagcaaaacggacaggggaagaagtcaggattgctttctgatcattggacaaagcctggggcaagagaaatgtggaggggacagagagggaacctggggacctgagctgggtgagggcatctgtggtttgctggctgcctcagctcctctctacccacagagtcctgacatctggccaccagccatcctcggtgctaaggagccctgctatgggcacgttgggtggggatttcctgtccagtctcccactacatgagtacccacctgccttcccactgggagccgacatccaaggtatgacatgggtcataagatggaccctgcactgccacaccctccccagagctacatcagaacccctgttccttctcaaagcctcctgcttctcctgcaaggggccacagtccacagtgctttgtcttttggtggtaaaggggtcagataggaggttaattttgatttttcttttcctgccaggtttagatttattttcatttcttcagacagagagtcaggtaagtggttctttcttcagaaggtctcagatctctgaagcttcctttctagacactgatggggcccctccctctcttatgatctctggggatgtaaatctgctttcccgtgagggcagtggggtgtaggtatcttattatctcctcagccccactggtagttcctgagattcctacttaggcctccttcctagatcccctgttacttttctgccctggcctactcacccctacccccgtgtgcacttagagcaccatgcctgctctaaccggacattccacacatttcagacgcccacaaagccaagaacctaacaagttggaggagctctctcaaggcagggaaaggggaagggtgtagggaagtaggggaaagagggagaggctctcctgcttctcaagagaataccttcggatccacaggggttgattgctctcatacggcatttctgagatgagtgactgggaggtggggaagtcaggattgagatcttaaactatgcccttgattcttcctagcactatggcccctctgtcatcacctcactagatgaacaggatgcccttggccacttcttccagtaccgagggaccccttctcactttctgggcccactggcccccacgctggggagctcccactgcagcgccactccggcgccccctcctggccgtgtcagcagcattgtggcccctgggggggccttgagggaggggcatggaggacccctgccctcaggtccctctttgactggctgtcggtcagacatcatttccctggactgagttccctggattatggaaacttcgctgtcccccaacactgagcaagtatgctgtggagtcccaaccccagctactctgatccctctgggggctctggccaagggccagacagaccttcacagatgcctacttttggcctcatctctgcctgacaaggccagcacccaaagggttaatatttaacctctttttaaggacactggggtctgtttctggaaatgttctttagatggtggcacattcctttgggtatgttaacctaggcagtgggaggcaaatgggatggtatgtgagctaggagaagggctgaaccctcagccttgactatgtctagagcctcttggggaaggggcacctctcttgaaccccaaatgctctctcttcttattacccaaacccatggctctatttcttcttcacatccattgtctcttcatgtctattccattcccttcggccaaacagacaggtggaaaaactgagacaggcagtttcagagatggacagagaactttattttggattgtggatgtggacttttttgtacataaataagaaaaaccaaaatactccaaagatgacttcccctgcctcctactccagtatgacagaggaggatgtaaggccttagccatgatctgcaggggtctgggagtcaggcccggcctattgcttgggtctctctccatttatatatctaagttcacagtgtttcttattcccccctaagcttctagaggctcatggccctgtagttaggcctggctcattctgcaccttgccagggaggtggaaggaccctgtgccctccttcccaatcttctttttcaggctcgccaaggcctaggacctatgttgtaattttactttttatttctaaagttgtagtgaagctctcacccataataaaggttgtgaatgttctgtgagtgtcatggagatgggctagggaggggattttacacttcactttccagacccctggtttgggggaagagggtccatgttccattcttcctttgctggccctgggtccaggtaagctgcacttttacacggtgggggtgttctgtggaggaattccaagagaggttgtcctttcctgctttcccccgtgcctgtaaaaactagaccattccagcccagtactgtggagctctccagtcctttttcacttttacctgcccagatgttgcagccagagcttgagggcaaacttggttccagtgctgactctctctttgtcctctgccatggttgggatcatccgcaggagggtggacatgtgcaggaccagaggtcgggctcttccatcctcctctagttccactgcactgcatggtgacaactcctgttggggctgtgccttgtagcttacaaagaacttacatatatgttaggtccccgaatcctcccaactaccacaggaggtgggtgggtgttgacctcatttgcagaaaggaaacaggttcaaggagggttaaatgacttgcccctgtgttagaactgacacttagaccttcaatgctagccagttagagcaagaatctttggggtttgatggtcagtgtcttagatttcatgtaccttcttaattatcagctgacccactctccttaaatctcccccacaacacaaaattccatcctgaggacaggatagacgctgaacttctcaacatgaatatgttggtgtattagaggctgagggagaagctcttacttacaggacagagggtggtaggtcctgggggagaagtccgggtgtctctgtcccatcctctgcggcagccactgcagcagctacatctggtgtcagccacataagggcgctcacctcatttgggtttggt

SEQ ID NO: 7767 - DNA, 2155 bp, Homo sapiens
ccgccctgtccgactgtaacagaccaggagggtggcggaggaactcctgccacgccactgtgtcatgaaggaaagtgaaagggaacgaggaagtaggaatgcccacgctcgttgactccgtgggtgaatacagcagttaggacatacacaccatcacctttgaaagtgcttgtttgggggagggaaggacatacgggtaactagaactacccagcgagtcgtccagaggagaggatcaggtttgagtcaggaggctccctgtactggagtcgtcccactattcctcaagaaatcttagaaccagcttgtgaggaaaaacattttttaatgtaataaaaatatgccattattctttgaaatgccaaatgatataaatattttgcctaatacatatttattgtagatgaaatgcactcttctcgatgaggcctcgatttgaatcaatggggtgggccacaggaaatgtcagaggaaccagaactcagaactcttcctcctggacctttcttcccttcccttggaggtatccctttgaatcaggcctctctcttctcatcagtctgtagcttccccccttgtataacctgctttcctttttacatttattaaaagtggattttgtaaaagcatttcattgacacgcgacctatcacagacaatggaattcgtcagtggtggtaagactgaaatcctgatgcttttcacacttcttgtctcttgctatgtatttctgcctctagccttgccatgttttgccttttttttttctttttggccaattcctttttatatgtgcccacaacagaggtggggagacacggagcaccctgggtccttcccagcgctgctgggcaggccccgtctccaggccccagctgttgaaactttgaagggcaacaaacaaccatccacactgccggaccctaggctgttcagggaggcagctcatttccaccccggccccaggacacccagcctgtgccccacaaggatctctctaaatgggagggattgaggctacttttctgccaagccctattaagtagtaatgtggggaaacccactgtgtcagtgcaggaagccctagacaaatgttttcaaataaatttcactgcccagcctgcacagatttccatttgaagtacttcccatccaccctgacacccaaaggggtttttttgttttgttttgtttttgagacagggtcttgctttgttgcccaggctggagtgcagtgacgtggtcatagctcactgcagcctcaacctcctgggctcaagtgaccctcctgcctcagcctcccaaagttctgagatgataggcatgagccattgtgcctagcctattttgatttttttcttagagtcaaggtcttgctctgttgcccaggctgatcttggacttgcgagccaccatgcctggctgggttttttaaaaatagaatctcactgatagcctgcaagaaacagatgcagtgcctgcttccgtatcagtccaaggagccctcgtgtttgccacctttacctttgaacctccccctgcctccctgcctgtgtccgcttttgcagctcaatgcagccatgacaaggaaagaaaagacaaaggaaggccagagagccgcgcagttctctgcaggtgcagatgcaggcagtggaggtggcctgagcaggcagaaggacaccaagcgccctatgttgcttgtcattcatgacgtggtcttggagcttctgactagttcagactgccacgccaaccccagaaaataccccacatgccagaaaagtgaagtcctaggtgtttccatctatgtttcaatctgtccatctaccaggcctcgcgataaaaacaaaacaaaaaaacgctgccaggttttagaagcagttctggtctcaaaaccatcaggatcctgccaccagggttcttttgaaatagtaccacatgtaaaagggaatttggctttcacttcatctaataactgaattgtcaggctttgattgataattgtagaaataagtagccttctgttgtgggaataagttataatcagtattcatctctttgttttttgtcactcttttctctctaattgtgtcatttgtactgtttgaaaaatatttcttctataaaattaaactaacctgccttaagaacagag

SEQ ID NO: 7768 - DNA, 18053 bp, Homo sapiens
aggaacgaagatgccgaggagcctgcctacggagacacggccagtaacggagatccccagatccacgtgggactcctgtgagtacagaccctaccctgtttcccctggggctgggctggagactgggcccaacccgtggctcccacctgcacacacagggctggagggacccttgttacccgaggtctgaggtgaggggacagaggtggcaggaaggagtgacagggaaaagtggctccactgttgtcttccaacatggagattcacagctgagagccgccacttcctggagctgggggctccggcaggcaaagtgtggctctcggggacagttgcgcccgtgtctgccaggagttggttctgctcactgcagcacaggtagcggactccctccctcaccgtcaaggaagtaatccgctggttggcaggacaacaatttttggtttctaattacagtgtcaataagggcagtgactgtgaggtgcccctgaggaaaacagggtgtttgggtcccagccatttcctttgctcactctcgtcacttcagtccagggctcctccacctggcatggttggcatttggtcattctttgttacggggactgtgctgtacctgggctttacccactaggtgcagatgtctcctgcagatagggtggggcagaatcccaggcagtggatggccactgctgcagttgagtcagaaggatggttttacttggggggcacctgccgtccatgactcgtgtctggtttcctaggcgcgacagtggcagcgagtgtctcctcgtgcacgtgctgcagctgaagaacccggcggggctggcggtgaaggaagactgcaaagtgtaagccaggccccagggcagtggccagccagccacatggctgaggagggaaaagacagtttgggagcctgaatttccaggaaagcaccagggagtgtgtgtctgaagtgtaaagtcttcaaaagagtctagtgaatgatttgaggccggtgaaggtgccggtgctggtggcaagctagtgtgtgccgtgttggcgtggaggaagcacttgcctgtgccgtacaggactgcatcctcctggcccggggatggggttgctgatgtcgtcgtgctctgctctgtgatcttgagagacctctggctgggaccagggcatccttgactgagcggggaggaggaaataggcattgggagcagctggtgactttggcctcgatcgtgggagcgctgcctctctgagctccgtggccccagatgggggcctgatggagggtcccacttacccaagcaggtgaccatgcctgtaatggtctgttcaagtcgcagggtggggcccctttggtgagtcttctaaaggcctcaggatccctgagtgtgagcagctgggggctcggctggggttcggccaccccaatgacctctgcagtgctcacagatggctcagcccctcccatgtgccagacttggggcagggagggtgggaaatacgggctaccccatgggtgatgggcagagaaagcagtgggggagccatgcagaaaaaccagaggggcgattcccaaaaaggtggggagcagcagggcctggaagcatccgctgcttcagtcctggcttggaagtcatcctccttgtgagtgacttcccccatccctggggtacatcgttctatgcttagttgagaaaggaactttttgcaaaggactctgagactgtagccacagctgcccaaagggggctgcacgtggggggtctgtgcgcattgtgtaggtcgcgcctgccctgggactgcgccatctgtgagcgccgcctgcacgcgctcttccctcccccgttctgtttgcagccacatccgagtctatttgcccccactggactcgggcacgcccaacacttactgctccaaggctctggagttccaagtgccgctggtgtttaacgaagtgttcagaatccccgtgcattccagcgcgttgacactgaagtcacttcagttatacgtgtgttcagtgactccgcagctgcaggaagaactgctggtatggcgccaggctccgcccgccccgtcctccttccttccttcgtgtttcagtcagccggtcttttttttgtgtgtatctttctttcccttctttctcttgtactcttttgtgatgctttcttaggtttcgtatgtctttgccttttggcctccctctctctcttctgcctccatctctagttccctccctcctttcccctctgccatcctccctttctcccgtggtgggttgcttggaagttgtgatcttcttcagtgtttctgtggctggaaatacaaacagggatgatccaaccagtgatgttgtcaagcaccttgtcctctaaatgtgtcctctcaactagtactcacgaccctgtgggatgcctttgcgtcagccccatcttcagtccagggaacaaagtagggttgacagatttagcaaatagaaatacaagacagtcagctaaattcgaatttcaaataaattatggatgctctttaaagtgtaagtatttcccatgcggtgtttaagactcacagggaaaccctgtgttgtttatttgaagtgcagattcacctgggcgccctgcacgttacctggcaaccccggggcgaggcctcaggagaatccgcagtttgtcctcagtatcccagccatccaaggcccatgccagggttggaagccagggtggattccttccatggccagagtgttctgtcttggttctgtcccctcagcggcacaattagggcatgtagagttcagcagtcgtttcttatttcagaaattcctgagcgaatctgcctcatcactgcagtagagctgtgagcctggcccagcactccaggttgcccattcttttgccctttctgatcccttcccagcactttctgattgggcggaacaggcgaccagggagccacccattagactcctctgcagttgctttcattgtgctgcagtcctttaagtaggaatgaaatcttttatgtcttgtttggttaagattgaagggtagcctgggcacagtggctcatgcctgtaatcccagcactttgggaggccaaggcgggtggatcacctgagctcaggagtttgagaccagcctggccaacatagcgaaaccccatctctactaaaaatacaaaaattagccgggtgtggtggcgcacacttgtaatcccagctactcgggaggctgaggcgagggaatctctcgaactagggagggaggtggaggttgcagtgagctgagatcgcaccactgcactccagcctgggcaacggagcaacactccatcacacacacacgcacacacgcacacacacacgcacacacacaaagattgaagggtgaactggatttttttgagacagggtctcactctgttgcccaggctggaatgcagtggtatgattttggctcaccacagccttctgagtagctgggaccacagttgtacatcatcatgcccggctgatttttaacttttttgtagaggcagagtcttgctctgttgcccaggctggtctcgaactcctgggctcaagcaatcctcccacctcggcctcccaaaatcctgggattacaggcatgagccacctgccctgcctgaactggatattttaaaggactctagtcatcacggcgaaatcattcagtgcctgttctggcatttctttaatacccctgcagggcattgctcagattaacctggctgactatgacagtttgagtgagatgcagctgcgctggcattccgtgcaggtgttcaccagctctgaaccatcaaggacgcgggaggctgggtgtgcaggagagagctccgcccgggaccctgcacacaccatctccatctccggcaagacggtacttggccctgctctaaggagctgatcactgctgccttcgtgaccctgagactggctttgtcttggggaagtcatttcttagaagtgtctttgtagacgtaagtcagtatagtggggtaaaggagtagagtttccatatggccattgcatgcgaatgtttttttaatgcaaatgtgttcatggtcatgggtggtacactggctagttttaaatatgagccctcagagctgcaggagaaggccacatgaatgcctccaccacagacctaggtagggtgagtttcttctcacggaagggcagcagagtggcctcctacctgtgccatgtggacacctgccgtgtgcgcagggtctgctggcctgagctgtcctcacgcaccccctcttcctgcaggatgcggtgacggtgctcctggccagaaccacggcacagctgcaggcggtggagagggaactggccgaggagcgggccaagctggagtacacggaggaggaggtcctggagatggagcgcaaggaggagcaggccgaggccatatccgagcggtaagggctagctcagcgggcaggctccggctcatgccctccctggaaaggagcatgggtgccctgtggtcagaaggctcgtgaaaactgtcaggggggagcacattttctctggggagacagccagtgtgccaggcagcatggctgtctctgaggtgcacttgctttcctcagccatgcctccatagaaggtgctgggcaatccttaggcaccactgcccagaagtcgattctggtggaaattgagtgctggtgtggacgagggcagctccccgaagtctctctcctgactctcacgtgtgcttttcaccttttccttctgtctgtcctggagtttcttgtcgagagtgggactgttgaagcactgccctctcccaggattggatacagtaaggtcccttgaagttgttggatttttttcttttttaacacctgtattgagatataatgtacctcccatgcagttcacccgtttaaagtgcacagttaggtggtttttaggactgaatgggcacagtcaattttacagcattttattttcatcacacactctctgcctgtccctagccaaatgcgctcccaggttctcctctgattccctgcaactacaaatctgccctctgtgtctatggacttgccggtctggacacttcctacaaatggggtcatgcggcgtccctttctgcttcacgtgaagcagcctattggtgaatccttggccccgtggagacctgcatgcgatagatgaatgattccggtgaatgggtgcccctggtgccctggtttgcgttcatcgtctctggaggtgctgtacatattgctgtacttccgcatttttccataaagtgcgccatctttccagggcttcctgctgcttcccagtggctttccctgagtttagtttacagaggaatttattttggggagcgatagtgcatgcagaggggaaggtgttgtgttcagggatggacaggagttgggaggggtttggggctgagtggtgcagttttctgggatcttcagtggctgccattggtgacagagaaagcccctcttaagtacagtccttcaagagccatcttccctggaaaacagaagcgcccttttactttatgagagatgcaacagtcttcaatcattggaaagaaataggttgtattgcattacctctactactgtgctctaagagtagcatgaaatacatcccgtttggtgaccatttgggcttctgcaatgtccgccttcaggagttggcaagcggactcggtggatagcggctgtagcaactgcacccagaccagccctccgtacccagagccctgttgcatgggtatcgactccatcctgggccacccatttgctgctcaggcagggccttacagccccgagaaatttcagccctcgcctcttaaggtaagtagaaaacataggagattgtccggagcccctcaccccaaatattttgccatacgtaccaggtatactgccctggaaggagaggctgtgtgcccccaaattcttcgtgagaagtgtgaggggatgggggaagatgcaccaaaggcaagcagagccgaggctcccggggaggagagccacgtggctgacctgcacacacacacgcagtggcccgggtgttgtggtgtaaaatgggcactgctgttggatttgggggccacagctaaggctgggtttactgtgagccgaggaaaagaagtgaatggcctgagatgtgtaaagggcttgaataggcaccgctgatccattcccaccttcagggacaaagaggctctggagggtttgtgagtcccataggttttggacatttgtagttcctcttccccttttgtgaaatgtagaatagtgctgtccttttgccccttctgctcatctgctcctagctgtactgtcaccctgtctttaggggagaagtctcatgtttatagtgcctgtgaggtcagggaaggcactgtcaatgctgttttgaaactttgtttccccactgttcagctcacaaaagtattttatcaccctcacgcccctgccctcacccagaagcacaaagtgaaatctgcccccggcagcttcccaagctgtgacccacagcaggttcctagttgttgttttggaccaggctgctggtcatggcccttgtccaactttctgagatctcaaaaagcagcagcccaagccagggcgagtggccgtgggagggttttttggtgtttccccttccctcaacttttagttttgaaaaagtgaaatctgcagtaaagttgctagaataatgcaacaaatacctgtacacctcacctggatcccacagttgttagttcttcagcacatttgcattctccctttctgtgtgggcatcacagatacaacaaagttagtatagcgggtgagtaggaaaaaaaaaaaaaaagaacacaaactcccaccctcgagagggaggcgccaaaggagacattgctatcatacgttcatgtcacagagagcaaggcggcttctggagaatgcaatggcagggaagcggacaaacacttgtagagaggtttgcagttttagaaagggttcacatttagaaatgtaaatttatatttacattttacaaacatcaggatgataaaagggtgcaactgctatggaaaacattatggtggttcttcaaagcattaaaaatagaaccaccacaggatcccgcagtcccgcttctgggtatatctgggtgtatatccagaagggttgaaaggatcttgaagaaatatgtgcacacccatgttcatagcagcagcattattcacagtagccaaaaggtggaagcaactaaagtgtccatcatggatgagtggataaagaaaacgtggcctatccatgcaatagaatattattcaaccttaaaatggaaggaaattctgtcacgctgcaacatggatgagctttgaggactcatgctgagtgaataagccagtgtgaatatttatttggtcttcaactctttgagttgcatgttacctggcatgcaactcctaaaatccttagaatctgaaaatctgtcgcccaggctggagtgcagtggcgcgatctcggctcactgcaagctccgcctcccgggttcatgccattctcctgcctcagcctgaaaaaaaatctttttatatgctaatgagttactggtggctggctaagagaatagaaaagcacaaaaagacaaataccgtcgtgaggttcctggagtagtcgaattcacaggggcagaaaatagaatggtggctgccaggagcttggatggggtgcggggatgtgttacagaacggaactggggtccattcgcccggtgcagtaaaaccaggtgtctgcacgaaggtgttttgcactggtggaaagagggcatttatttgcaggtgccaagcaaggagatttgggcagctcacatttaagactcagcctccccatgccttgcagggaagggtttttaaaggcagaggtaaatttcaggaaagcggaagtcacaggcaaaatcctaaaccaatccatggaggttacacgttgcttttggcctagaaggataggatatcttaatgtgggggcttacaggacgtagatggattcaaagattttctgattgcaattggttcaggaggcaaagctttgtctaaaaatttggggtcagcagaaaagatagttagctctgacttgtaggtgtgactccctccagacccctcaggaagagattcagaataaagagcaagggtcagagtgcagtcctcagctcccccttatctgagatctgtgccagcgggtccctttggtgggggtctgggtttctgaaagacagtcggggacatatgttaagatgtctttggtttctttttttcttttctttttttttttgagatggagtctcgctctgtcacccaggccgcagtgcagtggcgtgatctcagctcactgcaacctctgcctcttgggttcaagcaattctcatggctcagcctcccaagtagctgggattacaggcgcccaccaccatgcccagatgaatttttttttttttttaagtagagacggggtttcatcacgttggccaggctggtctccaactcctggcctcaaatgatccacctgccttggcctcccaaagtgctgggattacgggcgtgagccaccgcacctgaccaagatgtctttagtttctctaggcaaccaaacatctccagactctaacttccttggctattgttttaggctactattaccttcttgcttatcaggttacttacttacatctcagggatagcgaggtacctggaatttcccttgaaagaaattgattttcctttatttccatgctcgggaggtctgcaggcccctaaaatggggtctctgctctatctcaggagtgggaatggggagttgtttagtggagaggacagagtctcagatttacaaggtaaagaagttctggagatctgttgcccatcagtgtgaatggacgccactgaactgtgcctgtacaaatggttaatatggtaacttttgttgcgtgtttttttcccacaatattttaaaaaacagggccctgaagggcctcactgagaaggcagtgtttgagtagagatcgtcaaggaagggagctcagagctttgtgcagaagcatgggcaggtgtgggagcagccagtgtgtgttgtggggcggtgctgaggacgaagggagtgtgttgtggggcccactcaggacccttccttttctctgagggcatgagaagctggtgggttttgagcccagtggcaacatgatctgactgtagcttttttgttagtgctttctaaaatttattgagttgaagttcacataaagggaagcattttaaagtgtatgcatcagtggcatttggtccacagtgttgctcacccgccacctctatctagtttcatgacgtttcaatcaccccagagtaaaacccgtccccattgagcagtcactcccattcccctccccctagccacctgcagccaccaaaatctttctagctgtgtggatttacctcttccggatgtttccagaagtggaatcatatactatgtggcctttgccgcatggcttctttcactcagcacgatattttcaaggtttatttacattttagcgtgtataaacactccattggtttttatggctgaatgctattcccttgtgtggataagaccacatcttgttgatccattgatctgtcaatggacatttggggtgtttccacatttggccagttttcctgggatgtccctggttgctgtgttgagaatagatcgaagggcagagaggtgtggaattgggaagactggtgaggcacctactgcactcatccaggcatgagataatggcgactcaggtgaaaggttgctgacaagtgctcaaaacccccttgatcttgaacacagagccagcagggatcgctcttggaccagatatggggtgtgcaaaagagatcggaagtccgggatggccctaacgttctttgcatgaacaaatggaaagttgagatccctgtgagaggaggggccagggtggggttggggagatatcagcctttccattgtggacgtgccacatgtgaaacgccagctaaaccccaagtggagaagtgaaagacatggttgttcccataagtttattgctcacattatgaaagaagccatagtcatgagtgaaccactccctaggttgataaggaaaccaacacggaagatctctttctggaagaagcagccagcctcgtgaaggagcggcccagccgccgggcccgagggtcgccttttgttcggagtggcacgattgtccgttcccagacattctcgcctggagcacgaagccagtatgtttgcagagtaagttggaatccctttgtcacctgtctggaatgttttgtcttccatcccctttgtgattttttttttctgctgttcatactgaaaggcatatgtatttgcaccaataataccaatccatgaactatgaactttataggtatgcggtgatgacattggtgttgtgatctccccgcatgtcctaccatgcttatctgattctggatttgttcaggattcaaattcatcccttcccccagttttcagtgttgtgtatgtattgacctgtggggcaggaagcagggcgaatcatttctacctcagcctaaggaacaagtggaagcaggggccctcttgaatgggttgagctggaggagccgggaacctgagtggcttggagccctgtggggcagccaggtttctgggccagagggtggatggtcctggcaaaggggcagtgggttctcactcacccacatgtaacttcccaacctgtggatgagtgggaggcgctcagcggttctcagccatggctgtgccttgcagtcaaatcatgtcgggggattcaacagatcctggtacccacatagcaccccagagatttgccattggtcacaggtaaggcctgggcgtcagaacttccggaagcacccagatggttctagcatgtcacacaaggctgagaaccccaaggtgggtagagggaagatgcgagccagtgtggtcaatgaaggtaggacagagtgatagtgccagcatggacttgtacagaaagggcttttaaggatgatggctcatgacacagtgacctggaggggccatttggttgagaaccatgacccttcctgcacctctgaattggggctgttgaagaaggcatctgccctggaggtgctcgctccatgagggcagagccaaggcagatcttcggagagggaagggcctcagaccctcaaaggagatgtggcaaacactgtgggagggggcctaggtggccaaaacagcctctcagccatgttggtgagacccgctgctgttgtcccattggtctgaagtgtccctgctggcagctgccccaggtggcgccgcgtccggtccaggccctcccacctgtcacacttcagccccgtggaggctgatgctcaagcgcttggctggacgctctagatggaaggccacgttcaccgccctccttgttccaggctcctgccgagccaccaacgtgtcggctggcggggctgcttattgaggcggggagggtgcaagcaggtagtgttttgcttactcagaggaaatgctctgtgtgcctgcgtaacagctgcacttactggcgatgcttctggatgcttcgctgttctgtatgtttgtatgaacgccgtgcaggtatgctgccaggccgctgcacttcctgaataggtttactggcgtggaaaataaggccacgaaggcagggatgttggatttcacacagattgacactgatcctgaggtgagaccctgccaccaaaatgaaggctgtaatgacttggctcccataaagatgacattctttacttcctgtttaaaagcacgccctgtcctttgatgggcacagctgcagttggcaatgttggcttgtcctactaccagaagtgagtctcttttttggaagtcactttccccagctattgccaaagccacaaatacagcacatgagaaagactgaggaaaagtgaaccgtgctgagggcagcgctagccttcatgggggctgtacagggcacaaaatggcattggtatcgatcacacagagattttgttggctcagttagcctggaaactgggggagggtttcgtttgctttgtttttgttttgttttgttttgtttttttcattttagcagaaactcttctttaaattgaaacccaaagacctgctacaagcaccaataatcataagtgcactcgagggcctgtgaagaggatgaaaataatccattctgagactctgattacacacacacaatgaactgtgcattgctgagaaattgtttctgaacatcattcttttttgtgcagctttatcgtagtgacagcgacagttcaacgctgccccggaagtccccctttgtccgaaatactttggaaagacgaacccttcgctataagcaggtatgtgccctgtaaacaaatatggaatctgtgcttgccctgcgagtgattttacaagccttaaaaaggtaacatttaaggtcatgtaaatgaaaaggtagtatttctatttcttgtttacttaacagatgtaatgtcgtaatgttgctaatatttcttaagatagtatcatgatttcagataatctgtgatctttacattcttcagtataataaataaccatttttatataataggctgttttctctttttttgacaggagagtatatatagtttagaaaagttgagtttttcaacatgttgcttttctgggcagggatcgtttgaataatatatatatatatatatatatatatatatatatatatatatatatatatatatatatagtgtgtgtgtgtgtgtgtgtgtgtgtagagaggaagagagacagacacacaaaaaacccccaatttccacgtggcagttgtgctccaccacatacaagagtggctgctgactgggaagaataagaaagtttataatttgggccgggtgcagtggctcacgcctataatcccaacactttgggaggctgaggcgggcggatcacctgaggtcaggagttcgagaccagcctgtccaaaatggtgaaaccccgtctctactaaaattatgaaaattagccagacatggcagcacgtgcctgtaatctcagctactcagaaggctgaggcaggagaattgcatgaacccgggaggcagaggttgcagtgagcttacgtcatgccactgcactccagcctgggagacagagcaagactccatctcaaaaaaaaaaaaaaagtgcataatttggcttcagaagtgtctctcagcagcaccactgctggcatttcagacaggctcattctttgctgtgggggttgccccgtgcactttaggatgttgagcagtgtccctgggctccacccaccagatgccagtaacaccccatcacatacacagcagttgtgacactcaaaatgtccacagacattgccagctgtcctcccgggggccagattctcctggttgagaaccatgaagctctgctgagaattcagcagtgcttttaaagaatttatatttgttaagttacaacccatatttgcatttaaattctgtgtatgtgcaaaatagcgttgtgtgtgtaaaaagcataccgtgactcaggccactgacccatggtgattggcgaatggatttgtggttttgctgcggtgactgctgtcttagggttctgtttcccattggatgggaagtactgctctcagttccgcagacaagagtcttttccctgtcagggctttcctgagcctaggtatgtttgcttacttgaggcttatatggggagggaagctttggacagcttgcatgtgtgtgtctgcgtgtttgcgtgggagtgtgtatactattttttaaacaacaagcactcgtggtttataacgtactttctttccccttgtacagtggatcattaggatttttccatgtccatatatttttttcaacttgttacaatggctacattttatactggccttgtaatttatttaacgtttcctgctgttatagacttacttttttttttctgtcataaaccttaattggaccacttttgcatgtcagcagttatgcctttcagatgcaagtttgctgtagacatatatatattctcaaatggcccttcagaaagattgttccatttttgatcctgccagccccatataagagcatctgttgctgcacatttctgccaatacataggtcatcattaaagaaaaacaatttgctgttactaaccttgatactgaactagagatttacattcctcttgcccacatctgtgttttttaaccttgggcgtgcttagagaaatacgtgtgcctgacctgtctcctattaattgtggaagaaccttctagaaggcctgagtgagggctcacagctggcgtctcttgcagtcatgcaggtcttccctggctgagctcatggcccgcacctccctggacttggagctggatctccaggcgtcgagaacacggcagaggcagctgaatgaggagctctgcgccctccgtgagctgcggcagcggttggaggacgcccagctccgtggccagactgacctcccaccctgggtgcttcgggacgagcggctccgtggcctgctgcgggaggccgagcggcaggtgggggtcccctgtggccagctcccgcctgcacctcactgctccctgctccaggctctgaagggagcctcccagacacggaggtggtccctgaaataccccaccactgggctcttggagtcccttctccctctgtgggctgcgagggtggcgtctgtgtggcttctgcgtgcatctggaggctgcgggtgctggaggaggggtcacgggccctccccaccttgttgggggaacattctgggtccccagtcgctaggcctgactgcagccaccccctggcctctgtctcctgggaggaattccttggggggagtgtgggtgaggtgggccttactccctcctgtcaccactcactgactgtggttggttcttctgggctccagggttggcagtgaacttactcattcttccttaaaaaaaaaaaaaaaaaaaaaaaaaaatcaataaaatcgtcttgttggtccaacgttgctgttccagacaagacagaccaaacttgactaccgtcatgagcaggcggctgagaagatgctgaagaaggcctccaaggagatctaccagctgcgtgggcagagccacaaagagcccatccaagtgcagacctttaggtatggcggaggcgtggcaaggccggcccctcggccctgcttcctccttactgtcgtgcctttggcatggtaaaaaagtacagtgagtctgtttttgtttttcttctgagacagagtctcactctgtcacccaggctggagtgcagtggtgcgatcttgtctcactgcaccctctgccccctgggctcaagcaagtctcatgcctcaacctcccgagtagctgggattacagatgcgcactactatacccggctaatttttaaatgttagtagactgggttttgccatgttgcccaggctgatctcaaactcctgacctcaaatgatccacctgcctcagcctcccaaagtgctgagattacaggcgtgagcccctgcgtctggccgtgtgagtctgtaaaacccatgggaagttgagaacaaaacaggaatccactgcagccagtagtgtattttcatgtttttatcctgatctttttttcctacagttttttttcatgccacttctaatcataatgcgggttcagtttggcatttagcattttttaaattaaaatattccatattgctatataatgtgctatcttgtttgactgtaatgtctcatctaatagtttactcaaccactatattttataacatgctgctcgtcttcaaatgtttgctattgtaaataacagtgatatacatacacatacatatatgtccccccacccccagacagggtctcactctgtcagccaggctggagtgtggtggctcagtcatggctcattacagccttgacctcccagggtcaagtgatcctcccacctcaccctcccaggtagctgggactgtaggcacatgccaccatgccctgctcatttttgtagagatggggtctcactgtgttgcccaggctgatctcgaactcctgagctcaagcgatccacctgcctcagctgcccaaagttctgggattacaggcatgagtcgctgcacccgaccacctttgctttttcagttaacttttgattaaggcaaaatgtatctgcaggaaagctgcgtatcatacacacatggtccagtgaattgttacaaactcgtcctaagaatcggtcattatcagtgcccccagatcccacactagagtaaccaccaccttgaattctaatagtatagattggttttgtctgtttttgtttttgctgaggggatttttacagatgcatcagtattcttttgtgtctgtaaaaaaaattaagttgaaattcacataacataaaatgacccattttaaagtgaacagttcagcctttggcgcattcacaatgttgcacaaccacccctctgtctagttccagaacatttttaccaccccaaaagtaaaccctatacccattaagcagtcactccccgttctccctcccctagctctgtctctagggatgtgcctttctgcctgtttcataggaatgggatcatatcttacgtggacttttgcatctggcttctttcctgcagctgagggttttcgaggttcatccatgttgtagcctatgtgccagtgtgtccttccttgttaagggcgaataaaatgtgtcttttagccctaatttttgtgtacatttaatattcacatagttttcactttttcattcatttgttaatacgacaggtatttcctgagcacctaatatacaccaggcactgttctaggtactggagatgaagaaacccctgctcttacggttcttcataattaacatttggagactctatacaagcacatgtgttgttggggacttaaattcagtttgttgtatgaataagaaaagccatgattgatatgagagccaccagctttccgtgtcttcatatcagcttctgacctgtaattgtctccggtcccagggagaagatagcattcttcacaaggccaaggatcaacatacctcctctcccagccgacgacgtctgatggagtgcattgtgcacatgaagtatttatccacctgttttattttcatgaagttcttagactagctgaatttgtctttaaaatatttgtgcaaagctattaatatacacattttgtaaaaaaaaaaaaaaaacacgtatatctatacatatatattttataatagtgacggcaacagggcttggtttttccttgttgtgaaatcgacatctctgaagacaggttattttataaaagatcaactatcatgttaagaatgtacagtttttatgctgttttatttgacttaaaggctggaagacagaaacgaagtgagttcaggcaaattcactgtattgtaatttatttatagtacttttttttccttgaaggaaaatactgactttaagatgtattttaagactgaaattttgttctttagtacttttcatgcagtagaacggaacttggggctggtttggtttttgacacctgaaatgcgaacgctatgtgctaaatttgtcaccgtatcatatgtgcatttaccatgtatattgtacacattcactcccttgatgtcatgttaaaatgtcccctgcagtggttcaatcgtgactcggaagcatgtgtgtgttgcagaggtcagtctctggcgtgggccgcacgccaaccgctcatttctgtgttgcctttggaagcatctttctgtgctcagcgtgagtctgaagcaggcgccagggcctctggtgtacggggcttcagcctgcttgcttgtggtggctgtctgtggggcttcagcctgactgtccgtggtggctgtccatgctgc

SEQ ID NO: 7769 - DNA, 19861 bp, Homo sapiens
cccgcccgccgcggcgcttttggctcggggcggcggcgggggcccggccgaggcaataagagcggcggcggcggcagcggcggcagcagctcccgcagctcctgctctggtccgcctcggcccggcggcggccatcagccccctcggcctcggctcgaggggcggggagctgcgcgcgcccctcggtccgaccgacaccctccccttcccgcccgtccgcgcgccccgcggcccgcggcccgcagtccgcccccgcgctccttgccgaggagccgagcccgcgcccggcccgcccgcccggcgctgccccggccctcccggcccgcgtgaggccgcccgcgcccgccgccgccgcagcccggccgcgccccgccgccgccgccgccgccatgggctgcctcgggaacagtaagaccgaggaccagcgcaacgaggagaaggcgcagcgtgaggccaacaaaaagatcgagaagcagctgcagaaggacaagcaggtctaccgggccacgcaccgcctgctgctgctgggtaagggcgggcggggggcgccggccccggcccgggggccctcgaagggcgccccgcaggccgcgcgcgccgagcccgccccccgccccgggcgcgcgctcccgagccccccgcccgttcgcgggctctgtctgtggggggcgaggccggaagggggacccaggggcgcggattcggccgggcgggggctcaaaaacggggcggggggccgtggcgacgcgggcgcgggtccccctcccccggcctgcccgctcagtgtctctctcttgctctcgctctcgctctccccctctttctctctttctctctttttccgcgaggcctacacgacgccaggggtttgggtgcgtgttggggagggggagggggagcccatggggctccggagactgcgacaaaaagagggtttcggggacaggaaaccgggtggcgggtagagggagggggacccgcctccgtggggtgtgagatttgttgggagagggaaagaggggaagaaaggggcgaggagaggagggggtgacgctggggggcgccgtggtggcggagggggcctcgccaaagggaggctttggcggggagaagtggccgaggagagtgggggggctggtgacatcagcccctcggaaaggatcggagcggtaaaggtggtgcagtgggggggagggggcgcaagggagtcgtggcgccggagtcgggaggggggcggcgaggggaggagggagggcggttgccgctgggcgcgacttggtgcgtttcgggcaggaccgactgactgtgtgtgcgcggagcagacgtgtcccgggccaggccgggccgtggaaggaggagaaggagagtcaaataaaataagaccaccccccaacaccaaaaaatggatagagttagtacgagaagtgcccagtgaagccaaatgacacgtcattttacagtgtgacctttttttccccttccagacttgcaggctttttcaaaagcagagcggagaattaattgtagcagctgccccccccacccaccacgagcagcgcccccccaacactattttaataaaccattaaaaaaaacacattttcctgctggctggccacattgagagtgctttgtgaaaagaaaaaacaaagacattcacaaatcagataaaactggagaatgacatttgtctgtaaatggcttcttggtctggaaatggcgtggtttctttttttttttttttttttttttgtcctcctcaaggtgggaggggggattgagagtgctctaaggagacttttcctccaggtgggaagagataaaaagacattaattagttgtttatcaagtgacatttagttgtttggttttgggttttctttttttgattgcgatttttcctctgattaaaaaaataataataaaataaaaaaaggttaactataaggagatggcctttcctccttttttttcttaaggtgctgttttgggggaaaaaaatgtaatgaaatgaccaaaagaattacacagcattaattaaaaatggaagttttccacttccttgataatttggctatctgaataaatttgtgaatttgctaggttaagacctagttcgtggtcacatttcaacaaaacagcttgagtataaagaaaataataaaaggctgttcttatttattttcctttggtggcttttggtttgctctttttgcataggtcatgactttgttctcctgggtccagatttataaaagcagaaaattactaattaagtcaaaataagtgtctttggtgtttatgcatttgcaatttcagtaattaaatggtacatgtgttgctgtcttgtctaaaacttttaaaggcagaattatgctgttgggatattagtatgcgtataacttgatttcaaagtataaatctggaaaagtctagaatcttttctgtgaatgctatctcagtactactttaagtcaagtgtgatgctaatgatatcttaaaatttccaacaccttttgtgcagtgatcacaaagtctccacttaatttgagactgttactcagaacacgccttgcgtcacgggggctaatctaagtgtcctagtctatatgactacattacatcatgatgtattgattgcctctggcctaggaatctgcagcttaagccagtgacacaatattttgcatttttaaatggtgattctcaccaaataatgcctccccacaaaagaggaaacctaataatgccccaaatcctctttttactccatcttaatgacataaaaattaagtgaattagagaactacaatgatcttaaaataatttttcagccacatttcataaatgtggaaactgaggcacggatctgtttttgcctatgaaagataggtcctgtaactgttacacagtttaacacttctgaaattagaatattagagatcctgctaaatattacgtattgtttccttggcctctcttaatagtgccatttatatttttaatttaccagagttaggctcattaagatagtgtttgctttgaaatcaatgtttctgtggaaactaattttaacttttacagatattgattacgggcttgtgaaaaggcaagtaaaggaggaatgctgtgctatctgggcattaaaacaaaacaatacaattaaaagttaaaaagaaagaaaaaggtaataacagatttgtgtggaaggagggcaaaaaaacttcacacgtggattatctgttggagaatgtgcattgcaaaaaagatgcaaaatagcaatcctccctctagcttgatggaaatgtgttttttccatgaaacatatatgtatttttacaaatgaaagatgatttaaaatggaggcatgtgtttctactctttgagttgggaagggcttggaatctttcaaattcagtacttcccagggatagttttccttttgattaaagttttgttcttatgttactttttactgttgtttttgcagtttacctaatgctaatagggtctcaggaactgtatttgatgttaaagtgtggtttttccagaagatgacagataattgatggtctccccttttcctcagcaacatagttgtacccagagggaatttatctttagaaagatatagtttgtgaggaaagaggaggatggataagtggataaaatgtaatgcagttttaggggtggatttttaagtagcccaaggggtaggaaacctgcacagaaagaagctgcgttgtgaaaatgttgaggaggaaagtgctgcatcgctacgtgatgtggaagagactgcagtgtctgggcattgttgggaatcccgggtattttaaccatgaaacatctgacaacaaattatgtgtctagatatgtttatgtgtgaatgttcatgtatcagggattcagtttcacagttttaacttcaattttcttgtttaccccacaaatgacaaaattgcgtcattccttctctttgcccctttccaacaccaccccacaattttttaaacaatcaaaagaaaaattaaaaccagcaaaccttaaattcttgtttgttatttggatggtgaaatactgcaggtagacactgaattggacattgatttccttttctctgcgtcgaaatgtcaaggaaagttgcaagtctgtgattttgtgtttggttttttgcatgttgcttctatggaaaaacaaaacaacaacagcagacctccctgcccaaagtgttaaaatgcctccttcataacctgagacttactttcattttctaggtgctggagaatctggtaaaagcaccattgtgaagcagatgaggatcctgcatgttaatgggtttaatggagagtaagtgtcaaatctgtgcaggggggcaccaagtaagaggaacagactttatactaacctttaggaagtataggtgggctttgggggctgggcagccagttttcacttaatttttcctgatttacatattagaaaatcctgggaagggctctttagggtccctcaccccccacccccttggatctttggtgcaacaaatactactgatgaaagcaccagtgtttgtgacaaacatctccctatcccaagaaaatcgtgcctggttgcaggggacgcttgacagcacttggccccgtgacagcccctctccgggccaggtccctgccacagtcttcggacatcactgcagtgtcttcaacgtggctttggccgccccctcgtccggcccacgctgatcactgcaaattcaccccaccccacctcacgcagatttcaatgtaatgaaccaacacaggatgttttaaactattagggaaacattgtttccataatattctcaccagaaacagatgtggaagtggcagcccgtgtttacagtttctcattttttttgtccccctttaaattaccattatgggtaaatcattgtttccctttaaaacaaaaaacaaatcagtacccctgcctacagaaaagaagagggaacatttatttaaaggatggaaagactgggagttaggcactcccagcctcactgaggggcatttttgcctttgagaagtcctcccaggtatcctggtatagcacaatgtggcaatccgtagtgggaatgaagattaaacaggagagactttgtattagacctgtgagacgagttaggaagccctgcctggcatggggaatgcaaacagggaacattcaataaatcggggaacttgcttttctccccaagaccccagatggggcctacccatcgttctcgtgtaacaaaacgtgtaaaaaaaaaaaaagaaaaagaaaaaacaaaacaaaaaaactaagttgaccagtctgttttcactggtatgagagcattaaccgcactagatttcaagcacctgaaggcactagtttgtaattactagctggttggcacagtcctgttccctttcttaaacttggattcgattgaaaatttaaccttgagttgcttcagcttccatttcaaaaggggagttggagtcaaggtggtagcgtttaattataccaaccaccccccaaaaaaacaaacaaaacaaacaaaaaaacctttactagtcactaagcatccaggaaacaaaggtgaactttttcacctttcagagcaaggcaggcagctccttatagagaattctagaatttgttagatcaaataattgtttagagaaggatgacatcacccatacgaatagtcctgttagttgaggatgctttttctactttaaccctgaattcagaaggattggttgggatgcacagggggcttcttcactcatctgattatgactctcaatgggttatcaacatgcacatacgtgctattgagtaagtcagcatcacttgtcaccaaccaattccgaaattaattcttgacacacccctcgataaagccctgccagcggagactgccatcctgacaataaataaataaccctgagacagacttccaaccatgaatctgtcatttgaagaaaaatcttgcataaattttccccctgcaacttgcaggagtacttacttattcatgagagtagttaagcaaaaataatttgaccatgtatcctctagataaatattttgatgaaaactggacatggctagcatttttcaaagatgcagcagccactgtttaccttagcttgagtcggatggaagctaagtcacctttgaaataaattactgacagcttcattacagattgccctaaaatttaaaaatttttatagaaaggattctcctccctaagcgagccagcctgtaacaccaggcaagggttttaaaccagaacttctcttttctgttttctttttggaaagaggaagcaacattcccagtttgccttctttgcagacaagggcacagatacgttaaatttagcctgtgagagggtttacaggggtattcctcatgggagcctagataccttatttttatctcatccaactgcctccttttttctttttcctcactgcggtattgcaacaaaagctatttccttcttaactaggaattccctatgagacagtgacatctgtccctaaagggtggtctgggtggtacagggttcttcctccctgatcttgcgttttgttagggctcggctgagctattaaatttgccttaactctctgcgggctgccatgctgattacatttttaagagtaagataatactgatttgaccttcagaaatacagaggttggatgcggattttctaactcaaaactaactctgtttcttacatttagtgccaggaacaaaacaaaaacaaaacataaacaccattaacattggttgaactaagctaatcaattaccaaactgtagaatgctgcccttcggccttcaaggaggaattcctactgtttatgaagatcgggtttgggtttttggttttttttttctttttcttttttccgtggtggtggtgggtgggcttttgttctttttgttttttctgtggtggtggtgggtgggcttttgttctttgaaattttttttgctacatcacagtccagacatagtttaatgacaatttatggggaacaattatttataaataaaaccattttataggtagtttccttccactgcaagaagtgaggtcattagttttgcaggaaatcctgggcagaaatctcccccgtttatgcctttatgccttaagttacaaccttgggaagattctgacctgggagaattaggagccttatgcgctgccatattctccaaagaattgtgagataaatcactgctttagctccctaatgcgtgtacgtttagtgaaagcacaagaaaacaattatccatccctcctgtctccgaccagagtctccagagagctctgttaatactgcagcaaaggtgtgggattcttcccccatggcctgcagtctcagtggatgttccaatttagccagaaaggcgacctaagaattgccgggaggatggatggctggcgcgcgaattgttgcttttgctcttggctgatggttgaggaatgtagagagactgtgtggggtttgtgtgacactgcggtgccttgcagattaggtgagctttcaatctctctttaaaaggggcggcgaagaggacccgcaggctgcaaggagcaacagcgatgggtaggcacattcaaaaccagaaaaaattgttaacaaaccaaacaaacatgaagatcatactgggaaactgaggccagagacccgggaagaaaataaaaatcatttaaaggaccatcagccatattggcatacatttgtgaataacacacaatttcctgacattttggagcaagtaaagtgcgtaacataaatttttttggccatgcttaaagtagaatgagatccagctgggggaaagttatagatttcagccttggatgatcagtttaggattttgagaattgatgtttttccatatggtttctgttttcccccagctctccatttgaaccagctgcttgttttaaaactatctactaaattccatctacccactggttggtctgattttaaaatttcagacctctttgaaacaaaatttgtttcctttattaaaatatgcaatgctgcaccgtctttaattttgaaaaacgccttggtaccttgcagcaggtcgttaagaatcatctcgaaaagcctctggccttttaaaaatgatcaaatttatttgaatcaaaggcactttacgttagcttggtggataaggaaattcatgatggcatcttttatttttccattcattatcaaattattttttctttgcttcctgcatccccacacccatcacacacacacacacgcacacacatgcacatgcatacacagacacgcacacacatcacacgcacacacagccacacgcgccgcgcacacacacacgcatgccaggtaaccactctagctctgctgtgtatttagcatgcagtggtggagtggctatttctcatgagaccatccagaaccattgacttagtttagggcatctcaaagaaacagcttctgtggccggggaggggaggggcaaagatattggggtctggggacaaagtaactgacacatgtttgttcatctgtttcttttagaatataatatccctagatgatggctacagtttctcatcttcccggctatgtcctatcacaatttgcatgctggaattgctcggtcttaggaacttctaataagaatactattctgttatctgaggggggaggggggatggggcccctgctacctgaccttaaacgatgattgaaaaaacgaaaaatgaactgaaatccttaattggcagaaatgtagtatgacaactatccaaaaaggcatctctataagaaatgactaattgacaatctgctgtaccaaaagttggcatttgagcaagatatgacaagtccttagtgagcaacctactgtgtactagatgtcctgctaaacccttgaaccctactaataccttggcctgcacgtctctctcactctgttctgcaagtcaatataagtattaacattcgtgataaataaaaattctctgcatgtttcagcaatccctgtatctcgcgtctgtcttctgtcttccttcctttgtctgtcttttcccaccaaagcacaaggattaaggtggagacctgaatagcttcccccaccacttagttagctgaagcggggggaggggaggagctcttaaaaactgaacgcatcccatctgctgtatacatagaagggggaggaggaggaaccaagaccctaaaagtacttccagccttagtcccaattttgtagcgaatcagaattctagctaatggcatatgttttgcctttgttgagtagtttaaagacatctaaggaattttctctgaatttcacaatcaacgttaaattcattaagcaatagtaaaagtgatgataaacccgccaacccccagtataatatctccatctacatagtaattgcttcaatggaagaattttatgttttagtattacacacccgaattagattttagatttctattttagctgttttatacttgatatactcccacacctattcacatacgtagatgaatactgaacacgttctcaaaatatccgtattttaagacgggaagttttccaattatcatactactgcttagaccaaaatatcaaactgaatgaaagaaacttgtttctggaaatactttctcttgctgtatgcagatttggatatttagtacccgaatgtatttaattttactattgtggaacctcaaaaccaaaggttaatagctttcattacctgtgaagtggagcctgcttttaatgaatgggaatagatttgccctagggggttttgggtaaattctgaattcaaaagtgaacattggggaccatcaaacacatgtccttttaatttataacatctaaataatcgatgttagactgtaataccaaggccggggattcttaatttcagaaatgagctttgattctgcacatacaaagcagacagtcgcacagagcggtcaggactcactccctttcactctaaggtggttgctttaagagtctgggggccagaatcagatttcagatttgtacacaaggcctgaagctcgctcacctccctgtcatctgtgtttctgagattctccggacctgcagcacttttacttaaatggccctgaggggattcctggcaacatctgtcccccctccccaccccagacaccccccaccactaatgagcgtggcccctctgaacttccccagctcttcacccaatgtagaagagcagtggtgcagtgacctgtgaaaggggcttcacgtaggaagggggcgagatgggatccttcagcaggtgaaggcccagaagtacacagacatttattcagaaagaataaatttgtaagtataattctttgagaaaggaaagaccaaatgatttgtggaaggcctgtcgacaggcccgcacttgaccccaccgtccgtccccgccccccacccctgctgctccactgactgccctgccctgctcgtctgctcgtctgctcttgctaattaacctcccttcgcctttcctctgccttaactgtcgtgttctagtctggagagattatatgttttaatttctactccagtctatgaattggtgaatcagccaagtgaatgcttcaaaaactgggactctcaaaagattaaaaaatatatatatacaaaccgtgaaaaagataaactctgtcccctccatctcccattggtttctgcctcggtgactccccccctcttggcctcagtttccctgtcagagaggcaggaccgtagcaccttttttccgcatgacaacgccctcacctcccagggcctaacaggtacagcaggtgtgctgtgtgtgctggttccatttttgggctatagacctgatgagatacatactccacacaagaggccttttcttgccctctaaaaacataaactcgagaaccttccctggctgtgcttctaatgaaggctagtttctgaaaaacatacagcatttggatcagtgtaatgtggtacaaaaattaacattctgttatggtccccagaagccaaagggtgtgtcctttacctgtgggaccagtgaccctgaatatagatcattccataaagaccacgcaggccatcccatgtggctgagttaaactcaaggaaaagctacaaaaccttcaacctctacttaccagagggatctgacctcccctcccccttagattataaggccttctagggggtggaatcttatttgattcctattgcacatggaccaacatgcactaacatcatgaactagaagtttcattgctgctagctgcaggtgcctggagcatcgcacatacgacttttttttttttttttttttttttttttgacagagtctcactctcgccctggctggagtgcagtggtgccatctcagcttactgcaacctccgcctcccgggttcaagcaattctcctgcctcagcctccctagtagctgggattacaggtgcatgccaccatgcccagctagtttttttgtgtgtttttagtagagacggggtttcaccatgttggccagactggtctccaactcctgacctcaggcagtctgcccgcctcagcctcccaaagtgctgggattacaggtgtgagccaccgcacccgggctcctgtaatgaactattataaacaccaccacctgtgctcactggttctctcagtatgctagcaactgagttaattccaagtcaaaccatgggactgttttgttccaccccaacctcatagtgacctatcactccagcctcacccctacccagatgttgataggaccaggagaagcctttaggaagtgttagtatgtagtgtgggggcttcaaacccatgaaagattaaatgagctgcatgcaacttctggtacagtcatgattgctaaggcaatttgctaatctgccccgattgggcgtgtcctcagggcacatttgggaggttataatttgcaactatgtttattcagctacctccaatctttgcacagatccgaacccacaactccctgaagaacagaatactatgctttttagtcgggatgtctttatgaaagcagtactcctaactgacatggtgcaatatgattttcttttcttttcaatcccactgcagtgagaaggcaaccaaagtgcaggacatcaaaaacaacctgaaagaggcgattgaagtacgtgctggctccttgtgctgtctgtcttgtagcgccctcccagccagtgctgttccctgaccgctttgctaaatcattttcagaccattgtggccgccatgagcaacctggtgccccccgtggagctggccaaccccgagaaccagttcagagtggactacatcctgagtgtgatgaacgtgcctgactttgacttccctcccgtaagctacaccccgacttgtgtggccttagccccgcccacctgagcacagtgtccatataggaacatgagtgacagccctgcacatgggcaggagcatccaaaccacacttcaggcaaaactacatttcagtgatgtccatccttaggaaaaagttaatttcatgtgtaaccttaatttaataataataatcattagggctttgttcaagatggatgagcaaaattctgtcaccccttctacatcttagctcacctgtcctcacaaataaacatcactcttgaatactacaatctcactttattagattgtaaatttttatgaggaaaaaggtcctgagctatggcaggcttaattattccctcattcacatcttaggacaaaactgtatgttaaatatggcacacaaatactaattgtccatttactccactggaagtgccctaaggtaccttgggatgcctcagtgaagtgccaaatggaagacattctcattttaaacaggtgacctttttattaagagttttctaaagtccttggggcaaatgaaatcttttctcattattaaaaaaaatgaaatatatctaaatcataactcaaaaatcataaaatagaacatatggaaaagactttcctctggatgcacgacactgttggctccctaaagaactacttttagggaacaaaaaactgttcaagcccaagcatataagtttaggccccttcgtggggagaatggcttataagcggggaacgggaaacgagatggaaagatgtatgcgtttgtaagacccacagggaagagacttgtctacagctaaaacaatgagttattgttgccttttgtcaggctttcgtgggaatttgtgtttgtatattttagatggacttggctgcaaacttaaattggagaaatttagtggtatatagttagtatggatagctaaactttttaaatagcattattttgaaaaaaaagcaataaacacaatatgtataatataacccactgactttcttgaaatatgattctatatttaataggaaaaggaaacagcagcctattaaaaatgtatcagaacaataactttttattagtcctactaacatctgaacttttatgttcctacctacaagtcccccatcatcattttttttggtaagattcacattttcccaggaggaaaatttagtcccagcacatcttacaaatgaagtttcttattttcacaacattgaaccatttattggcatattctaacacatttagtgtatattcttcctaaacaattctgtgaagaaactaaattactcagtagcttaccccattccccctacacacgagaaaagaaactacccaaaaccagtaattcacaataagacccagcagctaattgcgtgaacttttgaatatgtttaacgtgttgaattaaagttctttgtgagcattaattcattaattgggctcaaaattcaaaatcacaccaagtgtcggtcacatagggaactctggtctcagggtttgaatgacagtgttgttgattagttcaagctcttgcctttctctaaactttcttgtgttcactttcaggaattctatgagcatgccaaggctctgtgggaggatgaaggagtgcgtgcctgctacgaacgctccaacgagtaccagctgattgactgtgcccagtagtaagtaaccgccacccaacccatcagcacataaaacagacaaaaacaagaaaacatgaaaacctgtgatcctgctttgaaagttacttgttgatgattcctttcttagaagccaaccagttaccccactggcagaaagttctaatctgattcaattgtttatttataaagtccttaattgcattttttttcttttagtgcagcgacattattttacataaacatttaaagcctgttagagcaaaatgatgatgagtttcatagtattcctaattagtaggaagtaattaattgaattgaccctaagcatttagggaaatagggctgtgctcacattttgaataatgtaaaaatactatattttattgctgtaattttaaaacataacaaagaggaatggtgaagacatagctacgcctcctctctccttggtagttgttgattgatctatttctgctctcaggtaagcgactctagtagctgcctagtgttactagatcctagtgactctaggtagagtttgtttttgtgttgtcttgacttttgaactctatttcatatccttatttattccttctcaccgggtcttgattcaaggatggtaagtggtcaatggattttaaatcctaaactgtacacctaagcagtacaataccgtggtggggttattttcaaataaaacaaattactacctgcgaggaggacaggttaaggcctgcagtagcaatgggaaaagcatctttctccaaagtcactcataaaggtgggctcacctggttggtgtgttggcaaatgaagaagggggaacttaaaacacagactttattgcacaactctacctgatgcccaggctgcttcccttgctgcctaacacctgacttaccattgcctcagggatcgccctctgtccctgtcacccaccatggtctctcccagaggacatcgtacccgatagctagaaagttgcctttgaaatagtttatggcttccctcatcttgcacatgatatagcaagcatgtggtggtcagggttatttaaaaaatatgtaaacattattattatttttttgaaacggagtctcactctgtcacccaggctggagtgcagtggtgcgaccttggctcactgcaacctctgcctcctgggttcaagtgattctcctgcctcagcctcccgagtagctgggactacaggtgcctgccgccacaaccagctaatttttgtatttttagtagagatggggtttcaccatattggccaggctggtctcgaactcctgaccttgtgatccacctgcctcggcctcccaaagtgctgggattacaggcatgagccaccgtgcccagccaaaaatgtaaagatatcttctgtttgttgatgctgcagaaatgcacaaagcagtctcagttaatgatattctgaagtaggagtgtcctgtgacttggggcaggggagtctagtagaggtttgatgttttagccatccttattacaagtagctgaaactcggaactgattttgctataggaagtattagctaatcagaaccaaggtgccaggctgactcaccaagggctaagattgctttacttagtagcctcaagcccaaggaactgattgtgaaaaccacctgaataaacaggagggaggaagaggtaatactgttcatctataaatcatataagcctctgttagggtctgcgcaatctatcaaccccagccctgccttcccataggaaattcctttattttcaattgccacatacatagatattccacggtttaatatacaagcaaatgtgtatattttttcaaggaacagaaaaaaacagtccatcttggctggtccctatggcccccagcccccactccttcttcaacaaagtccctgattttctcaaaagttcgaaccaaaagctggaagcgctaattatagtaacgcaaaacaaatggaaatcctggaattgtttgcattttgtattttggatccaagtcagaagttaagtacaggtacaagattaagagagtttaaccaccccagttttgaatgctgggggggcagggagacccagtttcgttaattaacagtagcttagccagattgttgaattttgtcgggtttcgttttctctctcaaatcatttagaagtttttggggtttttttaagcaacacttaattactcctgaaactttgtctgaaaacgcaccatttgtatagatcatgaaaagttttaaggaaactcagagaaaaagagaacaacgcagcttaaaacttttaaaatgtcctccctcacccgtggctcaaacagccctgcatctgccgtggccggcacgtttctggttgaactgcctttatgttaaagttcagatactggtagtgtgcccatttcttaagctgtctatttttatttgttgagctggggtttggctggctccactccagatgtctctctcacaagatttggtgctgatgatctatttatagaactgtggttctgttgccatggtaacatgctggaggccagggcggctggggagctatttctggactggtgctgtaatgtaagattgattgggcaagttagtatatcctctaagccagactaactctgaactagtaaaaaggaagaggggaacagaaaacttaggcagtttctttaaataaacttttctctctttatgattttcttttctcgttagcccgctttaaaacaattccaatctctacatgcccctccctccaaaaaataactggttttaacattaattttccatattaattaccccaatctttcaaaagtaaattttcctgtgtgtctagtcaagcaacacaaacaagatgctttttttaatgaaaagcgtaatatctggagtgttctatttcatggaccaaacagaacggaagagaactttgtgtttgtttcctgttcaggatggctagggcgagaagggcccctttgtgccaacctcttttgttctctttaatcaatgagattcttaaaaagtaaaaaggaagggatacagattctcagtaactaaaacaatctcgtgtgcccttgaggggaaagtccttgatgtttttaagaatgtcactttattgttttttaactgaatgatatagaggtatacaattttcaaactgtttgccattttaatcaagcaatttgaaaattaaaatgtttttgtcaggcattaccaaatggcacagaatgtgataggccagcctggttttggggtcctttctctactggttgatatgcataaaaccttctaaaaatcaagaatattgccagagagcaacaggaataaagaagctaagtaaagaataaaaaagaaaaatagaaaaaataaaaataaacacgaagaacaaagccccaccaccgtgctgtgctgtttgtgtggccccactgcgtcgaggccacaggctagctgctagacgcatctagagttccctgattcctaaaattatttatcttaaatcctgtttgccctaaccttcttaaggcatcagctttgagttacaaatgtaaccaacacacaagcaaatgtgccattgacttagtgctgcataactgtgggacggtcacttccgttgagcctgaccttgtagagagacacaaatagttggcaaattgatgtgagcgctgtgaacaccccacgtgtctttctttttctcccagcttcctggacaagatcgacgtgatcaagcaggctgactatgtgccgagcgatcaggtgtgcaaaacccctccccaccagaggactctgagccctctttccaaactactccagacctttgctttagattggcaattattactgtttcggttggctttggtgagatccattgacctcaattttgtttcaggacctgcttcgctgccgtgtcctgacttctggaatctttgagaccaagttccaggtggacaaagtcaacttccagtaagccaactgttacctttttatataacagagatcatggtttcttgacattcaccccagtccctctggaataaccagctgtcctcctccccaccagcatgtttgacgtgggtggccagcgcgatgaacgccgcaagtggatccagtgcttcaacggtaggatgctgtgggcttggctgttcgtaaagaacgctttgcttctgtgttgttagggatcagggtcgctgctcacgctcttggctttgctctctttggttaagatgtgactgccatcatcttcgtggtggccagcagcagctacaacatggtcatccgggaggacaaccagaccaaccgcctgcaggaggctctgaacctcttcaagagcatctggaacaacaggtttgtggagtgaccgcccaccccctgcgcttgcccaggaggccctggtctgcactgtttatagagaagaaccccgtgcaagcattccagacccctggccgaaagcgcgcttctcccaagcattcacacggcctcccttcttgtagatggctgcgcaccatctctgtgatcctgttcctcaacaagcaagatctgctcgctgagaaagtccttgctgggaaatcgaagattgaggactactttccagaatttgctcgctacactactcctgaggatggtgtgtatggcttccactcttgctggctgttcattgcggtggttctttttcaaacggtcaggctgaaaacccccatccccctcccaccaccaaaccataaaggatctataagagaagcaagaaaaacgcactcccactaattctcatatggaaaaatcagggttttgaagacttcaggagctacagagatgctagcaccccagctctgcttgaattttaaattacattaatatgtattccctttttatatagctactcccgagcccggagaggacccacgcgtgacccgggccaagtacttcattcgagatgagtttctggtgagtcgagcctgtctttagtttcctctcttgttcctcctctttttctcatggatgtaaatttacttaattccaaattcaggggttcagctacccagttccatggttttagttcacgcacatccagtgtggatttgagctctttgcgcccctctttttgcttttgttttcatatgacatcagaggctggctgacagccgtccctggtaggtgtccccatcagggatagggtggttcctggcgagggtgtcactgacaagtccccttgtttgtgcccgcagaggatcagcactgccagtggagatgggcgtcactactgctaccctcatttcacctgcgctgtggacactgagaacatccgccgtgtgttcaacgactgccgtgacatcattcagcgcatgcaccttcgtcagtacgagctgctctaagaagggaacccccaaatttaattaaagccttaagcacaattaattaaaagtgaaacgtaattgtacaagcagttaatcacccaccatagggcatgattaacaaagcaacctttcccttcccccgagtgattttgcgaaacccccttttcccttcagcttgcttagatgttccaaatttagaaagcttaaggcggcctacagaaaaaggaaaaaaggccacaaaagttccctctcactttcagtaaaaataaataaaacagcagcagcaaacaaataaaatgaaataaaagaaacaaatgaaataaatattgtgttgtgcagcattaaaaaaaatcaaaataaaaattaaatgtgagcaaagaatgatg

SEQ ID NO: 7770 - DNA, 926 bp, Homo sapiens
ttgcatgtactcaatacatttactccaagattcttctgacaagggacacttttagccaattccccaatagctctcatcattataggattaaaaaactaggcctcctgtgaatttaaaaatagattaaaatactccctggtactcagatgtgttcccactagctaattccagcattggtcaacatggatcttgtttgaagctaacccagtttaaatattccttttgcaaaacagatttttagagctatgccttgctaaagattcttccaaatagtaatctctcctggcacaggagctaaccactgcccaggtctctaggctcatctcctgctgtacactccacattcactcttccttccattagcactacttgcagttccccaaacatggcatgcctctatttttgcctgcatacttcctgtgaatgctatttctttatctagaagattctctccccacccccacctgccttatctggcatcttcagtgattcctgtgtctctttgagatccaatttaattgatagttcctttaggaatcattcctatacttcccaaactaagataaatgccccttcttatgcccatatccatctgggattttgccttccttcatactttatatccaatacaccaaaatctcttgttggctctaccttcaaaatagatccagaatctgatgacttatcatcttctcaactgctaccaccctggtccataccaccatctctagcctacatttctgtgatagcctcctagttgatttattcttacctacttcaacctagcctccacaatctattctctacatgatagccaggatgcccttttaaaatctaagtcaaagtccttcctctactcagaaccacttgagttcccttgtttcactcatagtgaaagtcaacagccttacaatgtcctgcacacc

SEQ ID NO: 7771 - DNA, 1163 bp, Homo sapiens
agctatttctgagccacatttaaaaggcatggttctataagctatgggcttttcttttttttttctttttttcttacctccttttgcagttttcccagatctgcaccttctgaagagcaaatgcaccttcctgggtttgtccaaatgcagatcatttatgctctcttatcacacacccacagaatgccgctctcataccgcaaaagcactggcttgccacattgtcatgtagtctcccagagacctgtctatttctagttgtgttttgtgaggcaggcaggagagtctcctgtgattacttcctctgatccttaaataaatctttctggttgtttttttctggggcgcttttctccgattctcagagggagcacagaccccaagaaaggataagaacttctggtctctcccagcttgtgctcctcagagctcatggtttccttgctaccaacaccaaggaaatatcaaaaggatatttaaagaatcataggtgcaaactgattagaagtttggcaaaaagagaggtacctgaagggccaaaaatctgccactttgaaaaccaacacacagggcacttggataggtttctctctgttgccagagtgccaaagaagatttttcagctaaaagaatagccgggctctgatcaagaggacagaataataaaaagggtttgattagaggcaggatataggaagaaaacccagtgtgggtgggtatctagtaaatgaaaggccaggaaggcgatggggcctgacttttccatctcagctgagcctagggcaaggaagagacttagggacttctttttttttttttgagacagagtctcgcactgtcgtacggactggagtgcaatggcacaatctcggctcactgcaacctccgcctcccaggttcaagcgattctccttgcctcagcctcccaagtagctgggattacaggctcccaccaccacgccctgctaattttttttgtctttttagtagagatggggttttactatgctggccaggttggtctcaaactcctgacctcgtgatccgcccacctcagcctcccaaagtgctgggattacaggcatgagccactgcgcccggccttagggacttctaataaaagacttagggacttctaataaaaattgaaagaaaaaaaaaaa

SEQ ID NO: 7772 - DNA, 534 bp, Homo sapiens
tgaaaggatcacttgagcccaggagctggaggctgcagtgagctatgatcgcagcactgcactctagcctgggtgaccgaacaagacctcgtctctttaaaaaaaaaaaaagaattctgggattacaacaggagcccaaggctagaataatgtatcaaaggaaacaggagatctccccgaatctggagaccttcaaaagagagcacttatttacttaggatgagtgaagtggaggcatttaacaactaaggagtctattgtgcaaaaaaccttttccttatctgagcacaaaacaacactgtgggctttagtgaatgtggatcattaggacaccttgcactccccagagtgggtctccccctgcatacactgacatagccccagccaaaacaagcagccttttcactcagcagtggtctgagaactacaccgttaatttcatgtaagcttctgcaaccatcagtacccacagctgagctgctgaccaggaaaacagtggctccttcatcacacagatgcagacactcagtgaat

SEQ ID NO: 7773 - DNA, 307 bp, Homo sapiens
gccgggcgcagtggctcacgcctgtaatcccagcactttgggaggccgaggcgggcagatcacgaggtcaggagatcgagaccatcctggctaacacggtgaaaccccgtctctactaaataatacaaaaaattagccgggcatggtggcaggcacctgtagtcccagctactcaggaggctgaggcaggagaatggcatgaacctgggaggcggagtttgcagtgagccgagatcgcaccactgcactccagcctgggggacagagcgagactccgtctcggaaaaaaaaaaaaaagaaagaaaga

SEQ ID NO: 7774 - DNA, 1558 bp, Homo sapiens
gtagaattattgtataaattatagaaacatatatatagttaaattcaagtctgaatctgacctttatgactataaattgatacgctcaaaatttcaaaattatacttctttgacccacacaatggtagtagcttatgggagagtgtttatgttgtatttaagcttgcttttcaatttttaccaaattaagggaagcaaaaatattaatttataactctaaattattaattctgagtgataaaaaagattgttttgaaatccacaaaatttaatttgttcaacattatggccgctttaaaacatacagtagagttgaagttattttacagtaaacagttatatacccatcaccttgattttactactaacattttaccatacttgttggttaatacctatccttcattaatctttccaaccacccatcaatgcatcttatatctgatgcattttaacataagttaacaatattgaatagccaaaatgccaaatttaaaatatttagaaaaacataggtctattttaaataccctgcaataatggccaaaagtcacatgaattctgtacaagttctagccacatacatatgtatccagaaaacaaaagcaaatcctacatattttatatttcagtcgaatgtatcagccagggtctgatcagaaaaacagaaactactgtgagtggttccaaaagaccaaaatattaccgtaagatttttattgattattttatcttggctgactgtagagtctctcatttttctgttcatttttattaatagaactgaaatattagggggctctaatatttgaaaggaaaataattagagtgctgagttctctgtctttttggccttgaatcctttcctatctccttcctgctttactctgtagagcagcgaaactgatccctgtaggctgtctcactgacacttaagtcaataagaagtctaaaaataatttgatatattgaattaatgcagtcaaagactatatttccaatttaattttgcagactcataagcaatttatcaatcctgctgatacggtttggatctgtgtccccaccaaatctcactttgaaatatattccccaatgttggaagtgggtactggtgggagataattggatcatggggacagatttctcatgaatggtttagtaccatccccttggtgctatttttgcaaaagtgagtgacttatgagatctagtcatttaaaaaagtgtagtacttccctccctctcctctctctctctctctctctctttctcgctcctgttcttgccatgtgacatgcctgctccctctttgtcttccaccatgattggaaacttcctgaagtctccccagaagcagatgttgctatacttcctgtagggcttgcagatccaagagtcacttactcctctttttcttatggattacctcatctccagtatttctttatagcagagcaagaacagcctaatacacctgccaaaccagaataaactgtgcttgtccaataactcctgtatcccgtagcttgaaataaatcaccaaaaaaatctaaaa

SEQ ID NO: 7775 - DNA, 1558 bp, Homo sapiens
gtagaattattatataaattatagaaacatatatatagttaaattcaagtctgaatctgacctttatgactataaattgatacgctcaaaatttcaaaattatacttctttgacccacacaatggtagtagcttatgggagagtgtttatgttgtatttaagcttgcttttcaatttttaccaaattaagggaagcaaaaatattaatttataactctaaattattaattctgagtgataaaaaagattgttttgaaatccacaaaatttaatttgttcaacattatggccgctttaaaacatacagtagagttgaagttattttacagtaaacagttatatacccatcaccttgattttactactaacattttaccatacttgttggttaatacctatccttcattaatctttccaaccacccatcaatgcatcttatatctgatgcattttaacataagttaacaatattgaatagccaaaatgccaaatttaaaatatttagaaaaacataggtctattttaaataccctgcaataatggccaaaagtcacatgaattctgtacaagttctagccacatacatatgtatccagaaaacaaaagcaaatcctacatattttatatttcagtcgaatgtatcagccagggtctgatcagaaaaacagaaactactctgagtggttccaaaagaccaaaatattaccgtaagatttttattgattattttatcttggctgactgtagagtctctcatttttctgttcatttttattaatagaactgaaatattagggggctctaatatttgaaaggaaaataattagagtgctgagttctctgtctttttggccttgaatcctttcctatctccttcctgctttactctgtagagcagcgaaactgatccctgtaggctgtctcactgacacttaagtcaataagaagtctaaaaataatttgatatattgaattaatgcagtcaaagactatatttccaatttaattttgcagactcataagcaatttatcaatcctgctgatacggtttggatctgtgtccccaccaaatctcactttgaaatatattccccaatgttggaagtgggtactggtgggagataattggatcatggggacagatttctcatgaatggtttagtaccatccccttggtgctatttttgcaaaagtgagtgacttatgagatctagtcatttaaaaaagtgtagtacttccctccctctcctctctctctctctctctctctttctcgctcctgttcttgctatgtgacatgcctgctccctctttgtcttccaccatgattggaaacttcctgaagtctccccagaagcagatgttgctatacttcctgtagggcttgcagatccaagagtcacttactcctctttttcttatggattacctcatctccagtatttctttatagcagagcaagaacagcctaatacacctgccaaaccagaataaactgtgcttgtccaataactcctgtatcccgtagcttgaaataaatcaccaaaaaaatctaaaa

SEQ ID NO: 7776 - DNA, 101 bp, Homo sapiens
aaaattagctgggcatggtggcgggcgcctgtaatcccagctactcaggaggctgaggcaggagaattgcttgaatccgggaggcggaggttgcagtgagc

SEQ ID NO: 7777 - DNA, 295 bp, Homo sapiens
attattttattctttattatacttcaagttctagggtacatgtgcacaacgtgcaggtttgttacatatgtatacatgtgccatgttggtttgctgcacccgttaactcatcatttacattaggtatatctcctaatgctatccctcccccctccccccaccctacgacaggccccggtgtgtgatgttccccttcttgtgtccaagtgttctcattgttcaattcccacctgtgagtgagaacatgcggtgtttggctttttgtccttgcgatagtttgctgagaatgatggtt

SEQ ID NO: 7778 - DNA, 101 bp, Homo sapiens; identical to SEQ ID NO: 7776

SEQ ID NO: 7779 - DNA, 17861 bp, Homo sapiens
aatgtgtttaagattgaggacaaaattggagaaggtaatctggggatatgcttttactatttttacgaggtcttttttccattctattttccttttttagtcttggttttcattactatttcttattgaaaaatataccactttttagactattaagaccatagttttattactaattatggtaacagcttttctttttcaaccttaaagaaagaataaataataaatatttactgtaaaatgaagtcctgttttaatgtattatgccattgaaacagtttttacaatctatcttagaattgtttcattaacatttttaaaaaccagatattgaaaaatttaataaattgttttacaggcactttcagctctgtttatttggccacagcacagttacaagtaggacctgaagagaaaattgctctaaaacacttgattccaacaagtcatcctataagaattgcagctgaacttcagtgcctaacagtggctgggtaggcaatttaaacatattttaattgaacttgtatataatttataagattttaaagtagatatttagcagggatgaggggattatatgtgaattaaatacatttttcagtcaagtgtttgcaatttgctagcactttccttctaaccttgcaatagttagttaaatttatagtaattcttttagattggatttcccttgaggctcgacctgatttcctgtcttttatcactgctttttgtaaccttcctgccaaatcataaaccttggctttcatggtttacattattttgtaaatgtagggaactcacatttcacatttccccagctattgacgacctcatctaatattttatttagaataacagaatcatctggtatggtttctctctgctaggtcatttctgtcaacatatggacatgatttagaatcttaccctcctaaactgccctccttcttccacctgctccatcatttctttgttcccccttacagccagacttctcaaaaattatctgcatacattgttttcattccacacctctctttcactaaatacctattgcggctgttcttctctatgctaaactggaaactatagagtcaatcattactctaggcatcatttaacacaattgacgtgaacccttgtcttgacttctgtcctgccacaccctccttgttttcttcttccctcatttggcctttcattttcagtgtctttgctagctcttccacttctatctgacccctaaatattggagttcctcgtgcttgctcttaggtttctctgtattcttagtgtcctccatttccacatgatctaaagtaatgattcccaaaagtatatagttaatctcagaccttttatcttaactacaggtttgtgtatatccacctgcctatttaacatttccacttggtgcctgataaatatctcaaacctaaaagacaaacctaaaccttaacataccaaaaaaaaaaaaaaaaacaccacaacaaatgttcttatccacccgtctctgcaaatggcccatctacacacttgtttgggccagaaacctagaaatcatcctcattttctctatttctctcctaaaccacattaatcactaagtcctagccattttggctctaaagtatatctagaagttcatccatgtctttctgtcttctctgccactacctcagatgaagcctagactacgactgtagcctgcttcttccttctccccttaattctgtctttacacagcagccagaatgatctttaaaatataaaatatatatgtatataacttaaattgggtcattagttccaccacttaaaatctttcagtggtttccctatgtactttgaaaaaaaaattcaaccttctcatgcctatcttcccacctccctcactgtgctccatttctttagtttatcaaatttgtctcaagagctttcttacctcagggccactgcccagactgtttccccattcaggaagacctctcccagtcattgcttgctgacccttcatcttctgatctgagcaagagtgaaactggacgcagtagttcatgcttgtaatcccagcactttgggaggattgcttgaggccaggagtttgagacctgcctgggcaacctagcaagaacccatctttacaaaaaacttaaaaattatccaggcaaggtggcacacatctgtagtcccagctacttgggaggctgaggtaggaggatcgcttgagcccaggagtttgaggctgtaatgacctgcgatcactccattgcactccatccagcctggtcaacaaaacaagaccctgcctctgagaaaaaaaaaaaagagtgacattgcttgaaagatgtcttctctgaattaaattagattctcctatttttttttattgtcatagcatctttagatttctttcaaagcccttatcgtattctgtcattataagttaccttgttattatctgtattgtccactagatagtaaactccatgaggacagaaattctgtaaattttattcactattgcatcactaatgtctataatccctaacagcaaataacagtgccaactaaatactgaatgaatgaataagcctgtttgtttcagccttctgtgtattatagaagacaagaaaatgagatggcctctataaagaatgcttgcatacattcttgtaccctaaatatgatcatttctttttctatatttttaactgtctccctctaccactttttctttttctgtgcttaaaaaagtacatgctaaaaatgccttcatctgatcttacaatgcagtcaggcaaattgtcttcaggctcagcttccattgtgttatattttccttccttctgttttgtttcttcctttccacttaaattgctgtcttaaaaattaccagttaattattctttgcctaactaaaagccttccctcagttgttattctctttgacttccatgctaataactcttccttcaaaattcctttcttatttggctctctaacttggcttcttccaagctcagttttcttttctcgctattaattttcatgtctgtaggtatcacttctctgcaggtactctcactgacttctcacttgtcttctcacttaaggcttagtcccttgtctagataactctatcaaaatgatgaggtctggttttagatgcttcttttactggcttctctactcattttttggtatctctattgttttcttactcaggctcaaaatcatagaaatcacctttgtcctattttcctcttttatgaagcagtgtaacatagtgattaagaacatatatctggagcaaaatgcctgggttcaaatcctggctcattgatctattagtttagtgaccttgatttatttattactgttaccatcttatctgctaagtcttattaatcttttcccttttttctcattctgctgcttccccagtcacaactataattacctcgtttgaattattatagtaacttcaaaactggtgccatttttgttttaaaagaaaactttaacacgagaacacaagtcacttgtgtttatattatgtgatgatgatttaagtcagttttctagcaatatgtatgcattgctaaaattgcggtttttaaaattaggcataaagtttcagtccctctgacctttcttctaaaagttccttgtgcatttttccactagggggcaagataatgtcatgggagttaaatactgctttaggaagaatgatcatgtagttattgctatgccatatctggagcatgagtcgtttttggtaggttttaatatttcttgaatttttattagctaaatatttaattgcaaacaatatttgtaactcatttcatttgtaactttgttttaggacattctgaattctctttcctttcaagaagtacgggaatatatgcttaatctgttcaaagctttgaaacgcattcatcagtttggtattgttcaccgtgatgttaagcccagcaattttttatataataggcgcctgaaaaagtaagtatgaagagttactagaaaatatttatcctatttcttttaaaaaacaattttattgtctatatttaaggtattgaacatgatgttatatatagtacaaaagttactattgtgaagcaaatatttatctcagttacccatcttatttttgtttttacggcaagagcagctaaaatttactcatttagtatgaatctcatatacagtacagttttattacctgtaatcttcagagtgtgcattaggtctagatttatttatcctacatatctgctactttgtatcctctgacttatatctcttagatataatataacatactgcaatagccatgcacagattatttctgtttcagtttctttgtgattggaaagggaaatttggtgatgaagaagataaaattgtattagtggaataatgtacattattagatgtactatggttcagtggaaatagcatgaactaacagacttagagtctaataatttttgaccttagacatgtctcttatctctggacttcatttttcttttctagtaagtgaggggattggaccacatgatagccaatttcctgttttaacacaaaagttttatttttatgtatactttttaatgctgattataattatagagaaattataagctaaaaataacataaatacctctatataatggatcatattaaacataataatattataacttcttttttgagcttttatatgcctgactttttaattttctttaattggatcagattttaaaaccatgattttaatttttttaagctttcttaactagaaattatctgctatgatgccatctctgccaccatcagagaacaacggactgtgtttatgttatgtattcctcttctgccttattaacacagaccactggaaaaagaaaatttgattgtgggacaactcttaattttcaatcctggttagctgttaaattcttactttgtctggaaaacttatttttttttcttttttccagaatgttataaattcctaattgatcccaaaaagaattacagtttttatgaggatggtttgagagtattacaatgttactaagctttaattgctacagataagtaaaaatgcttaattttgtctcttaggtatgccttggtagactttggtttggcccaaggaacccatgatacgaaaatagagcttcttaaatttgtccagtctgaagctcagcaggaaaggtgttcacaaaacaaatcccacataatcacaggaaacaagattccactgagtggcccagtacctaaggagctggatcagcagtccaccacaaaagcttctgttaaaagaccctacacaaatgcacaaattcagattaaacaaggaaaagacggaaaggttctatctcttttatttcttaagtaccgacactgttttagaaatatactccttcaaccaacagagggagatagaatactaggatagtacttataatttaaaaaacttttttttgcatttgttatatgtattcatttgattaaattttcactaagatttgtactgaatcattttggttactattttaaaactaaaatttactttgtcagtttataacatctgtcattaactattatgaaatcatattttatgacaaaaatggaaaatattaaattttccctgcatgttaaaaagttcagattaattatcctttttaaaagaaagcattagttataggggaggaattctgaagtgtctatctccattttagctgcacagcaaaatgtaacatccatgcaggtggtttttgaatttttttttagttatatatatttgtggactatgataacattgtatgggtgttgagttctgtctagactattttctcctttcacagaagtggtttggtgcctgagaatgacttggatgcagctgtttttgtttcatctcacttaactctttcaaaactatggcagagtacagctggcagaaagtgttacagatataatccttattttccttgtttttgttggtattgtaggagggatctgtaggcctttctgtccagcgctctgtttttggagaaagaaatttcaatatacacagctccatttcacatgagagccctgcagtgaaagtaagtaatgtagcttaatagcataatggtcagtcagtcatacactgaagagaatttaggtaataactagattaacatttattatcagaaatttttttaaactagagtttggctttggcagaaggtattactgctttaagcatttagtcaaaacttgttttctccagtttttttctgaacttttctggtggaattttttctcatttttggttagctattactgtctttctctagaggaacatttagaacattaagggctttctgtcattgctagagtgtgagctccatacagttagctaactattctgacacatagttgatagtgtaaagatgtttgtaaagttaacaaaatcatcatcaatgtagatgatttcagattgacttatgatatcttgtgacagctagacagcatgagcaacaaattaaaactgtgattttagccaacgtacttgtgcagtttacagttctgaaatggagttagacactagaacataactgttttatacttctgtaatatatcaggaaaagttctaataaagtataactcaaatattggccaagctaggactaattagtaaattttaatataaggtgactttacagaaaaacccaagaagaccttaaacattttaatagacaacagtttatttacagtccaatagccattcagcagtttttaaagttatgcttccgctattgctttttgccatactagcattttaggacatcatgtttaatatcatgaaaatagaaaaatgagacttttcttttacagctcatgaagcagtcaaagactgtggatgtactgtctagaaagttagcaacaaaaaagaaggctatttctacaaaagttatgaatagtgctgtgatgaggaaaactgccagttcttgcccagctagcctgacctgtgactgctatgcaacagataaagtttgtagtatttgcctttcaaggtaatgtgttttgatggtgttataaaatcaccagcatgctgccattagaaattgcattgacttgggtggataattttgtgagtgcaagggatcagttcagatcagtgaactgcaatgggccttgatgcagagcagtagtatgttgaagagcaaatgataacagttttcatatattatttatttaatatggatatactctggaaaacacatttgctcttatatgcaaataagtgggacggggtggcttttagaagcttagaatcacacattttgattgctgatgtagtcttttctgttttctctttttattcccgcttatgtggagtaaccagaaccaaatagtagagctcctcttttactcccacctccaactctttgactcataaatttcttcctttccttcaaggcttggctttcataaagcctttcttgattaactcaaatatataagtgtatctgtgatcaattactccaaacaaatgaatttttatacctgtgaattgctattgggttctattttttctattatggctcttattatccactactgctttttattcttggaggttattttaaacctttctggagtaagtccggggaactagtagagggggtaaaaaacagaagaagaaaaatctaggatttttatcacactagattatcatttactttatagtaacacttattatataggtatcaaggcaaaatttactgtgaactaaattgatgaatgttattttttagacttacatagttcaactttaacataactagagaaatcttatttcatcataaggcgtcagcaggttgcccctagggcaggtacaccaggattcagagcaccagaggtcttgacaaagtgccccaatcaaactacaggtatgttgtactggaaatacagaacctagttaaaatggattgttccagacgtattttattttatgatctttgtctatttataactaatatttgagttcttctgcttttaattatgtaagcagttcttgcagtgtggcattcctatttttgagctaatgctattctttatgaaagtttttaatcctaatgttgcctctctttttttgtttaaacagtttattccatagattacattttgcgtatttatttacaagatgatcttaccatcttgtaaataaatacgcaaaatgtaatctgtggaattttgctgacatcacctttgtgggggaaaaaattatgtttaatagtttttgccagccaaagacttaaagcattttatttgcttgcttaatacctcaaaagtttcctgtgatgtagatatatttgtgtttgattaaaattacttttgttattatataaacaatataatagcagttagaaggttttgaaaaagaaaaatgtcttccgtaatctaaaaacttaccatggagctggaatccaggaaacatcttgaatgaatagatgaatcctgctattcacttggattatgggctttgaagaaatgtattcattcattgaatgtctgttcttgcttgctaatgataacaaataaataaatgagaccatctgttcacactctagtcaggacaccatcaaataattataaaataacctgttgagtatggtaataaaacttattcagggtatttaaggagtatctaactatcctaacccaaagagattatgaaaggcaattcatgaaagaaatgacctcttagaatgtaaattgggctgagaagttagcatagaggcatgagccaaggaactcaagaaacagcatacaggaaactaaaaaagtttcattttggccagacgcggtggctcatgcctgtaatcccagcactttcggaggctgagatgggcggatcacctgagatcaggagtttgaaaccagcctgaccaacatggtgaaaccccatctctactaaaaatacaaaaatcagctgggtgtggtggtgcgcacctgtaatcccagctactcaggaggctgaggcaagagaatcacttgaacgcaggaggcggaagttgcagtgagccaagatcgcaccattgccctccaacctgggcgacagcaagacttcatctcaaaaaaaaaagtccaattttgctagaatattaagatgcaagttgaggaatggtgagagataaacctggaatgaggtagacaaggtcagaccacagttgttacagtttggactatatactgtagatattggaaagttaagtgaaaaaagtgacaatggtatatcctagatggatcattctggcaggcgtgcaaacagattagcttttggagagtggtggcatgaatttgtccgggtgagaggatgaaaatgtgaatgagggtattggtaataggaatgaaaagaaaagtgaagggttagaaaggcagagcttggtggataattggatgtagaattagggtgtggtatggtgagggaaaaaggcattcaggatgtttaccagattcctagcttgggagacttggatgtgtaccagtaaccaaggtggagagtaaaggagaagtaactggtttataggggaaggtaaggttagtttggggtataattggtttgaggtatttgtgggacatccaaatagagatttccagcagaatcaaagttaagtctgatgctcagcgaaggagctgggctagaaatacagatgaatgtcatcattatataaatgacagttgaagccatgaagtggatggaccaatcagggagagtatacagagggagaagttaaaactctgaggaatatccgtcagcacttaaggcttggagaaaacattgaaggagcaggcagaggtaccaaaggagctaagaaaggcaagtagggccgggcacagtggctcatgcctataataccagcactttgggaggccaaggcaggcagatcactaggtcaggagttcgagatcagcctggccaatatggcgaaatcccgtctctactaaaaagtacaaaaaattagcagggcatggtggcacacacctgtagttccagctactggggaggctgaggcaggagaattgaacccgggaggcagaggttacagtgagccaagatcgcaccattgcactccagcctgagcaacagagtgagactcagtctcaaaaaaaaaaaaaaaaaaaaaaaggtgatacagtagcccaaggaacagagagcagataacctggtgatactaggaagtcaacaattaagagagatgtcaactttaagaaaaaaaaaaaagagctttttaacatcaagttgagctagtcgtaatctttaactaccagaattcagaagattaaagtttctatagtgggaatgtaaattagtacaaccactatggaaaacaatttggacgttcctcaaaaaactaaaaatagagctactacatgatccaacaatcccactgctgggtatatacccaaaagaaaggaaatcaatgtaccgaagaggtatctgcactcccatgtttgttgaagcactattcataatagccaaaatttgaaagcgacctaagtgtccgtcaacagatgaatggataaagaaaatgtggtacttacacacaatggaagtactattcagccacgaaaaagaagatcttgtcatttgcaacaacatggatggaactggagatcattatgtcaggtgaaataagccaggcaccgaaagacaagagttgcatgttctcactaatttgtgggatctaaaaattaaaacaattgaacccatagagagcagaaagatggttaccagaggctgagaagggtggtgggagggtgtgggggatgtggggacagctgatgggtacaaaaaatagttataaagaatgaattatccagcactttgggaggccaaggcaggtggattgcttgagctcaggcactcgagaccagcttgggcaacatggtagaaccctatttctaccaaaaatacaaaaaagtagctggatgtggtagtgtgcatctgtggtcccagctactcaggaggctgaggtgggaggatcacttgagcctgggaggcggaggttgcagtgagccgagatcacactaccacactctagcctgggtaacagagccagaccccatctcgaaaaaaaaaaaaaaagaatgaattaagacctagtatttgatagcacagcagggggattatagtcagtaatttaattgtgcagtttaaaataactaaaagagtactttgaggggctgaggcaggcagatcacttgagcccaggagcttgagaccagcctggccaatgtggcaaaacctcgtctctactaaaaatacaaaaaaaaaaaaaaaaaaaaaaaaaagagctgggcatggtgacatgcctgtaatcccagctactcaagaggctgaagcatgagaattgcttgaacctgggaggcagagattgcagtgagctgagactgtgccactgcactctagtctgggccacagagggagaccttgtctcaaaaagaaaaaaagaaaagaatataattggattgttcgtaacacaaaggataaatgcttgagggaatggataccctgttttccaggatgtgattattacacactgcatgcctgtatcaaaacatcttatataccccatcaatatatacacctactgtgtactcagaaaaattaaagtcttcacagtcacaaaaaaataaaaaagtaattttttaaaagtttctatagcagtagttggtgctagtgtcagctgaagaagagcttctaatgttcattacttttcactaaaatgaaagcactttgaccagtatggtatgtaattctcaaggatcattcagattttttcccacatagctatttttggattccttttgatcctataaaatgtgcgtttacttagtgtttcctagtgattaaatatccttttaaatttaccaacacgttgctcaagaaagaaaacatattttgcagtgaggattctcagtcctggttgtacattaaaatcacctgaggaacttttttaaaacattgatgcctgagccctacttcagaactgttcaatcaaaatctttgggtctgggcatctgaaatttttaaggctcccaaggtgattctaatgcataataaatgttgaggactattgatttagatgataaaattatagatttgaaatttatttttaaaatttgtcttctgttgcagcaattgacatgtggtctgcaggtgtcatatttctttctttgcttagtggacgatatccattttataaagcaagtgatgatttaactgctttggcccaaattatgacaattaggggatccagagaaactatccaagctgctaaaacttttggtaagcagttttgtattatagaaccaaacaaaatgcctttgattatctcctacaaatcacttaataaattattgtgaaattttctttacaaataaacattcagtcttgataaagttctctaatattaagtagaaaattcttcagttgcttgaaaataaatttatcacctctctatacatataatcatttaatcttattaagcacaaagtaatacactgttgcagtatttaaagtttacctttataattttataagaataaggagtaaaatcttaactccttttagttatggtttgacttttattacataaatttaccttttattaaaggcatgttttactttgtaatatgttttacttttttattgtcttttaaacatcagatgcactatgtcttggtacttagagtgtccttgccttaaatgatcttaggctatactaacaagtaaacagttaattattaatacagtgtaataaggactagggaagagaatggaaatgtgtgttgtcaggttgtgtaggtttacggtagcagagaagcagaatgcatagaaggccttaactgatgggatattattgtaagcatatattggacttggatgtcatctccttagccacgcaagttcttcaagactgggatgtgcagtgtacttcatagggcacataagaattatctcagccttgctctggccaacaatctgaactcaagtgcccatttaatgtttattttccacgctcagttatagttaatactttccaaggaataagtgggattgactcagcttactaccatacaatacagaacacctcaggagacaaagtttcagccagcctacctcaagagtagctgggctgtcttgtgctcaaccccaggatcagtgggtcttaaccagagttgcatgtcagaattatctgagaatctttaagaaatacatatgcctgcccactcagcctattcttggaaaatatgattcagaaaaacaagatacttaggaaggctccagccttgttagtttgaaaaagcaagtgattctgactaagaaactatgggtgtttaagaaccactgcaaaaattactgcccttgcttatgcactagtgctatagtctaatctacaagaaaaacttagtggtggttgtgaagaaagcctcatcttaatagaggcttgccaaaatatgtttctacagtaaagtcagtccacgatttgtaactatcttgtacttattgtaagaaaattttatttgaagataataggatgaaataatacaagggaaaaaaagtgaccatgagtggaaagcaagattgatatcttagaaatggcattcttacataataatataacaagtatgtttattctcaactgagaaaactttcatctactattgaataacttcgtgagaggtttatgaacatgaagtttatcagccaataccaacatattttattgaagagcttgaatctcccccattgtaatccaagttataatcagggccaacaatggaaatacaacatctgacccaaaaatactctagatcaagtgccatgatagcaagcaagagcttttagagatttatcattgtaatacttctcatattaaaaaaaaaatagggccagccgtggtgactcacacctgtaatcccagcactttgagaggcttaggtgggcagatcatgaggtcaggagaccgagaccatcctggccaacgtggtgaaaccccatctctattaaaaacacaaaaattagttgggcatggtagcatgcacttgtagtcccagctactcgggaggctgaggcaggagaaccagctgaacctgggagatggaggttgcagtgagccaagattgcaccactgcactccagcctgacgacagagcaagactctgtctcaaaaaaacaaataataaaaataatgccataggacttgtctcagttgtattagtatgacatctgtagttattttagtcttgatcttactataactttggactgagtataaaagcctcaaaatttcaacaaacacaactgtgttcccctttgtaacctaaagaaatgacttggctgagattagcagtgagagcacctttacttctcttatctgtcctcaacccttaaacctggctccattgtgggttgtcattaagtactcagtgaattgtgttgaataaattaaaaagaaaagtcttgagctgaaacaaattcctgacacatagtagtctgtaataaaatatgttgactgatagtgttacttgaagttatttttcctgaatattgtaaatgaaccctctttttggtcatataaaaaaaagcatattgtataacttggggacatgctataacatatactattagttattttatgacttcagaacaagctaataaaggaataaaactatatgaatattcccccctggctataattttctagagagaataggaatgatagaatcagtttaaaagtaaaaaagcattggcatattgtactctcaaagaatttggtcttcagtaattgtttgtttcctccctttccctcccccatttttttccctggcttagtacaccagtccagtagttagttcagaatatgtaaaggtaactttttatcatccacagtcagattaatgactttgttgacaatctacattctcagaaaggcatctaaatgttgtggtacttgttgtttcgtacatttagtatatttctgtttaataaggaaatgtaaggcaaaaataatacatgattgccatttgtgtgattaacttttttttgcacatctgataataaacccatcaggaagttatttcaaatacatttatatttttaaaaacagatctagtttgtttatttgttcattcagaaacatttattggggctttatgtgtgccaagtactattgcgagtctctgctttcacagagcttaaattctagtgagggagagaacataaataaatactatgagaaatgagtggtactgagataaaaggaaaaggggagggaagaggcttatttaggataggttggtcaagaacagcatctctaaggatgtatgtgtcatttgaacagttgttgaaaagaataatgcctttttgtctagtccaacagacattaactgactacctaatctgtaccaggcataggctgggtttggggggttcaaagataaataagacagttcctgccttcaaagagctcagtctactaggtgggacagacatatataggatagcaaaagtaatagtagaactctcaagatacagtagaaactgaaattgatcagttctctctgagggtgtcaagcctcagaggtgattcttgatctgagtggtgatgtcagtgagagtgtcctgggcacacaaggggtgcagggcatcctaggcaaagacaggagtcatgtagtcaaagacatagaagcatggaaaggaagtagagtgggggcgtgggagctgcagctagttaaagattatagaagggtaagatgaagcttgagaaattggcagagtcaagtgagtgcctggcatagcttagtaagtcactgctttgtacttactatctcccactttatctcccactatgcaattcaaatacaacttaaatatagcatgtggtgctctatctcatactgtgtgtgtgtgtgtgtgtgtgtgtgtgtgtccatgtctataaagcatatgtttgaactttcatgtttctcatgagagaggcttctgatatattcaaataataaaatgtttttttctgtttttgttttttcttcttttgcttttagggaaatcaatattatgtagcaaagaagttccagcacaagacttgagaaaactctgtgagagactcaggggtatggattctagcactcccaagttaacaagtgatatacaagggcatgcttctcatcaaccagctatttcagagaagactgaccataaagcttcttgcctcgttcaaacacctccaggacaatactcagggaattcatttaaaaagggggatagtaatagctgtgagcattgttttgatgagtataataccaatttagaaggctggaatgaggtacctgatgaagcttatgacctgcttgataaacttctagatctaaatccagcttcaagaataacagcagaagaagctttgttgcatccattttttaaagatatgagcttgtgataatggatcttcatttaatgtttactgttatgaggtagaataaaaaagaatactttgtaatagccacaagttcttgtttagagaccagagcaggattaataatttattttaacattttagtgtttggtggcacattctaaaatatagattaagaatacttaaaatgcctgggatagttcttgggactaacaacatgatcttctttgagttaaacctacctaagtagattttaggtgggttcctattaggtcagatttttagcttccctaattacctttcactgacatatacagaaaaaggagcagttttagttttaattaattaaaattaacagatgtgatgaggattaaatgaatcaaaagacttaatttgtagattcttttagagttatgagctaggtatagtttggggaaactcaacctggtgctggtgctcttaacaattttgtaaataaagaagataatttccttttctagaggtacatattaggccttttatgaacactaaaacaatgaggaaatgttggtcatggggcaaagtatcacttaaaattgaattcatccatttttaaaaaacacttcatgaaagcattctggtgtgaattgccatttttttcttactggcttctcaattttcttccttctctgcccctacctaaaacattctcctcggaaattacatggtgctgaccacaaagtttctggatgttttattaaatattgtacgtgtttacagttgggaatttaaaataatacatacactggttgataaagggaagctgcaggaccaaggtgaagattgatagtccaaatgcttttcttttttgagttgtatattttttcacaccatcttagatataattaggtagctgctgaaaggaaaagtgaatacagaattgacggtattattggagatttttcctctgcgtagagccatccagatctctgtatcctgttttgactaagtcttaggtgggttgggaagacagataatgaagtaggcaaagagaaaaggacccaagatagaggtttatattcagaaatggtatatatcaatgacagcatatcaaacttcctatgggaaaaagtctggtgggtggtcagctgacagatttcccatttagtagtcatagaatacagaaatagtttagggacatgtattcattttgttattttgagcattgataggtcagtatatctacctaatctgtttggtaagtataggatatataaaccattaccattgatctgtcttatgccataatcttaaaaaaaatttgaatgctcttgaatttgtatattcaataaagttatccttttatatttttta

SEQ ID NO: 7780 - DNA, 11483 bp, Homo sapiens
ctagaggaacatttagaacattaagggctttctgtcattgctagagtgtgagctccatacagttagctaactattctgacacatagttgatagtgtaaagatgtttgtaaagttaacaaaatcatcatcaatgtagatgatttcagattgacttatgatatcttgtgacagctagacagcatgagcaacaaattaaaactgtgattttagccaacgtacttgtgcagtttacagttctgaaatggagttagacactagaacataactgttttatacttctgtaatatatcaggaaaagttctaataaagtataactcaaatattggccaagctaggactaattagtaaattttaatataaggtgactttacagaaaaacccaagaagaccttaaacattttaatagacaacagtttatttacagtccaatagccattcagcagtttttaaagttatgcttccgctattgctttttgccatactagcattttaggacatcatgtttaatatcatgaaaatagaaaaatgagacttttcttttacagctcatgaagcagtcaaagactgtggatgtactgtctagaaagttagcaacaaaaaagaaggctatttctacgaaagttatgaatagtgctgtgatgaggaaaactgccagttcttgcccagctagcctgacctgtgactgctatgcaacagataaagtttgtagtatttgcctttcaaggtaatgtgttttgatggtgttataaaatcaccagcatgctgccattagaaattgcattgacttgggtggataattttgtgagtgcaagggatcagttcagatcagtgaactgcaatgggccttgatgcagagcagtagtatgttgaagagcaaatgataacagttttcatatattatttatttaatatggatatactctggaaaacacatttgctcttatatgcaaataagtgggacggggtggcttttagaagcttagaatcacacattttgattgctgatgtagtcttttctgttttctctttttattcccgcttatgtggagtaaccagaaccaaatagtagagctcctcttttactcccacctccaactctttgactcataaatttcttcctttccttcaaggcttggctttcataaagcctttcttgattaactcaaatatataagtgtatctgtgatcaattactccaaacaaatgaatttttatacctgtgaattgctattgggttctattttttctattatggctcttattatccactactgctttttattcttggaggttattttaaacctttctggagtaagtccgggcaactagtagagggggtaaaaaacagaagaagaaaaatctaggatttttatcacactagattatcatttactttatagtaacacttattatataggtatcaaggcaaaatttactgtgaactaaattgatgaatgttattttttagacttacatagttcaactttaacataactagagaaatcttatttcatcataaggcgtcagcagggttccctagggcaggtacaccaggattcagagcaccagaggtcttgacaaagtgccccaatcaaactacaggtatgttgtactggaaatacagaacctagttaaaatggattgttccagacgtattttattttatgatctttgtctatttataactaatatttgagttcttctgcttttaattatgtaagcagttcttgcagtgtggcattcctatttttgagctaatgctattctttatgaaagtttttaatcctaatgttgcctctctttttttgtttaaacagtttattccatagattacattttgcgtatttatttacaagatgatcttaccatcttgtaaataaatacgcaaaatgtaatctgtggaattttgctgacatcacctttgtgggggaaaaaattatgtttaatagtttttgccagccaaagacttaaagcattttatttgcttgcttaatacctcaaaagtttcctgtgatgtagatatatttgtgtttgattaaaattacttttgttattatataaacaatataatagcagttagaaggttttgaaaaagaaaaatgtcttccgtaatctaaaaacttaccatggagctggaatccaggaaacatcttgaatgaatagatgaatcctgctattcacttggattatgggctttgaagaaatgtattcattcattgaatgtctgttcttgcttgctaatgataacaaataaataaatgagaccatctgttcacactctagtcaggacaccatcaaataattataaaataacctgttgagtatggtaataaaacttattcagggtatttaaggagtatctaactatcctaacccaaagagattatgaaaggcaattcatgaaagaaatgacctcttagaatgtaaattgggctgagaagttagcatagaggcatgagccaaggaactcaagaaacagcatacaggaaactaaaaaagtttcattttggccagacgcggtggctcatgcctgtaatcccagcactttcggaggctgagatgggcggatcacctgagatcaggagtttgaaaccagcctgaccaacatggtgaaaccccatctctactaaaaatacaaaaatcagctgggtgtggtggtgcgcacctgtaatcccagctactcaggaggctgaggcaagagaatcacttgaacgcaggaggcggaagttgcagtgagccaagatcgcaccattgccctccaacctgggcgacagcaagacttcatctcaaaaaaaaaagtccaattttgctagaatattaagatgcaagttgaggaatggtgagagataaacctggaatgaggtagacaaggtcagaccacagttgttacagtttggactatatactgtagatattggaaagttaagtgaaaaaagtgacaatggtatatcctagatggatcattctggcaggcgtgcaaacagattagcttttggagagtggtggcatgaatttgtccgggtgagaggatgaaaatgtgaatgagggtattggtaataggaatgaaaagaaaagtgaagggttagaaaggcagagcttggtggataattggatgtagaattagggtgtggtatggtgagggaaaaaggcattcaggatgtttaccagattcctagcttgggagacttggatgtgtaccagtaaccaaggtggagagtaaaggagaagtaactggtttataggggaaggtaaggttagtttggggtataattggtttgaggtatttgtgggacatccaaatagagatttccagcagaatcaaagttaagtctgatgctcagcgaaggagctgggctagaaatacagatgaatgtcatcattatataaatgacagttgaagccatgaagtggatggaccaatcagggagagtatacagagggagaagttaaaactctgaggaatatccgtcagcacttaaggcttggagaaaacattgaaggagcaggcagaggtaccaaaggagctaagaaaggcaagtagggccgggcacagtggctcatgcctataataccagcactttgggaggccaaggcaggcagatcactaggtcaggagttcgagatcagcctggccaatatggcgaaatcccgtctctactaaaaagtacaaaaaattagcagggcatggtggcacacacctgtagttccagctactggggaggctgaggcaggagaattgaacccgggaggcagaggttacagtgagccaagatcgcaccattgcactccagcctgagcaacagagtgagactcagtctcaaaaaaaaaaaaaaaaaaaaaaggtgatacagtagcccaaggaacagagagcagataacctggtgatactaggaagtcaacaattaagagagatgtcaactttaagaaaaaaaaaaaagagctttttaacatcaagttgagctagtcgtaatctttaactaccagaattcagaagattaaagtttctatagtgggaatgtaaattagtacaaccactatggaaaacaatttggacgttcctcaaaaaactaaaaatagagctactacatgatccaacaatcccactgctgggtatatacccaaaagaaaggaaatcaatgtaccgaagaggtatctgcactcccatgtttgttgaagcactattcataatagccaaaatttgaaagcgacctaagtgtccgtcaacagatgaatggataaagaaaatgtggtacttacacacaatggaagtactattcagccacgaaaaagaagatcttgtcatttgcaacaacatggatggaactggagatcattatgtcaggtgaaataagccaggcaccgaaagacaagagttgcatgttctcactaatttgtgggatctaaaaattaaaacaattgaacccatagagagcagaaagatggttaccagaggctgagaagggtggtgggagggtgtgggggatgtggggacagctgatgggtacaaaaaatagttataaagaatgaattatccagcactttgggaggccaaggcaggtggattgcttgagctcaggcactcgagaccagcttgggcaacatggtagaaccctatttctaccaaaaatacaaaaaagtagctggatgtggtagtgtgcatccgtggtcccagctactcaggaggctgaggtgggaggatcacttgagcctgggaggcggaggttgcagtgagccgagatcacactaccacactctagcctgggtaacagagccagaccccatctcgaaaaaaaaaaaaaaagaatgaattaagacctagtatttgatagcacagcagggggattatagtcagtaatttaattgtgcagtttaaaataactaaaagagtactttgaggggctgaggcaggcagatcacttgagcccaggagcttgagaccagcctggccaatgtggcaaaacctcgtctctactaaaaatacaaaaaaaaaaaaaaaaaaaaaaaaaaaagagctgggcatggtgacatgcctgtaatcccagctactcaagaggctgaagcatgagaattgcttgaacctgggaggcagagattgcagtgagctgagactgtgccactgcactctagtctgggccacagagggagaccttgtctcaaaaagaaaaaaagaaaagaatttaattggattgttcgtaacacaaaggataaatgcttgagggaatggataccctgttttccaggatgtgattattacacactgcatgcctgtatcaaaacatcttatataccccatcaatatatacacctactgtgtactcagaaaaattaaagtcttcacagtcacaaaaaaataaaaaagtaattttttaaaagtttctatagcagtagttggtgctagtgtcagctgaagaagagcttctaatgttcattacttttcactaaaatgaaagcactttgaccagtatggtatgtaattctcaaggatcattcagattttttcccacatagctatttttggattccttttgatcctataaaatgtgcgtttacttagtgtttcctagtgattaaatatccttttaaatttaccaacacgttgctcaagaaagaaaacatattttgcagtgaggattctcagtcctggttgtacattaaaatcacctgaggaacttttttaaaacattgatgcctgagccctacttcagaactgttcaatcaaaatctttgggtctgggcatctgaaatttttaaggctcccaaggtgattctaatgcataataaatgttgaggactattgatttagatgataaaattatagatttgaaatttatttttaaaatttgtcttctgttgcagcaattgacatgtggtctgcaggtgtcatatttctttctttgcttagtggacgatatccattttataaagcaagtgatgatttaactgctttggcccaaattatgacaattaggggatccagagaaactatccaagctgctaaaacttttggtaagcagttttgtattatagaaccaaacaaaatgcctttgattatctcctacaaatcacttaataaattattgtgaaattttctttacaaataaacattcagtcttgataaagttctctaatattaagtagaaaattcttcagttgcttgaaaataaatttatcacctctctatacatataatcatttaatcttattaagcacaaagtaatacactgttgcagtatttaaagtttacctttataattttataagaataaggagtaaaatcttaactccttttagttatggtttgacttttattacataaatttaccttttattaaaggcatgttttactttgtaatatgttttacttttttattgtcttttaaacatcagatgcactatgtcttggtacttagagtgtccttgccttaaatgatcttaggctatactaacaagtaaacagttaattattaatacagtgtaataaggactagggaagagaatggaaatgtgtgttgtcaggttgtgtaggtttacggtagcagagaagcagaatgcatagaaggccttaactgatgggatattattgtaagcatatattggacttggatgtcatctccttagccacgcaagttcttcaagactgggatgtgcagtgtacttcatagggcacataagaattatctcagccttgctctggccaacaatctgaactcaagtgcccatttaatgtttattttccacgctcagttatagttaatactttccaaggaataagtgggattgactcagcttactaccatacaatacagaacacctcaggagacaaagtttcagccagcctacctcaagagtagctgggctgtcttgtgctcaaccccaggatcagtgggtcttaaccagagttgcatgtcagaattatctgagaatctttaagaaatacatatgcctgcccactcagcctattcttggaaaatatgattcagaaaaacaagatacttaggaaggctccagccttgttagtttgaaaaagcaagtgattctgactaagaaactatgggtgtttaagaaccactgcaaaaattactgcccttgcttatgcactagtgctatagtctaatctacaagaaaaacttagtggtggttgtgaagaaagcctcatcttaatagaggcttgccaaaatatgtttctacagtaaagtcagtccacgatttgtaactatcttgtacttattgtaagaaaattttatttgaagataataggatgaaataatacaagggaaaaaaagtgaccatgagtggaaagcaagattgatatcttagaaatggcattcttacataataatataacaagtatgtttattctcaactgagaaaactttcatctactattgaataacttcgtgagaggtttatgaacatgaagtttatcagccaataccaacatattttattgaagagcttgaatctcccccattgtaatccaagttataatcagggccaacaatggaaatacaacatctgacccaaaaatactctagatcaagtgccatgatagcaagcaagagcttttagagatttatcattgtaatacttctcatattaaaaaaaaaatagggccagccgtggtgactcacacctgtaatcccagcactttgagaggcttaggtgggcagatcatgaggtcaggagaccgagaccatcctggccaacgtggtgaaaccccatctctattaaaaacacaaaaattagttgggcatggtagcatgcacttgtagtcccagctactcgggaggctgaggcaggagaaccagctgaacctgggagatggaggttgcagtgagccaagattgcaccactgcactccagcctgacgacagagcaagactctgtctcaaaaaaacaaataataaaaataatgccataggacttgtctcagttgtattagtatgacatctgtagttattttagtcttgatcttactataactttggactgagtataaaagcctcaaaatttcaacaaacacaactgtgttcccctttgtaacctaaagaaatgacttggctgagattagcagtgagagcacctttacttctcttatctgtcctcaacccttaaacctggctccattgtgggttgtcattaagtactcagtgaattgtgttgaataaattaaaaagaaaagtcttgagctgaaacaaattcctgacacatagtagtctgtaataaaatatgttgactgatagtgttacttgaagttatttttcctgaatattgtaaatgaaccctctttttggtcatataaaaaaaagcatattgtataacttggggacatgctataacatatactattagttattttatgacttcagaacaagctaataaaggaataaaactatatgactattcccccctggctataattttctagagagaataggaatgatagaatcagtttaaaagtaaaaaagcattggcatattgtactctcaaagaatttggtcttcagtaattgtttgtttcctccctttccctcccccatttttttccctggcttagtacaccagtccagtagttagttcagaatatgtaaaggtaactttttatcatccacagtcagattaatgactttgttgacaatctacattctcagaaaggcatctaaatgttgtggtacttgttgtttcgtacatttagtatatttctgtttaataaggaaatgtaaggcaaaaataatacatgattgccatttgtgtgattaacttttttttgcacatctgataataaacccatcaggaagttatttcaaatacatttatatttttaaaaacagatctagtttgtttatttgttcattcagaaacatttattggggctttatgtgtgccaagtactattgcgagtctctgctttcacagagcttaaattctagtgagggagagaacataaataaatactatgagaaatgagtggtactgagataaaaggaaaaggggagggaagaggcttatttaggataggttggtcaagaacagcatctctaaggatgtatgtgtcatttgaacagttgttgaaaagaataatgcctttttgtctagtccaacagacattaactgactacctaatctgtaccaggcataggctgggtttggggggttcaaagataaataagacagttcctgccttcaaagagctcagtctactaggtgggacagacatatataggatagcaaaagtaatagtagaactctcaagatacagtagaaactgaaattgatcagttctctctgagggtgtcaagcctcagaggtgattcttgatctgagtggtgatgtcagtgagagtgtcctgggcacacaaggggtgcagggcatcctaggcaaagacaggagtcatgtagtcaaagacatagaagcatggaaaggaagtagagtgggggcgtgggagctgcagctagttaaagattatagaagggtaagatgaagcttgagaaattggcagagtcaagtgagtgcctggcatagcttagtaagtcactgctttgtacttactatctcccactttatctcccactatgcaattcaaatacaacttaaatatagcatgtggtgctctatctcatactgtgtgtgtgtgtgtgtgtgtgtccatgtctataaagcatatgtttgaactttcatgtttctcatgagagaggcttctgatatattcaaataataaaatgtttttttctgttgttgttttttcttcttttgcttttagggaaatcaatattatgtagcaaagaagttccagcacaagacttgagaaaactctgtgagagactcaggggtatggattctagcactcccaagttaacaagtgatatacaagggcatgcttctcatcaaccagctatttcagagaagactgaccataaagcttcttgcctcgttcaaacacctccaggacaatactcagggaattcatttaaaaagggggatagtaatagctgtgagcattgttttgatgagtataataccaatttagaaggctggaatgaggtacctgatgaagcttatgacctgcttgataaacttctagatctaaatccagcttcaagaataacagcagaagaagctttgttgcatccattttttaaagatatgagcttgtgataatggatcttcatttaatgtttactgttatgaggtagaataaaaaagaatactttgtaatagccacaagttcttgtttagagaccagagcaggattaataatttattttaacattttagtgtttggtggcacattctaaaatatagattaagaatacttaaaatgcctgggatagttcttgggactaacaacatgatcttctttgagttaaacctacctaagtagattttaggtgggttcctattaggtcagatttttagcttccctaattacctttcactgacatatacagaaaaaggagcagttttagttttaattaattaaaattaacagatgtgatgaggattaaatgaatcaaaagacttaatttgtagattcttttagagttatgagctaggtatagtttggggaaactcaacctggtgctggtgctcttaacaattttgtaaataaagaagataatttccttttctagaggtacatattaggccttttatgaacactaaaacaatgaggaaatgttggtcatggggcaaagtatcacttaaaattgaattcatccatttttaaaaaacacttcatgaaagcattctggtgtgaattgccatttttttcttactggcttctcaattttcttccttctctgcccctacctaaaacattctcctcggaaattacatggtgctgaccacaaagtttctggatgttttattaaatattgtacgtgtttacagttgggaatttaaactaatacatacactggttgataaagggaagctgcaggaccaaggtgaagattgatagtccaaatgcttttcttttttgagttgtatattttttcacaccatcttagatataattaggtagctgctgaaaggaaaagtgaatacagaattgacggtattattggagatttttcctctctgtagagccatccagatctctgtatcctgttttgactaagtcttaggtgggttgggaagacagataatgaagtaggcaaagagaaaaggacccaagatagaggtttatattcagaaatggtatatatcaatgacagcatatcaaacttcctatgggaaaaagtctggtgggtggtcagctgacagatttcccatttagtagtcatagaatacagaaatagtttagggacatgtattcattttgttattttgagcattgataggtcagtatatctacctaatctgtttggtaagtataggatatataaaccattaccattgatctgtcttatgccataatcttaaaaaaaaattgaatgctcttgaatttgtatattcaataaagttatccttttatatttttta

SEQ ID NO: 7781 - DNA, 102 bp, Homo sapiens
atatatataatcagcaacacctctgtgaaattgggcaaatgatttaacctccctgaattgagtttccttatctgaaaaatcaggataatcattcctgctctg

SEQ ID NO: 7782 - DNA, 239 bp, Homo sapiens
gtagactttggtttggcccaaggaacccatgatacgaaaatagagcttcttaaatttgtccagtctgaagctcagcaggaaaggtgttcacaaaacaaatcccacataatcacaggaaacaagattccactgagtggcccagtacctaaggagctggatcagcagtccaccacaaaagcttctgttaaaagaccctacacaaatgcacaaattcagattaaacaaggaaaagacggaaa

SEQ ID NO: 7783 - DNA, 1176 bp, Homo sapiens
cacgccattcttctgtctcggcctcctgaatagctgggactacaggcgcccgccaccacgcctggctaattttttgtatttttagtagagatggggtttcaccgtgttagccaggatggtctctatctcctgaccttgtgatccaccggccttggcctgccaaagtgctgggattacaggcgtgagccactgcgcccagccaaaagtgttaatcactgagatgtctactgagaactccagattcataaccactctcagaagcattaatcaaaccagaggaacttagaaccttatcagtgtaatcttgatattttgcatctctaccctgtggacaagtattttatttttttccctttgagtatataatgcattaatatttcaaaggactttgcaattaaacacagaagaagccatctttagactcaaccctaatactactttcagtagtgcagactaccttccatttggcatatgtttgtatactgtatacattttcatagttgaaatcatttatattctgattctttgcaccagacaaatactttctacaaattatcttcatatcattttagtaatttgacatttcgttgtgttactcatcttattccactcttgttggacaagtggactgttacagtgatgatagctttatggagtatttgcttttattgaattatatcaccaagataaatatccagaagtggaaatacttcgacagagagtatgaaatggctcttactacatattactgtattgtttttctgaagggctatatcattttaggattgagcaagttttaaaccaaattttatgtaataagtgtatcatagaattatatagatggaaaggatttctctggtgaacctccctgtttacaaatgaggaaactggccaggcatggtccctctcacctgtaatcccagcactttgggaggctgaagcaggcagatgccctgagcccaggagttcaagaccaggctggacaacatggtgaaaccccatctaccaaatatgcaaaaattagctgggcatggcggcgctacctgggaggctgggaggaatgtttgagcccaggaggcggaggttgcagtgagcagtgatcataccattgcactccagcctgggtatcagagtgagaccctggttcaagaaaactttttacaaaaaaaaaaaaaa

SEQ ID NO: 7784 - DNA, 1177 bp, Homo sapiens
cacgccattcttctgtctcggcctcctgaatagctgggactacaggcgcccgccaccacgcctggctaattttttgtatttttagtagagatggggtttcaccgtgttagccaggatggtctctatctcctgaccttgtgatccaccggccttggcctgccaaagtgctgggattacaggcgtgagccactgcgcccagccaaaagtgttaatcactgagatgtctactgagaactccagattcataaccactctcagaagcattaatcaaaccagaggaacttagaaccttatcagtgtaatcttgatattttgcatctctaccctgtggacaagtattttatttttttccctttgagtatataatgcattaatatttcaaaggactttgcaattaaacacagaagaagccatctttagactcaaccctaatactactttcagtagtgcagactaccttccatttggcatatgtttgtatactgtatacattttcatagttgaaatcatttatattctgattctttgcaccagacaaatactttctacaaattatcttcatatcattttagtaatttgacatttcgttgtgttactcatcttattccactcttgttggacaagtggactgttacagtgatgatagctttatggagtatttgcttttattgaattatatcaccaagataaatatccagaagtggaaatacttcgacagagagtatgaaatggctcttactacatattactgtattgtttttctgaagggctatatcattttaggattgagcaagttttaaaccaaattttatgtaataagtgtatcatagaattatatagatggaaaggatttctctggtgaacctccctgtttacaaatgaggaaactggccaggcatggtccctctcacctgtaatcccagcactttgggaggctgaagcaggcagatgccctgagcccaggagttcaagaccaggctggacaacatggtgaaaccccatctaccaaatatgcaaaaattagctgggcatggcggcgctacctgggaggctgggaggaatgtttgagcccaggaggcggaggttgcagtgagcagtgatcataccattgcactccagcctgggtatcagagtgagaccctggttcaagaaaacaaaaaacaaaaaaaaaaaaaaa

SEQ ID NO: 7785 - DNA, 1095 bp, Homo sapiens
cacgccattcttctgtctcggcctcctgaatagctgggactacaggcgcccgccaccacgcctggctaattttttgtatttttagtagagatggggtttcaccgtgttagccaggatggtctctatctcctgaccttgtgatccaccggccttggcctgccaaagtgctgggattacaggcgtgagccactgcgcccagccaaaagtgttaatcactgagatgtctactgagaactccagattcataaccactctcagaagcattaatcaaaccagaggaacttagaaccttatcagtgtaatcttgatattttgcatctctaccctgtggacaagtattttatttttttccctttgagtatataatgcattaatatttcaaaggactttgcaattaaacacagaagaagccatctttagactcaaccctaatactactttcagtagtgcagactaccttccatttggcatatgtttgtatactgtatacattttcatagttgaaatcatttatattctgattctttgcaccagacaaatactttctacaaattatcttcatatcattttagtaatttgacatttcgttgtgttactcatcttattccactcttgttggacaagtggactgttacagtgatgatagctttatggagtatttgcttttattgaattatatcaccaagataaatatccagaagtggaaatacttcgacagagagtatgaaatggctcttactacatattactgtattgtttttctgaagggctatatcattttaggattgagcaagttttaaaccaaattttatgtaataagtgtatcatagaattatatagatggaaaggatttctctggtgaacctccctgtttacaaatgaggaaactggccaggcatggtccctctcacctgtaatcccagcactttgggaggctgaagcaggcagatgccctgagcccaggagttcaagaccaggctggacaacatggtgaaaccccatctaccaaatatgcaaaaattagctgggcatggcggcgctactgggaggtgggaggaatgtttgagcccaggaggcggaggttgcagtgagcag

SEQ ID NO: 7786 - DNA, 454 bp, Homo sapiens
gctgctgttaaacacttcttcattgtgcttatgagtttagcatgttaatgcttacatgtaaaaactaattgcttaaaatgctggttctgaaattaatcacctaatgcactctttattaagaaggttaaggagagagtctttgacaatgattctagagtctcaaagggaacaaagagtttaaatggaaggacaatttgaaatatgaaaaaaaaactactaaatatccatgtaataaaatgacaaagagaacatttcattttttttttctaaccaaaaatgaaagtgtagtcacaaaactttagtaggcttacgaagcccagggaaaccaaagtaaaactgtacccaggatgctaataaagttcttaatctttggccgggcacagtgccatatgcctataatcccagcactttgggaggctgagacaggaggattgcttgagcccaggagttcaag

SEQ ID NO: 7787 - DNA, 454 bp, Homo sapiens
gctgctgttaaacacttcttcattgtgcttatgagtttagcatgttaatgcttacatgtaaaaactaattgcttaaaatgctggttctgaaattaatcacctaatgcactctttattaagaaggttaaggagagagtctttgacaatgattctagagtctcaaagggaacaaagagtttaaatggaaggacaatttgaaatatgaaaaaaaaactactaaatatccatgtaataaaatgacaaagagaacatttcattttttttttctaaccaaaaatgaaagtgtagtcacaaaactttagtaggcttacgaagaccagggaaaccaaagtaaaactgtacccaggatgctaataaagttcttaatctttggccgggcacagtgccatatgcctataatcccagcactttgggaggctgagacaggaggattgcttgagcccaggagttcaag

SEQ ID NO: 7788 - DNA, 27492 bp, Homo sapiens
tccaaagtatgttatgttaagtttcgtgatccatcaagtgttggcgtggcccagcatctaactaacacggtttttattgacagagctctgatagttgttccttgtgcagaaggttggtatctcgctttttttcctcttatttgaatttctgtcctgtctgttattgcctttagctttcctagagattggcaagtagacagtactcttggtgtgtgtgtgaaagtaagaatgaaatttggaggaggtaaacctttttacctaatagtaatattaaaatggttaatttatgacatgtacatttgaggttttacaatttaacattcattggcttctggtttgctttggctttctgtagtcaatttgcagattgcaaagaaagctttctgaaattaaaaaataattgatatgggaaattattttaaatgcataaacaagcatttaccttgtgtgttcaatattaatactattacaaatgaaaatagtgtacacattttggcaaattggggttaagtgatatttataagaaaatatttgtaatttatactttcaagtacactcttaaggtaatttaccttaattgttactatgagatcattattttatattcaatgtaattgtttgctttgcaactggaatttaatgttttcttttactggccccaaaaaggggcaggaggagtgttggaaaaaaaggaaagcaattttccaaagcctccatgaaggaagtagttgttgaagataggaacaaaggccttaaagtatccattaaattttatgacctaaactgctttaagaactaattattactaatattttttagtaacttctgtttacagagccactcacgtataatagactgtgctgaattttgacacttctggtgtataattaacttttattcagagcactgactagcatgtgtacaggattttagaattgggttattataaattaaaatgtcttaaagtagattttctctggtggatgattgaaactgttttaaacataaaggtttatggaaaacagtttgatgggctttcatatgtaatttttaaaacctcttttagtggccaggctgacattaaaataatatataataagcagtttgctgcactttaaaggttttatgcttatttcagaatgcctgttctgggatgtcaaaaacattacagtctaatacagtgagtaccaggctcgtattttttaagtcccagaataggacattctcagtatttttcagataaatttggaagtgtctttcccatgcttgggggttagagtgggtagggaagataaaaatggattaaagttaattattggccaaatgtatctttatctgctgatctgtaaggctacagtaagccccaaattggtgaggtgggaaaggagctggtgaatggtttcgttctacaaactttgtagtgaaatttcatactgagaaactgcatgggaaaaaagaaatcaggtaaaaggtttattaaactggaatattaattatatcagaaaattaataccaccaataacactgggtcttttattgtgttagcttattactgaattggaaggaagaattttatcagtgttgcttggttgaaacctgctttattcccatagaatctttcatatatctgagaagccctactgtattttgttataaatgttcaagatgatgggcgtgtagatgtcccttttattgtttattttacttgatagagatgaataaatgcacagtcagatgtacctttttagtgtttttaatattacaacttggacagttttactgtttttgaacagaaaaatttaagcatacttttattgcaatttagttataagtaagtaaatattttgaaacactaacctacagttggtattggtgaaacattcagatatacgtttttcattagttgtattaaatacggcagagatgaatttatggaacctcgagaatttcacagtgagctgttaaaatactgattatgcactacaagcaaagaaatagtgcattattgtactaaaaaagatagcagagtgagtgtgaaataaccaaagaaaagtattccagtggagtaagttctgtaagaggagatgtgctgtggtgctgtaagcaagcagtgttctgttgacctcactgaatgcatcctttccttgatgttgaacaaacagcatcatgacataagtgagaaaaaccatagaaaaaaatttaagaagttttttcagtttctttgaattgctgttttttagtgtagacagtaatgtgagaagatcctaagttgtaaaagtaacatttgatgtgtaacagtttcatgcatattaagccttagcctttgttaataaaacatgccatttcaaaataaaatatgctttcattatacttgtccaaatatgacctctttttgttgttgcgtgcatttcagatttctttttataaatgttaacacgtagaaaaagatacggtcaaacataacaagggtgtcagcctaatcatcagtcataactttatgtccacattttctggtagatggattttgactattaatttggttttgtatgttttctctatgtgatatttgtgcattattagatgactagactggccaaggcagacctgttacacttgcctgagttaggcattgtttgccatgccactaaacctgccgtcaagtgaaaccttcattggggaaatgagatcggagtctgaaccgcagaagatggacgccctgtctctgttttttattgttttactttaatttcatttctttttctttattttgtccctttttttgtttttgtttttgtttttgttttgttaaatctctttcactttaacttgtgagctggttttcccagttctttgtaaatggtatttcattaagggttcataacgtgttgcaaattatattgggagatgattagtagagctcaaccttaagataaagcaaattttcatgtggtaaattaggatacagtgttgtgaagctcattgtgagtcttaatttgtgtgtatggactcataaggtacattttattcttgaaacattaaaacactgataagtatctcaggaacactttctgatctcagcgcaacatttttctagtttttttcccccctagtctacatctctcataaaaactgatagcttctaatttttgtccttccccctggaattttaggcatacaaaatcatcaaggaaaataagtaaatataacaatctgggagtaaagaagagcctttcatttttatgatggttatttatcatataacttatttccttgacttatgaagactttttgttgcctatgtggggaatggatatttgagaaacttaagtatttgcatgtaggtttttgttagcttgaattttttgttgaatatttttcagaggttactagcttctaaatggattctgagattaggactataatactgtgagagatgttttcctcagttgactttgaggagtatagtttgggaaaaatgctaaatgcttatttgttttatacttttataagctctgttatttggagggtaaatttggtagaattctatcttggaaattaagcaatggagctttttcttaaagtacttttgccattacctttaggtaattagaataagtatatagagtaattagaatggtaattgaaagttaatttattaaaaaatgtgcttatagtggatttatacatttatagtagtatactatatttatagtagtatactcttttgaaaggcagtgggagagtttgacaacctactgatacttaagctgaaagtgaaagacttcataatactaagtagtcaacttttggccagtgttgaataccctttttgtttgtatagtctttctacaatgtcttcaataggtagttttacttattaaaggacaagtaatattaaatttgggacattactagattagaactctgagtttccttaggtgcatacattaaggtagtgacgatggagtttctgcctcaaaacctcaatttatcaagaatgttcaggttttacaaaccttttgagataataccaatttataacagataaaacaggtgaaatcaatataaatagtatagtgtatatgtgggtatatataaatacatgtgttaataccaataactaatacatataaagcagattattgttatttgatgttttcagtaaggcctacctgccttttgttgatgcatgttaagaaatctgttctccagaattttcactgaaataataaagataactttgtttttgaaagtaataaagtaatataaacttagatgctgcaaaggtagaaaatagtaggttttatttgcttcctataaataaggcatagccattatttaaatcaagttttaaattccaacttgagttccatccatgtttaaagatatattcagataatattgtttagggatttatctctgcacatgtggttgttttaaatatttttacaactgaaaccaggcatggtgcttgtggaaatttactgcatatgctatatttcagtttagcatgattttgtgcattgtcttttaaaacacttttggagaattaataatagaaatgctttaccagctaccacatgagtgttcttctaaatatatccacatgtagtcaactatttaagaattttttttttttttttttgcctaaggggataaggaaaaataatgtgaaagttgcagtccttatcagaagtaattgattagaattcagcaatgaatatgccaaatcgtacttatttcagagtaagtttttcatttttttaggttgtagggagtttttttcctactgagtgttattagattattttaatgttactattgttattaggcaattaaaatgtttttaagcaagctttaaggcattaacctcccccttcagataagtatacataaattggttctaaaagttaataagaagttttctgaaaccagggaactttttttttcctgaaacatttttagtagtttcccaaggcatattttttggaactgagttcttttaggcatctctgatgttggtgagatgctttattaactgaatggatgtaggcttccttttacgttgaagttgattacatggagtaagtttttgttttctatttgaaattaaatggaatctgttggagggttatcaaaattgtttgcatcacaaataggtagtttcagtaacaggataggggcactcattaagaaatttcaattcgcacatatttgttttttctttttcttttttttgactaatttggttatttgccatttctggggattaaactttaaaaaatgttcttcttttctgtatctgatgttctgtgtgctattagtgatgcagccaacacgaacggttgtcatgtgtaacacaactttcgatcaccgcgaaaacaccgtcctgggaaagcgtccatgcttgatatcgtttggttcatgaacattaagtttccagtacaggtgacccatagctcaaagtgttaaataattgtctacattattcaatttttaaaataatattccattaatgagattgttaatatttgaagttttgctcacttttatttttcctagtagagcaggataaaaggaaagacttaagttcttatttatttctttatacagatctgatagatagattcatttattattattattttttaactgcaagggtaattgtaaaatcatagtgtaaagtttgtgtggtgtttctgctttttgtaatgtttggaacttgcctctgcaggtaaaatcccagaggaatccaaagccctctctttattggctcctgctccaaccatgacaagtctgatgcctggtgcaggattgcttccaataccgaccccaaatcctttgactactgtaagtactataagctggcttatgaaagaggtgaatgttcaactgtgtgaccagttgaatagagagcttcagattatttgcatttggatcttcttcttttttttttttttaatagagaggattcgaaatcactgcttaaactttttttttcactttatcagtgacttaacgctgcgttttggatttactcctgaagtaataggggattcatttaaatttgagaaccccaatagattattcactagaaaatcagttattaaaactcaatattttagatagcatagaggatctaggtaactgtatttctcagttaatgaggattaaatccatttaaaatacgtgaaatgatccacaactttggtaatgggaaaaaaacaggtctttgtctgatattgagaaaatgtaataaggtgaaaacatggcaaaatatttttccattaactatgcagaattaaatcataatttagtaatgcttcctttgtgatttccaagtgggattaaaaaaggatattacggccaggcgcggtggctcatgcctgtaatcccagcactttgggaggccgaggcaggtggatcatgaggtcgggagatcgagaccatcctggctaacacagtgaaaccccgtctccactaaaaatacaaaaacttctctgggcgtggtggcgggtgcccgtagtcccagctgctcgggaggccgaggctggagaatggcgtgagcctgggaggcggagcttgcagtgagcgaagattgcgccactgcactccagcctgggcgacagagggagagtctcaaaaaaaaaaaaagggtatattactattactggttcttggtttttgcttaaaaaactctggccatatttattttaaaagaagtgccatttttcttcaaaagacaacatagaacaaaatacaaagcttgccttaattggaagttgaatctagctttgtggtgttggataggaattgaactaagaaatgaactatgtgattgtagttaatttatctagattgtaagagtggtttctgaaattttgaagtgcaaaattttagatttgtagtttttacataacattgctatgctgaagacctgcattctgattcttggggggaaatgttttttaattgaacttatgtgttcaaggaacagaatggtggtcagtatggttgaagcatagtgagtgagggtcatgagtgtttgagattggaggggatagataggacacagattatggtagggctttttagaccatggaaagaggggtttgagttttattcttaaggtaattagaaaccattgatgggttttaagcagggatatgacatgatttgacatgttttaaaaagatcagactggctgctgtgataagtgacattgatttcataaacttccgttttcaccattagcaagtgccattacttaacagttgttaaaatcttagttctgtatcatatttgtatatatagtcattaatggtcaaaatgttctctaatagtataagtggaaatgaaaagagttgtgcttttttccttgaaagctcttttcgttctgaaaaattttttctgttttcaaattctgagatcttacatttcttctagtttacattcatattaaaaataatacgttccttaatgctgaaagtaaaaactgaatttagtgatgctatagaaagatcattcaaagtttttttgaaggtttttgcccttttcctaccatggcataagtaagggctcaatattttagatatattttcttaggtaaactttcagcatgataataataacccatttcttagggttgatatgaggattaagttactacctcagttaaattcgatgctatgataattgttgactgttaggaactcatactcatactcatctgtgtttttcaatgaccaaggtacagttgattctcattctttgtgaattctgtatttttgaattcacttagtaagtaaaatttttttgaaatccccacatcaacagttggagcacttttgtggtcgttcgtggacatacacagagtggtgaaaaattggggtttgtctatttgcacggaggtcgaaatcttcttgttttggcactcaggcagtaaacaagcacgcagtctgtttagtgctatgttctttgaattgttgtgctttttgttggtgatttcactgttaagatgggcccacaagtgtagtgccaaactgctgtgtagtgttcctaagtacagggagattgtgaagtgcctcatggagaaaatattaaatacatgtattagataagcttcattcaggcctgaattgtagcgctgctggctgtaagttcagtgttaatgaatcgacaatatataacagctaaggtgtctttaaacagaagaacatataaaataaggttaaatattttactagttaatgtaaatgtgaccagaggcttgtaggaacttcaccctgtattttccctaggaataatggttcaatattcaataattcattgttcacggaaactatagaacatagctatgtcaggtaatgagaaacagcctgtcttttagggtcaagtttaaaagtggctaaaatatccagacagtaaaatatatttcaaattacatttaaaactaatgtgaccttactttaataactcagacatatatatgactgaaagttcggagtccctagtctcctttcattcttgttgagttagttcattcttttcaagattagagaatggtatctttggatactaatagaaaatatgtgttctgtgtgttttttttcttctttcgatagcttggtgtttcacttagcagtttgggagctataccagcagcagcactagaccccaacattgcaacacttggagagataccacagccaccacttatgggaaacgtggatccttccaaaatagatgaaattaggagaacggtttatgttggaaatctgaattcccaggtaactaattaaagaagaaacaaagcagcagtagcccttattctttttctcttcttaaaaatcatatcagtggatacagtaatatttatctgattttttaaatggatatattttatcaaagtgtcactttgttcccttagacaacgacagctgatcaactacttgaattttttaaacaagttggagaagtgaagtttgtgcggatggcaggtgatgagactcagccaactcggtttgcttttgtggaatttgcagaccaaaattctgtaccaagggcccttgcttttaatggagttatgtttggagacaggccactgaagtaagaaatcctaaacaaagaaattttaatgattttgaaacatttaaagtatttttgatgtaatgaaggctttttttttctttttaatagtaattggcaatttgtggaaaggaagactttgtgttaagtataaatgaaatacatgagatacttaccattttagtctttaaattcctttatttagagacatttattttctcattttctgttttctagggtctaattcagtgttaacattatttatataccctgcataacggttgtaggtctttttccataaactttaatagtcaggttggttttacattatgacactagactaattgagcaacttaacaggtgggttgaactacagtacttccagtaacaactgtggtaaattcaaaatctacagaaggaaattataagtgcccagaaatgttttaaaccagaaattttgacttttgaggtttgcttacatccttgtttgtaaaacgttgataatggccttcgagatactccagaccagaaattctatttcatgcagattgttgaggcatatatagttttgcttgaatttcatagattgctttagttatacaatttgatcaggatttttctgttaaggataagtttttagtgggtacttgtcttcccagtgtggaaggggtaaagcaagacacataatatccattcatgtgcatcagagaagtcactcttacctagtagaggaagaattttttcagatgccttgcacattcaaagctatgtctaactcagccatggttcagcgttggttaaaatggtgtacataatatgatgatatacaggtagcttacccttcttctagagtgtacaggatatcagtaagatcttttgatttgaaaatagaaatgattcattttcatattggtatcaacattttaatttattttaattctaagctatggaaaagcacttcatctagtctgtttgaattaagttagctagggttcaatttttcttttctccctgcttttggttgtattcgcaaggaatgataggaagtggggatgagagattaatcatggttttgaggttgcttttggttattctgtatatcattcttacgtgcttctgagatgtcctcacgtttataaatatgtgtatcatataaatgtttgtttcatgttttataaaatgtggtgtgtatttgtgatatgctaatatttttaatttagaataaatcactccaacaatgcaatagtaaaaccccctgagatgacacctcaggctgcagctaaggagttagaagaagtaatgaagcgagtacgagaagctcagtcatttatctcagcagctattgaaccaggtaagtacataacgttgttacataggtcatagtttaaagatcatagactcttagaactggaaggaattttagaaatcatcttgttcagtcacttcattttacaaacaagaagactgaaactcaagaaatagtaagtagcatactcatgtcaaagaacaacttagcccatattttatctctttctgtgatactgaattgaggcactttagtctgagctaatcagctctgtattttcatagcaaaatcagtgctcacaagtgatttgctgaaagcaaaaatgttattgcaaggctaaaaagagtacatatatttaaaacgttacgactcagcaggtttacttttcctcaacattttaattttagaagtagagaagagagcccgtgatttagaaaaaaatacagatactgtattttagtaaggtaaaagaacatctatttaaacttttgtgttgctaatgaaaataattaaaaaacccattctaaaaacatctaggtggtttacatttgagcagattttctaaatcaacacttagaatttaagcttcaaattctagcagaataagtggagaaaggacttaaaatcactgtcacaggaattacagacatgttgtaatcgtacgttacggcagcaacaaaatattacgaacagctgtttataatcatctggtttatatgtactgctgcagggtggctgcactcaacgagtttatgcaatgactttcttggatgtttctgaaggaggaggatgtacagagagtaggccccttgcactatatgtggtacattccacttgtgcctgattattaactgggatctttaattgttctgagcttacactgcaaagtgattttttcctcccagagtctggaaagagcaatgaaagaaaaggcggtcgatctcgttcccatactcgctcaaaatccaggtctagctcaaaatcccattctagaaggaaaagatcacaatcaaaacacaggtgagaatttctgctgtcatatttaaattttattttagttttgtatttaaaatattaagattttatgagttttcgtcaaaatatcagaagttagaaattttagtagtgtacacctgaagtgtggttacctttaaatattgttctaattgtaatactgtagttgagaatgaaattttgtctaatgatacttaatttttaaatatttgaacttatctttatttttagaagttagttttgtgtctaaagatactctattccagatttttctaagagtaaactagtctttatatagaagtgacaaaagctgttttcattcttcatattgagaaaagggaacatccttagtgaccatgctgaaaataattgctcaagttgcagcttttttgttttgttttcccagtctattccaagtttggggagcaccaccccagatctttcacgcaattccctattttcagtaccacgtatccaaaggaacactttgagtccttggtattgctggtgataagagcctcctctgcccacttttggacctgaaacacaggagtaacttgcagtttcagcttcagttttagtactttgcttaagctctgtttatcttatttttgatcatagctttgtccttttgattttctttatctgtcatttctttgtctttggtataaaggggaccttaaaatgcaaatttggcaataccatcctaattggaagtaccctaaagatcattactaaagttacaaattttgttgtctattttaaggtacggagggggctgtttttgaaatgtgaaagtatgtatagtggatcctaattgcatgttatgtgtacatacgtactcctatgtatgtcttgagagagcagggagggaagagtgtatctgtgtatgttgggattttaaagaaggagaaaggatttgggggagggaaaaggaaccagtttgttgtacattgttttaccagcaggctcagtttactttgtttttgtgtgtgtgtgtgttgatcaaggagattcaaagaatgaggaaaaataggatgttctttcttagattctagtaaacaagtatacaccagatatactagtgtatacttgtctattcttagtttgcaaaatctcctttggaatatggttttactgcgtttatccaaggacttacagtaagacactttcagaaccaagtgaaggaggttgtttcacatacaagaataaggcagtgcagcagaggccagaatcaggaaaggacagtggaacagaagctgcagtgatactagactgtggatatttccatatgttgacaggatgtggtgagggtaaaggagatcaaggaaataatagaattgggctgaagagtaatattacaacttcttttctgaggaagactgatgacctggatctcatattgtgttgattgtaagagagagctaatgtccaagactggaacaagacaaaacttgatgatgaataaaattgttgtttctttgatcatctaagtgaagttttatgtgctttatgtagatatgtctatacagatgtacacacaatgtctgcgtagcattagaaataatgtatatatattccttttttttccccccccaagatgcagtttcagtccgttgccgaggctggagtgcagtagcttgatctcggctcactgcaacctccacctcccaggcacaagtgatcctcccacctcagcttctcgagtagctaagccacagacacgcaccaccacgcctggctaattttgtattttttgtagaaacggggttttatcatactgcccaggttggtcttgaactcctgagctcaagcgatcctcccaccttggcctccaaaagtgctgggattataggcatggtatacatgttcttaactgacatatatacatacatacatacttttgtcagcatattctgtttttgtgcatgcatgtggaaacatgtagccttaagttcaagaacaaatacaaaagagagaatgagttatctttaaatgagaaaaaaaaaattccttacctaaaaacatttaacttaaagattctgacctggaaggatcccactatcccccagaaatcaggaagggaatgataggcctttcttgacatttcctcctctgctagtgggagttgttgtccttgaatctcaccctgacctattagacttagcatgagcgtgggttgcaggaaccctttaacttaaaggcccaccttctactttttcaccattttcaaatgcttctagagccatgcttcctacctcccaaccctcccccacagcctttccctgttccttccgcttcttatggttagagagaggaaggggtttcttgtcactgtgaccttggctaggactagggaggtatgtttccattttatccaagttttgatgcctgttttatttattgagacatagaaaagatggatagtactataattgttataattttaagtaacctttatagattagaacaggaactgtaagacattttataatattttaatggaaaacaactgatttacaaatgaactttgatgcagcataatggtaagttgctggttttttacagtttaatttaaaaataagattttgcattattcagaataatacaatttcgcattaaaaatgagagttaatgataaatctttagttagattagatctgctcttgactacttctagcattcttaatcagaaaactactagtgggtaagattgacgtgaaaatatttaacgtcacagttaaaatgtaataattactcttagtcactgtcttttgacatctcaattgcagggtaaggttggaagccaagtgatcagtgctttttattattaacttatttatgagagttatacttaatttttaaaaataagttttgcttaaggttggtggaaagcattgctttgaggaaaacaaaagaattatatttttagcaaggacaacttaaaacagaaatcttatagtaagactttttattaagtatgtagaagcaaaggcactttaaaagattaccctatgtggatatctgtaaacggactaataatgttctcagttttgcagttttgccttaacatctactccttaactttcatggctcttaagtactagtgataaagatttcagcaagctatgaattatcttcttgtattaaaaacatggtatgtgatttcttatctagggtctttggaaaaaaataaaataaaaaataatgtggtatgttgaaccaagtgaggctaaaaaaaaaaaatatggaatgaagacaattgtatattatttttacagccaaatagtagatgagtagtttaaatggaaattagctattgaaattttgatttgtaatgttgattagtattttaatcagaattttgactaactgaaaaatgtgtttaaaaacaaaagattttgttattaatgaggattatttggaggtttttctggtttcaaagcataccacaaaacatggtctttttcttttttcttttatttttttgcgatagaatcttgctgtgttgcccaggctggagtgcagtggagcgacctcagctcattgcaacctctgccccccgggttcagttgattctcccacctcagcttcctcagtaactgggaatacaggtgcatgccaccatacccagctaatttttgtatttttagtagagacgggtttcactatgtttggcaaggctgatcttgaaatcctgacctcaaggcaggtggacctcaagtaccacctgcctcggcctcccagagtgctgggattacaggtgtgagccactgtgcccagcccaactatatttcttttactgataattgttctaaatttattaaaacatgactatcaagatgagttttagctgtataaaggatacttatagaagttcattcagcttccttggaatacgtacataaggatataaagtttacatttatgttaacttttaatgatgatgacattgagagttaagatttttaaacatttattttgtgctagagaatactacgcagttttacatacatcatcagttgtaatcctcatgacagccctaagagatgcaggtatgattgctactccactttatagaggaagaaactcaggcttggagaggttaagtgactagccagagttctcacaggtagcgtgtggcagagctgactttcagagccagattgtcagactccaaagctgttgagtctaatcactttgctatttaagttgtgtacatctgttttgttacaatttaataagcagttaggatacctcgttatgaaaaaaatcacattctcaaaaaactttttcagtgagaaagggggcctagtccaaattggaataacagttacttttcctgcaattaaacgtttcctgcagttaacagtttcttttcatacaggttgagactcacaaatttgaaaatctgaaattcaaaaggcttcaaaactttttgagcgctttcgtgatgctcaaaggaaatgctcactggagcattttggatttttcagttgtgtgtttgggatgctcaaccagttttatgcgtgtgtatatatagaatgcaaatattcgaaaatctccaaaaatgtgaaattcaaaacacttttggttccaagcatttcacataagggatactcaactggtagctatgattatagttacagctataaaatcaaggcattgcaaatccaatatttgattatatctagttttaacttatgagtaatgatttttattttcctgtcacagtggcgctgtcattaggactgtgcttccttttatatattctttttgtttgttatgacagacagcacacattcacaggaactactcaaccacgtaaccactactccctgtcatgatgtgttatgaccagattacatgcaagtcaacagggaaaaatcttctatactgatttgaggcataaaatgactagcaaaagccacatctgaaaatatacgaaataactgttaaattctttgtttctgtctctgttctagacaatgaaatatccggtaaagtttccagtaaatgtatttcagattatgtaactaaagtattatttaagagaaatttttaaaatattgttaaatactgttaggatagattttaaattttcttgtttgaaagatcgtaaattaagttttgatattctaacaattttttttctttaggagtagatcccataatagatcacgttcaagacagaaagacagacgtagatctaagagcccacataaaaaacgctctaaatcaagggagagacggaagtcaaggagtcgttcgcattcacggtgagttttagagaaattaacaataatttttttttcctcagagttctgttagtgctaagggataatattttaattggcttcatttgttaaaaatctgttgtggtttaggtttttaatgagagaaattaaaccttttttattgttttagtaatctaggattaatattgattgccagtgatctgaatctgatgtcagtgtgactcatgaggtttccaaactactcagttcagcttgcgtagtatgaatagctttgtttagcagcttcttgtacacctgagctatataaaaatgtatatgtaaatgtctgtaggtactataaattgtcttgtgttggtaattgttgaagagagagaggtctttttggaggaggtagaactattttagttatgaatttatttatttttgtttttaaagggacaagagaaaagacactcgagaaaagatcaaggaaaaggaaagagtgaaagagaaagacagggaaaaggagagagagagggaaaaggaacgtgaaaaagaaaaggaacggggtaaaaacaaagaccgggacaaggaacgggaaaaggaccgggaaaaagacaaggaaaaggacagagagagagaacgggaaaaagagcatgagaaggatcgagacaaagagaaggaaaaggaacaggacaaagaaaaggaacgagaaaaagacagatccaaagagatagatgaaaaaagaaagaaggataaaaaatccagaacaccacccaggagttacaatgcatcgcgaagatctcgtagttccagcaggtttgataatgcttaaaatttttacaaagggatttgctgatgacaattggaaacaaaattttttacggagggagaaaaggttactgtacgcaagtggaacctgtaaagtaatataagaacattttctcctaatttcagagtaaacatttctctagcagagtggggaaagagatgatactgggcaacattatttgaagagttttagctattctttgtaaccactattttaatagaataataataattgttattttcttagagggtgggatggcagggaaaggtactttttttaaaaagcacattaagaatttgcgtcttaggctttttcctgaactttttttgaatggtgtgattaattttaatatgtaaaatgattgctgaagttgcagtgttagccctctttgtcacctaagttaatttttatccttattttgttaagtgcataacatttaaattttggtcgtgttttattttgtcagttttaagggttagagtttttccttaggaccgtgatttcagtttattaatagctttactaccaccaggtggcagcaagttgccatagtaacagctgtacaatgagaacaacttttgagatttaagattatctaaacccacatcctttacttcagatgataccatgactgtaaatggaagttcctaacttatactacactatcttaaaaatactaaatatatatattagcaaatttttgaagatttttaaagatggttttttaatagaaaataatttgagataaaggaatatatgtttcccatttttaaaacttgtgctttagtagtttatttttaataccagcctttgactagataataaaagataatcgtagacatttattgtgcactttactgtatgccagacatgatgtcagtagactttttcatgtctcaccttatttaatcctcacaacaggcctgggagaagattattatcatcactgttttaaaacatgaggaagctgacgctctgtatgagaagtatagtagcccttttcctttattttagagattaagtttgagaattctctagtacttgtacttacttttaaaaactacctcagaagcataaagttgaaagcagtagtatatgttaaaacaaggctcaaaataaacagatcactgctggatttcagcacattgaaccacagattgaagaattaatgtaacctcctttgctgtgggtactggtttgagccttgtaaccacacctttactgcaaagtgattttattgattctgtgtcacacatgcctttgtgtttctgtgattgtttagacattacctttcacagcaccaaatactattttcattcctttttaataacgaatttactttttttgatgacatgggaatgtttaactttttctcgggccattttaagttgtttggtgtagaggaaagttcaagtgttcacattcattcctaaatatatatgtatatattttttgaaacagagtcttgctcatcgcccaggctggagtgcagtgtcatgatcttgacccactgcaacctccccctcctcggttcacgtgattcttgtacctcagcctcccgagtagctgggattacaggtgtgcaccaccatgcctggctaatttttgtatttttagtagagatggagtttcaccatattggccaggttgatcttgaactcctggcctcaagtgatctgccctccttggcctcccaaagtgctgggattacaggcatcagtcactgcacctggctcaaatacattcttcagtaacaactggggccttgagaataaaagatgactgacattagtttataaaggcagcagtttggaatgtttcatgctttcagaagagcttggtaaagagttacaatttctttgaatttttttttttttttttttttttttagacagagtgtcactttgtcacccaggctagaatgcagtggcacaatatctgctcactgcaacctctgcctcctgggttcagcgattctcctgccttagcttcctgagtagctggaattacaggcgtgtgccaccacactcaactgatttttgtattttatttaatagagatggggtttcaccatgttggccaggctggtctcaaactcctgacctcaggtgatccacccgcctcagcctcccaaagtgctggaattacagacgtgagccgccaccgcccccagccaagagttacaatttcttgtcttttagcatttttctgcttttcaaatgttctgatttgtttactaaatggagaatattttaactgttcaaaaaatagttaatatttttatttctaacattgtctcctaatttatacttttaaagaaaatgatattaaataattttttaatgcttaaatttactgtcattaaaggtgataccaagaaagggaaggaaaaaacaatatttattgagcacctactctgtgtcacactctatgctttgcacattacagattttatcctaaatcctcaacaacctaataaaacttgaattattaattgtctttatttttcagttgaaaaacagattaggttaagtaatatgatcctggttgtatagctgggtaaggtgtataactcaaatttaagtctaaatctcaccaactttagttgttaatacaatttctttctcaagtaattgtctagattgctgtctatggagactttcctctcattatcgtcagctagtaggtattagacatccacttgtacatagtgctttctgaacaaataagtaaaagaattacactgataaaggcagagcgattttgtgtaatcttaaagtctggaatacgctgacattcacatgctttgaaaaaagtatttttggttcttaggctgagctgttaagagaatgtcattgatgtaatcaaataatgtatctaatttccacattagaagtgtaattgtggagtgtcttgggaataaaagtgggtaatggaggagagagtcttaggtagaggtagaattgagttgtgttctcagagttcttgagctttgtattttaatacatattatatataccgtgtgagcattttttattttagaaatgaaaaacttaaattattttattagtctcttagaatcagtttcctgaaatggtaaggataacatgaattccagaggatttggttttttagctatgtggtcactgattatcagaacttgtgagatagatcattgggtatgtcctcgtaccatatcccttaaattatagacctagtgaagttcattgtttctgagttgaagtagtttagaatatgtatcatttgctaatctgataagcaaaatggtttttaataataataacgtaatctattttataattattcctgtcatatttacttttcagattgtaactgttttgcttacatctaagcaacttgtacactaaattttaaattaatagaacaacagtaatgaaatgataggaggttggagggaaaagcaatttctctctaaaatgatagtaatgtaaatgctttttaagtagacattgttgataattgggtatagaaagttcacattttacaagccagtttatgtttcagtttttgaaaagggcctgttactttgttataatccacagtggggcagcaaggagctagatacatgacaaaggatttgataagcaaaacttgttttagctgctgagaaaatacacttgagagaagcagaaacgccacgccattaatattttttctactgaagaaattgttcaaataaacgaggtgaaaaggaggaggtcttctactcttcctaatatgaagtcttagatgatgttttcatcagtctgtaaaatttatggttcataatttgacccactctaaagttaggtaattgaacatgctcataaaggacataagtttaaactggcctctaaagaatactgttcatatgagaatatcaaggacccttttgcttttgtatatttgaattgccgtttatttcaattgctgtttttaaaaatgatgtgtttttgattttcagggaaaggcgtaggaggaggagcaggagttcttccagatcgccaagaacatcaaaaaccataaaaaggaaatcttctagatctccgtcccccaggaggtaggttgggagcttgtgctaaaactaaacaggagaaagcaataaatattttttgaaattttaaatttctctctttattttttaaactttatattttgaatgaataatacatatgcattattcagaaattaaagataaaagttatgtatcaggaagtcttaatttccactcttgcccatctacactgttcccagaagtaatgacttcgtgaggtttttttgtatatgcttccagtttcatatacagataacaagatgagaatgtatcatttttttctaatacaagaagcaacacagaatacacactgttgtgcccttggttttgtcatttaactaccaggaagtctttttgtcacttaacttaccaggtcagagagagcttcttcaattcctttttataattgcgtaggcttccgttgtatggccataccttagttttttaactaggctacagtagaaggggttttttgaattttttttaccataaattatgtaatgctgtaatgaatagctttggacttaagttgtttttagtgtgcatgtgtgtaggaaaaatctcaagaaatggcattgttaagttagataataagcatgtttgtaatttttgagagatatttcctaattatcctctataagagttggcagcagtttgcactcttaattatgagagaagtgaccacttcatagatttgaaagccatttgtatttctttttctgcgaattgtctgtatactctgcccattttcctgttggcctttttgtttccttttctatttccaagaactcttttatattagggagcttattgtttagtgatgtgattataaataacattctcagtttgctgtttcttttaaaaaattgtttgtgagacttgattttacaaaggtttttcatttttaaaataactttctctttttcttttatgacttcttatgtgagtcaaaaactgataaaaggcttttcctattccaagattatgatagaactttcccattgttccttcttgtacttttatggttttatattttgcagttaaatctctggttagagtcttattcttgtgtacaatatggcaaatgggttcagttttattttacaaatgcttccgtgttgttgcagtaccatttgttaaaaactcaatttttctaacattagtttgatatgttgcctttgtcatgtgctgtgtttttctgtgtgtttgggtctatttctgggtcttctgtgcccttggattggtttgactggccgttcatgtgccagtgtcccacccttttaattattgagattataccgtatttttaagtatttggcaaggcctgttctctatacccctcattgcttttttgagtatagttagctttcctttcagtggttatttttctgcttgaacatgagtcagttgtctgcattccagaaataaaacctattgatgatttgtgttacagttgcattcgatttataaattaacttagggaaaattgataaacaggtttattaataaagattcatgatgacaagtcgtctgtccaggaatatggtgtatctgatgagatcgggcatgctcagggtgatatggctgtagacaaggaatgtggtatatcttattaggccatcattagtgttttcagaaatatttcatcgtttgtttcatacaggctttatgcatttcttaattcctagaaatttttgttgttgttgctgttggaaatgaggtattttctttcattatgtttaattggaggttaggtttgtacataggaaagttattgatttctgtatatttatttttttaatcccactgccttactaattggttatggttttttaggtgattttctgtgattttccagcagaggggtcttttgtttatttgcttataggtttttggcttttgtgagaataacggaaggcttaggatactatagatgcaggccatgtttgtatttttgaaacaaatactttacccaggaaagtcaaaacttttctcttatgaactgaaattagacaaaaagatacattcagaaaatgtcactcctgtctccattccatctgccttgttcccattcaccctgtgtaattgaccaatcatttgattgtctttcctttgtttctctttgcgaaatgaggcggatacatattcatttggttttattttctccttattgcagtacataaacaaatattgaatattcgaaaactattaaataggctatgccaaatagtgttttatgagaacatatggtggcctctgccaaaatgacttgtgtatccttaagaaactaactggggtaagggtggggtaggtcaggttgtagggctcatttatgttactttgcaaaccagcttactgttgatgcttattaacaatgcattattttagatatccagtgttagaaaaggatattttgtcaagaatataatagatcttacaatttcttagaatttaactgacatatcaatattcttatagcagaaataagaaggataaaaagagagaaaaagaaagggaccacatcagtgaaagaagagagagagaacgttcaacgtctatgagaaagagttctaatgatagagatgggaaggagaagttggagaagaacagtacttcacttaaagtaagcagcagtcattcggtgtctggcacttgaaatggttctttattgcatacaaatggttttagactgaaagctctttggggaacagtgtcttgtacattgttggcattttatggcattttaaaatatttaaaatatttaattggtaatttaaaaaaactaaatgttgaagagataagagccaattaaaactaaaaaaactaagttaaatcctaacatggcatgcaataagaaaaatttaagaaatcaacagtaacaaatgtatttgattttatgtagataggatttctgcctgatgccattttcctcaatttatgtttcagcaagtttgaaaagactttgtgtagttaacattaggtttgttgggttagaatacctaatggaaaaccacattccaccaagtgagcttttttgtcacttggataaatacttcaagtagttgtgaattaagttacttacactggtaaagtatatttgtatttggaaattatgaattttggaacatctatcttatagttttatgtactgtaatactgatagacgattatcatcatcatcaataacattgataacatttattaagcatttacgatgtgccgggcactgtttgttctcatttaactcttttaaattgagggtagaaattggagtgctcttgaacagccttttccaggaggcatagtgacttccttttccacatttccttatttttgctgcattggtttgcagattaaaaatctatcctggcatccttggaaattatttcactctttcaatagatctgtctccgtttttcaagtctgtcagcaacatttattgagcacttgcttaaaatttctgttcaccaattctaatttaatttccatggattgtccatcttttatgagaacacaaaggggaaattgatagtgtttgcatattcattttgtgtgaaaacgtaatgagagaaaatcatacccagttttttaaatttgcaaaagataaagtttcacatttttgtcgtcatagcaggcagttcttgaggaaaatattaaatgcataccttaattactcattgtaggagaaagagcacaataaagaaccagattcaagtgtgagcaaagaagtagatgacaaggatgcaccaaggactgaggaaaacaaaatacagcacaatgggaattgtcagctgaatgaagaaaacctctctaccaaaacagaagcagtataggaccgacaagtgtacctctgcactcaatgctggaatcaaatccaaagcttttaattctctcaacaagatgtaaacaggaaagaaatctagttgagcatgaagataggatctaacagcttttccagttgttagatgactttgtggccatcttgttattgagtaagaaaataaagcatggacatcatgaaaataacagatgttacccaaactcatcttctaaaatctgtgcatttccatggtggctgacacacttgtcatgtggtctgttagtgtttgccaagaaccattgcaaataaattgaacatcaaagatccaagtttgtactatccctaaagactggagataagcattggaggctcttttaaaaaatgctagttactgaattttgtattgttttacttttttttttatttcaatatatacagtttgatgatgtgcttgaaattggtgcaaatatatacacacccttgtaagtgcaaagtatgtaagaagttttaacatttacttcacaggacttgtgattgtgttaaattctcactattgtgttttcttttgctcactgtttaggacaatttttctttaaaatagttttgcagattaaaattgcttaaataagtggattaaaaaactgacaatgcatgctactgttctctttcaaaaggaagagcaaccgtgttgaatactaataatgatgaattagtattcagtgtttagaatcattgggactacccacaaagtgagcatttctttttaaattttcttgacatttccaagcttattatgaataatattgcagtgtgtcttgtcagctgtaggtggcaaaggtgcccttataaaaaaggaaactggcttttcaaaatgggctatgggagcacaagctgaagctttagtgccttctacaatgtggtatactgttttctagaattttatatgtgctagtcattctcaattcatatggaatctagatggatatttcatgcatacccatagagaagtgtgtaagtgatatgtcagaagagcttcttactgatttcacctaaaatgagaaggaagtcctgttttcaagaatgacattagagtcatgcagctttgggaccatcagttttatactgtgataattgaaaatgaaacatgttcttattttccttaaattgaagaaaaccctttagttgtctacattggatggccttattacctctcaatcatcttttcataaatgatgtgcagaaattgtacttaaggacttaggagtatatgggaggttattggttttatgtttaaggatacgtttacttgagtttaagatacaggtcatccatcattcttaggctcactttttacagaaagtatgcaaatagtaaagtgacagcactgctaatgtttttccccagtactataacttgtggtttctgaactcattattgttgtatttccaaaaaagtaataccttttaattagtgtattaaaagttaagtataattattttaatgcaatctaatacaatcagattactcagttgccttacctcatgggaagagttacttttttagatctaaaaagctgaatagcatgttagttacttggtttcaacttgagttttcttttaatgttaataagattgaaactttagtatttagtggggaatggaaagagttgcccttgttgcaagtaatgaagcctgatttgattatgaagctgcttaatcactcttcatgtgttcagaattactgttttttttgtttgtttttcctttttgtcactgtgtacattaaaattttggaagatgctttactatgtaaagtatagatggtcattttaatcattcagccacatacggttggctggtaaacagcttattctgatacaagaatgcttgggtgcatatggaaagattgtgaaagagtgtgtcttgcatcaacagctgtcttatttatgatatataagtagaaatagagcaaatgttggaatctgttatttttagtaccatgtctttaataaagctaagtattttagaggaaaatgtttgtttatgcatttcaaaaaagcattttagttttatcctgctcattttagttgtcatagagattgttgtgacgtggagagtgcat

SEQ ID NO: 7789 - DNA, 18925 bp, Homo sapiens
  SITE (10313): n equals a,t,g, or c
  SITE (10344): n equals a,t,g, or c
  SITE (10345): n equals a,t,g, or c
cttggtgtttcacttagcagtttgggagctataccagcagcagcactagaccccaacattgcaacacttggagagataccacagccaccacttatgggaaacgtggatccttccaaaatagatgaaattaggagaacggtttatgttggaaatctgaattcccaggtaactaattaaagaagaaacaaagcagcagtagcccttattctttttctcttcttaaaaatcatatcagtggatacagtaatatttatctgattttttaaatggatatattttatcaaagtgtcactttgttcccttagacaacgacagctgatcaactacttgaattttttaaacaagttggagaagtgaagtttgtgcggatggcaggtgatgagactcagccaactcggtttgcttttgtggaatttgcagaccaaaattctgtaccaagggcccttgcttttaatggagttatgtttggagacaggccactgaagtaagaaatcctaaacaaagaaattttaatgattttgaaacatttaaagtatttttgatgtaatgaaggctttttttttctttttaatagtaattggcaatttgtggaaaggaagactttgtgttaagtataaatgaaatacatgagatacttaccattttagtctttaaattcctttatttagagacatttattttctcattttctgttttctagggtctaattcagtgttaacattatttatataccctgcataacggttgtaggtctttttccataaactttaatagtcaggttggttttacattatgacactagactaattgagcaacttaacaggtgggttgaactacagtacttccagtaacaactgtggtaaattcaaaatctacagaaggaaattataagtgcccagaaatgttttaaaccagaaattttgacttttgaggtttgcttacatccttgtttgtaaaacgttgataatggccttcgagatactccagaccagaaattctatttcatgcagattgttgaggcatatatagttttgcttgaatttcatagattgctttagttatacaatttgatcaggatttttctgttaaggataagtttttagtgggtacttgtcttcccagtgtggaaggggtaaagcaagacacataatatccattcatgtgcatcagagaagtcactcttacctagtagaggaagaattttttcagatgccttgcacattcaaagctatgtctaactcagccatggttcagcgttggttaaaatggtgtacataatatgatgatatacaggtagcttacccttcttctagagtgtacaggatatcagtaagatcttttgatttgaaaatagaaatgattcattttcatattggtatcaacattttaatttattttaattctaagctatggaaaagcacttaatctagtctgtttgaattaagttagctagggttcaatttttcttttctccctgcttttggttgtattcgcaaggaatgataggaagtggggatgagagattaatcatggttttgaggttgcttttggttatttacgtgcttctgagatgtcctcacgtttataaatatgtgtatcatataaatgtttgtttcatgttttataaaatgtggtgtgtatttgtgatatgctaatatttttaatttagaataaatcactccaacaatgcaatagtaaaaccccctgagatgacacctcaggctgcagctaaggagttagaagaagtaatgaagcgagtacgagaagctcagtcatttatctcagcagctattgaaccaggtaagtacataacgttgttacataggtcatagtttaaagatcatagactcttagaactggaaggaattttagaaatcatcttgttcagtcacttcattttacaaacaagaagactgaaactcaagaaatagtaagtagcatactcatgtcaaagaacaacttagcccatattttatctctttctgtgatactgaattgaggcactttagtctgagctaatcagctctgtattttcatagcaaaatcagtgctcacaagtgatttgctgaaagcaaaaatgttattgcaaggctaaaaagagtacatatatttaaaacgttacgactcagcaggtttacttttcctcaacattttaattttagaagtagagaagagagcccgtgatttagaaaaaaatacagatactgtattttagtaaggtaaaagaacatctatttaaacttttgtgttgctaatgaaaataattaaaaaacccattctaaaaacatctaggtggtttacatttgagcagattttctaaatcaacacttagaatttaagcttcaaattctagcagaataagtggagaaaggacttaaaatcactgtcacaggaattacagacatgttgtaatcgtacgttacggcagcaacaaaatattacgaacagctgtttataatcatctggtttatatgtactgctgcagggtggctgcactcaacgagtttatgcaatgactttcttggatgtttctgaaggaggaggatgtacagagagtaggccccttgcactatatgtggtacattccacttgtgcctgattattaactgggatctttaattgttctgagcttacactgcaaagtgattttttcctcccagagtctggaaagagcaatgaaagaaaaggcggtcgatctcgttcccatactcgctcaaaatccaggtctagctcaaaatcccattctagaaggaaaagatcacaatcaaaacacaggtgagaatttctgctgtcatatttaaattttattttagttttgtatttaaaatattaagattttatgagttttcgtcaaaatatcagaagttagaaattttagtagtgtacacctgaagtgtggttacctttaaatattgttctaattgtaatactgtagttgagaatgaaattttgtctaatgatacttaatttttaaatatttgaacttatctttatttttagaagttagttttgtgtctaaagatactctattccagatttttctaagagtaaactagtctttatatagaagtgacaaaagctgttttcattcttcatattgagaaaagggaacatccttagtgaccatgctgaaaataattgctcaagttgcagcttttttgttttgttttcccagtctattccaagtttggggagcaccaccccagatctttcacgcaattccctattttcagtaccacgtatccaaaggaacactttgagtccttggtattgctggtgataagagcctcctctgcccacttttggacctgaaacacaggagtaacttgcagtttcagcttcagttttagtactttgcttaagctctgtttatcttatttttgatcatagctttgtccttttgattttctttatctgtcatttctttgtctttggtataaaggggaccttaaaatgcaaatttggcaataccatcctaattggaagtaccctaaagatcattactaaagttacaaattttgttgtctattttaaggtacggagggggctgtttttgaaatgtgaaagtatgtatagtggatcctaattgcatgttatgtgtacatacgtactcctatgtatgtcttgagagagcagggagggaagagtgtatctgtgtatgttgggattttaaagaaggagaaaggatttgggggagggaaaaggaaccagtttgttgtacattgttttaccagcaggctcagtttactttgtttttgtgtgtgtgtgtgttgatcaaggagattcaaagaatgaggaaaaataggatgttctttcttagattctagtaaacaagtatacaccagatatactagtgtatacttgtctattcttagtttgcaaaatctcctttggaatatggttttactgcgtttatccaaggacttacagtaagacactttcagaaccaagtgaaggaggttgtttcacatacaagaataaggcagtgcagcagaggccagaatcaggaaaggacagtggaacagaagctgcagtgatactagactgtggatatttccatatgttgacaggatgtggtgagggtaaaggagatcaaggaaataatagaattgggctgaagagtaatattacaacttcttttctgaggaagactgatgacctggatctcatattgtgttgattgtaagagagagctaatgtccaagactggaacaagacaaaacttgatgatgaataaaattgttgtttctttgatcatctaagtgaagttttatgtgctttatgtagatatgtctatacagatgtacacacaatgtctgcgtagcattagaaataatgtatatatattccttttttttccccccccaagatgcagtttcagtccgttgccgaggctggagtgcagtagcttgatctcggctcactgcaacctccacctcccaggcacaagtgatcctcccacctcagcttctcgagtagctaagccacagacacgcaccaccacgcctggctaattttgtattttttgtagaaacggggttttatcatactgcccaggttggtcttgaactcctgagctcaagcgatcctcccaccttggcctccaaaagtgctgggattataggcatggtatacatgttcttaactgacatatatacatacatacatacttttgtcagcatattctgtttttgtgcatgcatgtggaaacatgtagccttaagttcaagaacaaatacaaaagagagaatgagttatctttaaatgagaaaaaaaaaattccttacctaaaaacatttaacttaaagattctgacctggaaggatcccactatcccccagaaatcaggaagggaatgataggcctttcttgacatttcctcctctgctagtgggagttgttgtccttgaatctcaccctgacctattagacttagcatgagcgtgggttgcaggaaccctttaacttaaaggcccaccttctactttttcaccattttcaaatgcttctagagccatgcttcctacctcccaaccctcccccacagcctttccctgttccttccgcttcttatggttagagagaggaaggggtttcttgtcactgtgaccttggctaggactagggaggtatgtttccattttatccaagttttgatgcctgttttatttattgagacatagaaaagatggatagtactataattgttataattttaagtaacctttatagattagaacaggaactgtaagacattttataatattttaatggaaaacaactgatttacaaatgaactttgatgcagcataatggtaagttgctggttttttacagtttaatttaaaaataagattttgcattattcagaataatacaatttcgcattaaaaatgagagttaatgataaatctttagttagattagatctgctcttgactacttctagcattcttaatcagaaaactactagtgggtaagattgacgtgaaaatatttaacgtcacagttaaaatgtaataattactcttagtcactgtcttttgacatctcaattgcagggtaaggttggaagccaagtgatcagtgctttttattattaacttatttatgagagttatacttaatttttaaaaataagttttgcttaaggttggtggaaagcattgctttgaggaaaacaaaagaattatatttttagcaaggacaacttaaaacagaaatcttatagtaagactttttattaagtatgtagaagcaaaggcactttaaaagattaccctatgtggatatctgtaaacggactaataatgttctcagttttgcagttttgccttaacatctactccttaactttcatggctcttaagtactagtgataaagatttcagcaagctatgaattatcttcttgtattaaaaacatggtatgtgatttcttatctagggtctttggaaaaaaataaaataaaaaataatgtggtatgttgaaccaagtgaggctaaaaaaaaaaatatggaatgaagacaattgtatattatttttacagccaaatagtagatgagtagtttaaatggaaattagctattgaaattttgatttgtaatgttgattagtattttaatcagaattttgactaactgaacaaatgtgtttaaaaacaaaagattttgttatgtaatgaggcattattatggaggtttttcctggtttcacaagcatacccacaaacaccatggtcttatttctattatcttctatattatttcttttcgcagatagaatcttgactgtagttgcccaggctggagtagcagtaggagcgacctcagctcattgcaacctctgccccccgggttcagttgattctcccactcagcttcctcagtaactgggaatacaggtgcatgccaccatacccagctaatttttgtatttttagtagagacgggtttcactatgtttggcaaggctgatcttgaaatcctgacctcaaggcaggtggacctcaagtaccacctgcctcggcctcccagagtgctgggattacaggtgtgagccactgtgcccagcccaactatatttcttttactgataattgttctaaatttattaaaacatgactatcaagatgagttttagctgtataaaggatacttatagaagttcattcagcttccttggaatacgtacataaggatataaagtttacatttatgttaacttttaatgatgatgacattgagagttaagatttttaaacatttattttgtgctagagaatactacgcagttttacatacatcatcagttgtaatcctcatgacagccctaagagatgcaggtatgattcctactccactttatagaggaagaaactcaggcttggagaggttaagtgactagccagagttctcacaggtagtgtgtggcagagctgactttcagagccagattgtcagactccaaagctgttgagtctaatcactttgctatttaagttgtatacatctgttttgttacaatttaataagtagttaggatacctcgttatgaaaaaaatcacattctcaaaaaactttttcagtgagaaagggggcctagtccaaattggaataacagttacttttcctgcaattaaacgtttcctgcagttaacagtttcttttcatacaggttgagactcacaaatttgaaaatctgaaattcaaaaggcttcaaaactttttgagcgctttcgtgatgctcaaaggaaatgctcactggagcattttggatttttcagttgtgtgtttgggatgctcaaccagttttatgcgtgtgtatatatagaatgcaaatattcgaaaatctccaaaaatgtgaaattcaaaacacttttggttccaagcatttcacataagggatactcaactggtagctatgattatagttacagctataaaatcaaggcattgcaaatccaatatttgattatatctagttttaacttatgagtaatgatttttattttcctgtcacagtggcgctgtcattaggactgtgcttccttttatatattctttttgtttgttatgacagacagcacacattcacaggaactactcaaccacgtaaccactactccctgtcatgatgtgttatgaccagattacatgcaagtcaacagggaaaaatcttctatactgatttgaggcataaaatgactagcaaaagccacatctgaaaatatacgaaataactgttaaattctttgtttctgtctctgttctagacaatgaaatatccggtaaagtttccagtaaatgtatttcagattatgtaactaaagtattatttaagagaaatttttaaaatattgttaaatactgttaggatagattttaaattttcttgtttgaaagatcgtaaattaagttttgatattctaacaattttttttctttaggagtagatcccataatagatcacgttcaagacagaaagacagacgtagatctaagagcccacataaaaaacgctctaaatcaagggagagacggaagtcaaggagtcgttcgcattcacggtgagttttagagaaattaacaataatttttttttcctcagagttctgttagtgctaagggataatattttaattggcttcatttgttaaaaatctgttgtggtttaggtttttaatgagagaaattaaaccttttttattgttttagtaatctaggattaatattgattgccagtgatctgaatctgatgtcagtgtgactcatgaggtttccaaactactcagttcagcttgcgtagtatgaatagctttgtttagcagcttcttgtacacctgagctatataaaaatgtatatgtaaatgtctgtaggtactataaattgtcttgtgttggtaattgttgaagagagagaggtctttttggaggaggtagaactattttagttatgaatttatttatttttgtttttaaagggacaagagaaaagacactcgagaaaagatcaaggaaaaggaaagagtgaaagagaaagacagggaaaaggagagagagagggaaaaggaacgtgaaaaagaaaaggaacggggtaaaaacaaagaccgggacaaggaacgggaaaaggaccgggaaaaagacaaggaaaaggacagagagagagaacgggaaaaagagcatgagaaggatcgagacaaagagaaggaaaaggaacaggacaaagaaaaggaacgagaaaaagacagatccaaagagatagatgaaaaaagaaagaaggataaaaaatccagaacaccacccaggagttacaatgcatcgcgaagatctcgtagttccagcaggtttgataatgcttaaaatttttacaaagggatttgctgatgacaattggaaacaaaattttttacggagggagaaaaggttactgtacgcaagtggaacctgtaaagtaatataagaacattttctcctaatttcagagtaaacatttctctagcagagtggggaaagagatgatactgggcaacattatttgaagagttttagctattctttgtaaccactattttaatagaataataataattgttattttcttagagggtgggatggcagggaaaggtactttttttaaaaagcacattaagaatttgcgtcttaggctttttcctgaactttttttgaatggtgtgattaattttaatatgtaaaatgattgctgaagttgcagtgttagccctctttgtcacctaagttaatttttatccttattttgttaagtgcataacatttaaattttggtcgtgttttattttgtcagttttaagggttagagtttttccttaggaccgtgatttcagtttattaatagctttactaccaccaggtggcagcaagttgccatagtaacagctgtacaatgagaacaacttttgagatttaagattatctaaacccacatcctttacttcagatgataccatgactgtaaatggaagttcctaacttatactacactatcttaaaaatactaaatatatatattagcaaatttttgaagatttttaaagatggttttttaatagaaaataatttgagataaaggaatatatgtttcccatttttaaaacttgtgctttagtagtttattaataccagcctttgactagataataaaagataatcgtagacatttattgtgcactttactgtatgccagacatgatgtcagtagactttttcatgtctcaccttatttaatcctcacaacaggcctgggagaagattattatcatcactgttttaaaacatgaggaagctgacgctctgtatgagaagtatagtagcccttttcctttattttagagattaagtttgagaattctctagtacttgtacttacttttaaaaactacctcagaagcataaagttgaaagcagtagtatatgttaaaacaaggctcaaaataaacagatcactgctggatttcagcacattgaaccacagattgaagaattaatgtaacctcctttgctgtgggtactggtttgagccttgtaaccacacctttactgcaaagtgattttattgattctgtgtcacacatgcctttgtgtttctgtgattgtttagacattacctttcacagcaccaaatactattttcattcctttttaataacgaatttactttttttgatgacatgggaatgtttaactttttctcgggccagttttaagttgtttggtgtagaggaaagttcaacggtgcttacactattgcattgcactataactagtactatttgntaattagtaggtatatgtatatggaatgaannagagctctttgtgctcagtacgcaccaggctggtagtgcaggtgtcagtgatcgttgatcccgactgctaaacttccccctcctcggttcacgtgattcttgtacctcagcctcccgagttagctgggattacaggtgtgcaaccaccatgcctggctaatttttgtatttttagtagagatggagtttcaccatattggccaggttgatcttgaactcctggcctcaagtgatctgccctccttggcctcccaaagtgctgggattacaggcatcagtcactgcacctggctcaaatacattcttcagtaacaactggggccttgagaataaaagatgactgacattagtttataaaggcagcagtttggaatgtttcatgctttcagaagagcttggtaaagagttacaatttctttgaattttttttttttttttttttttttttagacagagtgtcactttgtcacccaggctagaatgcagtggcacaatatctgctcactgcaacctctgcctcctgggttcagcgattctcctgccttagcttcctgagtagctggaattacaggcgtgtgccaccacactcaactgatttttgtattttatttaatagagatggggtttcaccatgttggccaggctggtctcaaactcctgacctcaggtgatccacccgcctcagcctcccaaagtgctggaattacagacgtgagccgccaccgcccccagccaagagttacaatttcttgtcttttagcatttttctgcttttcaaatgttctgatttgtttactaaatggagaatattttaactgttcaaaaaatagttaatatttttatttctaacattgtctcctaatttatacttttaaagaaaatgatattaaataattttttaatgcttaaatttactgtcattaaaggtgataccaagaaagggaaggaaaaaacaatatttattgagcacctactctgtgtcacactctatgctttgcacattacagattttatcctaaatcctcaacaacctaataaaacttgaattattaattgtctttatttttcagttgaaaaacagattaggttaagtaatatgatcctggttgtatagctgggtaaggtgtataactcaaatttaagtctaaatctcaccaactttagttgttaatacaatttctttctcaagtaattgtctagattgctgtctatggagactttcctctcattatcatcagctagtaggtattagacatccacttgtacatagtgctttctgaacaaataagtaaaagaattacactgataaaggcagagcgattttgtgtaatcttaaagtctggaatacgctgacattcacatgctttgaaaaaagtatttttggttcttaggctgagctgttaagagaatgtcattgatgtaatcaaataatgtatctaatttccacattagaagtgtaattgtggagtgtcttgggaataaaagtgggtaatggaggagagagtcttaggtagaggtagaattgagttgtgttctcagagttcttgagctttgtattttaatacatattatatataccgtgtgagcattttttattttagaaatgaaaaacttaaattattttattagtctcttagaatcagtttcctgaaatggtaaggataacatgaattccagaggatttggttttttagctatgtggtcactgattatcagaacttgtgagatagatcattgggttcattgggtatgtcctcgtaccatatcccttaaattatagacctagtgaagttcattgtttctgagttgaagtagtttagaatatgtatcatttgctaatctgataagcaaaatggtttttaataataataacgtaatctattttataattattcctgtcatatttacttttcagattgtaactgttttgcttacatctaagcaacttgtacactaaattttaaattaatagaacaacagtaatgaaatgataggaggttggagggaaaagcaatttctctctaaaatgatagtaatgtaaatgctttttaagtagacattgttgataattgggtatagaaagttcacattttacaagccagtttatgtttcagtttttgaaaagggcctgttactttgttataatccacagtggggcagcaaggagctagatacatgacaaaggatttgataagcaaaacttgttttagctgctgagaaaatacacttgagagaagcagaaacgccacgccattaatattttttctactgaagaaattgttcaaataaacgaggtgaaaaggaggaggtcttctactcttcctaatatgaagtcttagatgatgttttcatcagtctgtaaaatttatggttcataatttgacccactctaaagttaggtaattgaacatgctcataaaggacataagtttaaactggcctctaaagaatactgttcatatgagaatatcaaggacccttttgcttttgtatatttgaattgccgtttatttcaattgctgtttttaaaaatgatgtgtttttgattttcagggaaaggcgtaggaggaggagcaggagttcttccagatcgccaagaacatcaaaaaccataaaaaggaaatcttctagatctccgtcccccaggaggtaggttgggagcttgtgctaaaactaaacaggagaaagcaataaatattttttgaaattttaaatttctctctttattttttaaactttatattttgaatgaataatacatatgcattattcagaaattaaagataaaagttatgtatcaggaagtcttaatttccactcttgcccatctacactgttcccagaagtaatgacttcgtgaggtttttttgtatatgcttccagtttcatatacagataacaagatgagaatgtatcatttttttctaatacaagaagcaacacagaatacacactgttgtgcccttggttttgtcatttaactaccaggaagtctttttgtcacttaacttaccaggtcagagagagcttcttcaattcctttttataattgcgtaggcttccgttgtatggccataccttagttttttaactaggctacagtagaaggggttttttgaattttttttaccataaattatgtaatgctgtaatgaatagctttggacttaagttgtttttagtgtgcatgtgtgtaggaaaaatctcaagaaatggcattgttaagttagataataagcatgtttgtaatttttgagagatatttcctaattatcctctataagagttggcagcagtttgcactcttaattatgagagaagtgaccacttcatagatttgaaagccatttgtatttctttttctgcgaattgtctgtatactctgcccattttcctgttggcctttttgtttccttttctatttccaagaactcttttatattagggagcttattgtttagtgatgtgattataaataacattctcagtttgctgtttcttttaaaaaattgtttgtgagacttgattttacaaaggtttttcatttttaaaataactttctctttttcttttatgacttcttatgtgagtcaaaaactgataaaaggcttttcctattccaagattatgatagaactttcccattgttccttcttgtacttttatggttttatattttgcagttaaatctctggttagagtcttattcttgtgtacaatatggcaaatgggttcagttttattttacaaatgcttccgtgttgttgcagtaccatttgttaaaaactcaatttttctaacattagtttgatatgttgcctttgtcatgtgctgtgtttttctgtgtgtttgggtctatttctgggtcttctgtgcccttggattggtttgactggccgttcatgtgccagtgtcccacccttttaattattgagattataccgtatttttaagtatttggcaaggcctgttctctatacccctcattgcttttttgagtatagttagctttcctttcagtggttatttttctgcttgaacatgagtcagttgtctgcattccagaaataaaacctattgatgatttgtgttacagttgcattcgatttataaattaacttagggaaaattgataaacaggtttattaataaagattcatgatgacaagtcgtctgtccaggaatatggtgtatctgatgagatcgggcatgctcagggtgatatggctgtagacaaggaatgtggtatatcttattaggccatcattagtgttttcagaaatatttcatcgtttgtttcatacaggctttatgcatttcttaattcctagaaatttttgttgttgttgctgttggaaatgaggtattttctttcattatgtttaattggaggttaggtttgtacataggaaagttattgatttctgtatatttatttttttaatcccactgccttactaattggttatggttttttaggtgattttctgtgattttccagcagaggggtcttttgtttatttgcttataggtttttggcttttgtgagaataacggaaggcttaggatactatagatgcaggccatgtttgtatttttgaaacaaatactttacccaggaaagtcaaaacttttctcttatgaactgaaattagacaaaaagatacattcagaaaatgtcactcctgtctccattccatctgccttgttcccattcaccctgtgtaattgaccaatcatttgattgtctttcctttgtttctctttgcgaaatgaggcggatacatattcatttggttttattttctccttattgcagtacataaacaaatattgaatattcgaaaactattaaataggctatgccaaatagtgttttatgagaacatatggtggcctctgccaaaatgacttgtgtatccttaagaaactaactggggtaagggtggggtaggtcaggttgtagggctcatttatgttactttgcaaaccagcttactgttgatgcttattaacaatgcattattttagatatccagtgttagaaaaggatattttgtcaagaatataatagatcttacaatttcttagaatttaactgacatatcaatattcttatagcagaaataagaaggataaaaagagagaaaaagaaagggaccacatcagtgaaagaagagagagagaacgttcaacgtctatgagaaagagttctaatgatagagatgggaaggagaagttggagaagaacagtacttcacttaaagtaagcagcagtcattcggtgtctggcacttgaaatggttctttattgcatacaaatggttttagactgaaagctctttggggaacagtgtcttgtacattgttggcattttatggcattttaaaatatttaaaatatttaattggtaatttaaaaaaactaaatgttgaagagataagagccaattaaaactaaaaaaactaagttaaatcctaacatggcatgcaataagaaaaatttaagaaatcaacagtaacaaatgtatttgattttatgtagataggatttctgcctgatgccattttcctcaatttatgtttcagcaagtttgaaaagactttgtgtagttacattaggtttgttgggttagaatacctaatggaaaaccacattccaccaagtgagcttttttgtcactgggataaatacttcaagtagttgtgaattaagttacttacactggtaaagtatatttgtatttggaaattatgaattttggaacatctatcttatagttttatgtactgtaatactgatagacgattatcatcatcaataacattgataacatttattaagcatttacgatgtgccgggcactgtttgttctcatttaactcttttaaattgagggtagaaattggagtgctcttgaacagccttttccaggaggcatagtgacttccttttccacatttccttatttttgctgcattggtttgcagattaaaaatctatcctggcatccttggaaattatttcactctttcaatagatctgtctccgtttttcaagtctgtcagcaacatttattgagcacttgcttaaaatttctgttcaccaattctaatttaatttccatggattgtccatcttttatgagaacacaaaggggaaattgatagtgtttgcatattcattttgtgtgaaaacgtaatgagagaaaatcatacccagttttttaaatttgcaaaagataaagtttcacatttttgtcgtcatagcaggcagttcttgaggaaaatattaaatgcataccttaattactcattgtaggagaaagagcacaataaagaaccagattcaagtgtgagcaaagaagtagatgacaaggatgcaccaaggactgaggaaaacaaaatacagcacaatgggaattgtcagctgaatgaagaaaacctctctaccaaaacagaagcagtataggaccgacaagtgtacctctgcactcaatgctggaatcaaatccaaagcttttaattctctcaacaagatgtaaacaggaaagaaatctagttgagcatgaagataggatctaacagcttttccagttgttagatgactttgtggccatcttgttattgagtaagaaaataaagcatggacatcatgaaaataacagatgttacccaaactcatcttctaaaatctgtgcatttccatggtggctgacacacttgtcatgtggtctgttagtgtttgccaagaaccattgcaaataaattgaacatcaaagatccaagtttgtactatccctaaagactggagataagcattggaggctcttttaaaaaatgctagttactgaattttgtattgttttacttttttttttatttcaatatatacagtttgatgatgtgcttgaaattggtgcaaatatatacacacccttgtaagtgcaaagtatgtaagaagttttaacatttacttcacaggacttgtgattgtgttaaattctcactattgtgttttcttttgctcactgtttaggacaatttttctttaaaatagttttgcagattaaaattgcttaaataagtggattaaaaaactgacaatgcatgctactgttctctttcaaaaggaagagcaaccgtgttgaatactaataatgatgaattagtattcagtgtttagaatcattgggactacccacaaagtgagcatttctttttaaattttcttgacatttccaagcttattatgaataatattgcagtgtgtcttgtcagctgtaggtggcaaaggtgcccttataaaaaaggaaactggcttttcaaaatgggctatgggagcacaagctgaagctttagtgccttctacaatgtggtatactgttttctagaattttatatgtgctagtcattctcaattcatatggaatctagatggatatttcatgcatacccatagagaagtgtgtaagtgatatgtcagaagagcttcttactgatttcacctaaaatgagaaggaagtcctgttttcaagaatgacattagagtcatgcagctttgggaccatcagttttatactgtgataattgaaaatgaaacatgttcttattttccttaaattgaagaaaaccctttagttgtctacattggatggccttattacctctcaatcatcttttcataaatgatgtgcagaaattgtacttaaggacttaggagtatatgggaggttattggttttatgtttaaggatacgtttacttgagtttaagatacaggtcatccatcattcttaggctcactttttacagaaagtatgcaaatagtaaagtgacagcactgctaatgtttttccccagtactataacttgtggtttctgaactcattattgttgtatttccaaaaaagtaataccttttaattagtgtattaaaagttaagtataattattttaatgcaatctaatacaatcagattactcagttgccttacctcatgggaagagttacttttttagatctaaaaagctgaatagcatgttagttacttggtttcaacttgagttttcttttaatgttaataagattgaaactttagtatttagtggggaatggaaagagttgcccttgttgcaagtaatgaagcctgatttgattatgaagctgcttaatcactcttcatgtgttcagaattactgttttttttgtttgtttttcctttttgtcactgtgtacattaaaattttggaagatgctttactatgtaaagtatagatggtcattttaatcattcagccacatacggttggctggtaaacagcttattctgatacaagaatgcttgggtgcatatggaaagattgtgaaagagtgtgtcttgcatcaacagctgtcttatttatgatatataagtagaaatagagcaaatgttggaatctgttatttttagtaccatgtctttaataaagctaagtattttagaggaaaatgtttgtttatgcatttcaaaaaagcattttagttttatcctgctcattttagttgtcatagagattgttgtgacgtggagagtgcat

SEQ ID NO: 7790 - DNA, 27501 bp, Homo sapiens
  SITE (16181): n equals a,t,g, or c
  SITE (24223): n equals a,t,g, or c
tccaaagtatgttatgttaagtttcgtgatccatcaagtgttggcgtggcccagcatctaactaacacggtttttattgacagagctctgatagttgttccttgtgcagaaggttggtatctcgctttttttcctcttatttgaatttctgtcctgtctgttattgcctttagctttcctagagattggcaagtagacagtactcttggtgtgtgtgtgaaagtaagaatgaaatttggaggaggtaaacctttttacctaatagtaatattaaaatggttaatttatgacatgtacatttgaggttttacaatttaacattcattggcttctggtttgctttggctttctgtagtcaatttgcagattgcaaagaaagctttctgaaattaaaaaataattgatatgggaaattattttaaatgcataaacaagcatttaccttgtgtgttcaatattaatactattacaaatgaaaatagtgtacacattttggcaaattggggttaagtgatatttataagaaaatatttgtaatttatactttcaagtacactcttaaggtaatttaccttaattgttactatgagatcattattttatattcaatgtaattgtttgctttgcaactggaatttaatgttttcttttactggccccaaaaaggggcaggaggagtgttggaaaaaaaggaaagcaattttccaaagcctccatgaaggaagtagttgttgaagataggaacaaggccttaaagtatccattaaattttatgacctaaactgctttaagaactaattattactaatattttttagtaacttctgtttacagagccactcacgtataatagactgtgctgaattttgacacttctggtgtgtaattaacttttattcagagcactgactagcatgtgtacaggattttagaattgggttattataaattaaaatgtcttaaagtagattttctctggtggatgattgaaactgttttaaacataaaggtttatggaaaacagtttgatgggctttcatatgtaatttttaaaacctcttttagtggccaggctgacattaaaataatatataataagcagtttgctgcactttaaaggttttatgcttatttcagaatgcctgttctgggatgtcaaaaacattacagtctaatacagtgagtaccaggctcgtattttttaagtcccagaataggacattctcagtatttttcagataaatttggaagtgtctttcccatgcttgggggttagagtgggtagggaagataaaaatggattaaagttaattattggccaaatgtatctttatctgctgatctgtaaggctacagtaagccccaaattggtgaggtgggaaaggagctggtgaatggtttcgttctacaaactttgtagtgaaatttcatactgagaaactgcatgggaaaaaagaaatcaggtaaaaggtttattaaactggaatattaattatatcagaaaattaataccaccaataacactgggtcttttattgtgttagcttattactgaattggaaggaagaattttatcagtgttgcttggttgaaacctgctttattcccatagaatctttcatatatctgagaagccctactgtattttgttataaatgttcaagatgatgggcgtgtagatgtcccttttattgtttattttacttgatagagatgaataaatgcacagtcagatgtacctttttagtgtttttaatattacaacttggacagttttactgtttttgaacagaaaaatttaagcatacttttattgcaatttagttataagtaagtaaatattttgaaacactaacctacagttggtattggtgaaacattcagatatacgtttttcattagttgtattaaatacggcagagatgaatttatggaacctcgagaatttcacagtgagctgttaaaatactgattatgcactacaagcaaagaaatagtgcattattgtactaaaaaagatagcagagtgagtgtgaaataaccaaagaaaagtattccagtggagtaagttctgtaagaggagatgtgctgtggtgctgtaagcaagcagtgttctgttgacctcactgaatgcatcctttccttgatgttgaacaaacagcatcatgacataagtgagaaaaaccatagaaaaaaatttaagaagttttttcagtttctttgaattgctgttttttagtgtagacagtaatgtgagaagatcctaagttgtaaaagtaacatttgatgtgtaacagtttcatgcatattaagccttagcctttgttaataaaacatgccatttcaaaataaaatatgctttcattatacttgtccaaatatgacctctttttgttgttgcgtgcatttcagatttctttttataaatgttaacacgtagaaaaagatacggtcaaacataacaagggtgtcagcctaatcatcagtcataactttatgtccacattttctggtagatggattttgactattaatttggttttgtatgttttctctatgtgatatttgtgcattattagatgactagactggccaaggcagacctgttacacttgcctgagttaggcattgtttgccatgccactaaacctgccgtcaagtgaaaccttcattggggaaatgagatcggagtctgaaccgcagaagatggacgccctgtctctgttttttattgttttactttaatttcatttctttttctttattttgtccctttttttgtttttgtttttgtttttgttttgttaaatctctttcactttaacttgtgagctggttttcccagttctttgtaaatggtatttcattaagggttcataacgtgttgcaaattatattgggagatgattagtagagctcaaccttaagataaagcaaattttcatgtggtaaattaggatacagtgttgtgaagctcattgtgagtcttaatttgtgtgtatggactcataaggtacattttattcttgaaacattaaaacactgataagtatctcaggaacactttctgatctcagcgcaacatttttctagtttttttcccccctagtctacatctctcataaaaactgatagcttctaatttttgtccttccccctggaattttaggcatacaaaatcatcaaggaaaataagtaaatataacaatctgggagtaaagaagagcctttcatttttatgatggttatttatcatataacttatttccttgacttatgaagactttttgttgcctatgtggggaatggatatttgagaaacttaagtatttgcatgtaggtttttgttagcttgaattttttgttgaatatttttcagaggttactagcttctaaatggattctgagattaggactataatactgtgagagatgttttcctcagttgactttgaggagtatagtttgggaaaaatgctaaatgcttatttgttttatacttttataagctctgttatttggagggtaaatttggtagaattctatcttggaaattaagcaatggagctttttcttaaagtacttttgccattacctttaggtaattagaataagtatatagagtaattagaatggtaattgaaagttaatttattaaaaaatgtgcttatagtggatttatacatttatagtagtatactatatttatagtagtatactcttttgaaaggcagtgggagagtttgacaacctactgatacttaagctgaaagtgaaagacttcataatactaagtagtcaacttttggccagtgttgaataccctttttgtttgtatagtctttctacaatgtcttcaataggtagttttacttattaaaggacaagtaatattaaatttgggacattactagattagaactctgagtttccttaggtgcatacattaaggtagtgacgatggagtttctgcctcaaaacctcaatttatcaagaatgttcaggttttacaaacctttgagataataccaatttataacagataaaacaggtgaaatcaatataaatagtatagtgtatatgtgggtatatataaatacatgtgttaataccaataactaatacatataaagcagattattgttatttgatgttttcagtaaggcctacctgccttttgttgatgcatgttaagaaatctgttctccagaattttcactgaaataataaagataactttgtttttgaaagtaataaagtaatataaacttagatgctgcaaaggtagaaaatagtaggttttatttgcttcctataaataaggcatagccattatttaaatcaagttttaaattccaacttgagttccatccatgtttaaagatatattcagataatattgtttagggatttatctctgcacatgtggttgttttaaatatttttacaactgaaaccaggcatggtgcttgtggaaatttactgcatatgctatatttcagtttagcatgattttgtgcattgtcttttaaaacacttttggagaattaataatagaaatgctttaccagctaccacatgagtgttcttctaaatatatccacatgtagtcaactatttaagaattttttttttttttttttgcctaaggggataaggaaaaataatgtgaaagttgcagtccttatcagaagtaattgattagaattcagcaatgaatatgccaaatcgtacttatttcagagtaagtttttcatttttttaggttgtagggagtttttttcctactgagtgttattagattattttaatgttactattgttattaggcaattaaaatgtttttaagcaagctttaaggcattaacctcccccttcagataagtatacataaattggttctaaaagttaataagaagttttctgaaaccagggaactttttttttcctgaaacatttttagtagtttcccaaggcatattttttggaactgagttcttttaggcatctctgatgttggtgagatgctttattaactgaatggatgtaggcttccttttacgttgaagttgattacatggagtaagtttttgttttctatttgaaattaaatggaatctgttggagggttatcaaaattgtttgcatcacaaataggtagtttcagtaacaggataggggcactcattaagaaatttcaattcgcacatatttgttttttctttttcttttttttgactaatttggttatttgccatttctggggattaaactttaaaaaatgttcttcttttctgtatctgatgttctgtgtgctattagtgatgcagccaacacgaacggttgtcatgtgtaacacaactttcgatcaccgcgaaaacaccgtcctgggaaagcgtccatgcttgatatcgttggttcatgaacattaagtttccagtacaggtgacccatagctcaaagtgttaaataattgtctacattattcaatttttaaaataatattccattaatgagattgttaatatttgaagttttgctcacttttatttttcctagtagagcaggataaaaggaaagacttaagttcttatttatttctttatacagatctgatagatagattcatttattattattattttttaactgcaagggtaattgtaaaatcatagtgtaaagtttgtgtggtgtttctgctttttgtaatgtttggaacttgcctctgcaggtaaaatcccagaggaatccaaagccctctctttattggctcctgctccaaccatgacaagtctgatgcctggtgcaggattgcttccaataccgaccccaaatcctttgactactgtaagtactataagctggcttatgaaagaggtgaatgttcaactgtgtgaccagttgaatagagagcttcagattatttgcatttggatcttcttcttttttttttttttaatagagaggattcgaaatcactgcttaaactttttttttcactttatcagtgacttaacgctgcgttttggatttactcctgaagtaataggggattcatttaaatttgagaaccccaatagattattcactagaaaatcagttattaaaactcaatattttagatagcatagaggatctaggtaactgtatttctcagttaatgaggattaaatccatttaaaatacgtgaaatgatccacaactttggtaatgggaaaaaaacaggtctttgtctgatattgagaaaatgtaataaggtgaaaacatggcaaaatatttttccattaactatgcagaattaaatcataatttagtaatgcttcctttgtgatttccaagtgggattaaaaaaggatattacggccaggcgcggtggctcatgcctgtaatcccagcactttgggaggccgaggcaggtggatcatgaggtcgggagatcgagaccatcctggctaacacagtgaaaccccgtctccactaaaaatacaaaaacttctctgggcgtggtggcgggtgcccgtagtcccagctgctcgggaggccgaggctggagaatggcgtgagcctgggaggcggagcttgcagtgagcgaagattgcgccactgcactccagcctgggcgacagagggagagtctcaaaaaaaaaaaaagggtatattactattactggttcttggtttttgcttaaaaaactctggccatatttattttaaaagaagtgccatttttcttcaaaagacaacatagaacaaaatacaaagcttgccttaattggaagttgaatctagctttgtggtgttggataggaattgaactaagaaatgaactatgtgattgtagttaatttatctagattgtaagagtggtttctgaaattttgaagtgcaaaattttagatttgtagtttttacataacattgctatgctgaagacctgcattctgattcttggggggaaatgttttttaattgaacttatgtgttcaaggaacagaatggtggtcagtatggttgaagcatagtgagtgagggtcatgagtgtttgagattggaggggatagataggacacagattatggtagggctttttagaccatggaaagaggggtttgagttttattcttaaggtaattagaaaccattgatgggttttaagcagggatatgacatgatttgacatgttttaaaaagatcagactggctgctgtgataagtgacattgatttcataaacttccgttttcaccattagcaagtgccattacttaacagttgttaaaatcttagttctgtatcatatttgtatatatagtcattaatggtcaaaatgttctctaatagtataagtggaaatgaaaagagttgtgcttttttccttgaaagctcttttcgttctgaaaaattttttctgttttcaaattctgagatcttacatttcttctagtttacattcatattaaaaataatacgttccttaatgctgaaagtaaaaactgaatttagtgatgctatagaaagatcattcaaagtttttttgaaggtttttgcccttttcctaccatggcataagtaagggctcaatattttagatatattttcttaggtaaactttcagcatgataataataacccatttcttagggttgatatgaggattaagttactacctcagttaaattcgatgctatgataattgttgactgttaggaactcatactcatactcatctgtgtttttcaatgaccaaggtacagttgattctcattctttgtgaattctgtatttttgaattcacttagtaagtaaaatttttttgaaatccccacatcaacagttggagcacttttgtggtcgttcgtggacatacacagagtggtgaaaaattggggtttgtctatttgcacggaggtcgaaatcttcttgttttggcactcaggcagtaaacaagcacgcagtctgtttagtgctatgttctttgaattgttgtgctttttgttggtgatttcactgttaagatgggcccacaagtgtagtgccaaactgctgtgtagtgttcctaagtacagggagattgtgaagtgcctcatggagaaaatattaaatacatgtattagataagcttcattcaggcctgaattgtagcgctgctggctgtaagttcagtgttaatgaatcgacaatatataacagctaaggtgtctttaaacagaagaacatataaaataaggttaaatattttactagttaatgtaaatgtgaccagaggcttgtaggaacttcaccctgtattttccctaggaataatggttcaatattcaataattcattgttcacggaaactatagaacatagctatgtcaggtaatgagaaacagcctgtcttttagggtcaagtttaaaagtggctaaaatatccagacagtaaaatatatttcaaattacatttaaaactaatgtgaccttactttaataactcagacatatatatgactgaaagttcggagtccctagtctcctttcattcttgttgagttagttcattcttttcaagattagagaatggtatctttggatactaatagaaaatatgtgttctgtgtgttttttttcttctttcgatagcttggtgtttcacttagcagtttgggagctataccagcagcagcactagaccccaacattgcaacacttggagagataccacagccaccacttatgggaaacgtggatccttccaaaatagatgaaattaggagaacggtttatgttggaaatctgaattcccaggtaactaattaaagaagaaacaaagcagcagtagcccttattctttttctcttcttaaaaatcatatcagtggatacagtaatatttatctgattttttaaatggatatattttatcaaagtgtcactttgttcccttagacaacgacagctgatcaactacttgaattttttaaacaagttggagaagtgaagtttgtgcggatggcaggtgatgagactcagccaactcggtttgcttttgtggaatttgcagaccaaaattctgtaccaagggcccttgcttttaatggagttatgtttggagacaggccactgaagtaagaaatcctaaacaaagaaattttaatgattttgaaacatttaaagtatttttgatgtaatgaaggctttttttttctttttaatagtaattggcaatttgtggaaaggaagactttgtgttaagtataaatgaaatacatgagatacttaccattttagtctttaaattcctttatttagagacatttattttctcattttctgttttctagggtctaattcagtgttaacattatttatataccctgcataacggttgtaggtctttttccataaactttaatagtcaggttggttttacattatgacactagactaattgagcaacttaacaggtgggttgaactacagtacttccagtaacaactgtggtaaattcaaaatctacagaaggaaattataagtgcccagaaatgttttaaaccagaaattttgacttttgaggtttgcttacatccttgtttgtaaaacgttgataatggccttcgagatactccagaccagaaattctatttcatgcagattgttgaggcatatatagttttgcttgaatttcatagattgctttagttatacaatttgatcaggatttttctgttaaggataagtttttagtgggtacttgtcttcccagtgtggaaggggtaaagcaagacacataatatccattcatgtgcatcagagaagtcactcttacctagtagaggaagaattttttcagatgccttgcacattcaaagctatgtctaactcagccatggttcagcgttggttaaaatggtgtacataatatgatgatatacaggtagcttacccttcttctagagtgtacaggatatcagtaagatcttttgatttgaaaatagaaatgattcattttcatattggtatcaacattttaatttattttaattctaagctatggaaaagcacttcatctagtctgtttgaattaagttagctagggttcaatttttcttttctccctgcttttggttgtattcgcaaggaatgataggaagtggggatgagagattaatcatggttttgaggttgcttttggttattctgtatatcattcttacgtgcttctgagatgtcctcacgtttataaatatgtgtatcatataaatgtttgtttcatgttttataaaatgtggtgtgtatttgtgatatgctaatatttttaatttagaataaatcactccaacaatgcaatagtaaaaccccctgagatgacacctcaggctgcagctaaggagttagaagaagtaatgaagcgagtacgagaagctcagtcatttatctcagcagctattgaaccaggtaagtacataacgttgttacataggtcatagtttaaagatcatagactcttagaactggaaggaattttagaaatcatcttgttcagtcacttcattttacaaacaagaagactgaaactcaagaaatagtaagtagcatactcatgtcaaagaacaacttagcccatattttatctctttctgtgatactgaattgaggcactttagtctgagctaatcagctctgtattttcatagcaaaatcagtgctcacaagtgatttgctgaaagcaaaaatgttattgcaaggctaaaaagagtacatatatttaaaacgttacgactcagcaggtttacttttcctcaacattttaattttagaagtagagaagagagcccgtgatttagaaaaaaatacagatactgtattttagtaaggtaaaagaacatctatttaaacttttgtgttgctaatgaaaataattaaaaaacccattctaaaaacatctaggtggtttacatttgagcagattttctaaatcaacacttagaatttaagcttcaaattctagcagaataagtggagaaaggacttaaaatcactgtcacaggaattacagacatgtgtaatcgtacgttacggcagcaacaaaatattacgaacagctgtttataatcatctggtttatatgtactgctgcagggtggctgcactcaacgagtttatgcaatgactttcttggatgtttctgaaggaggaggatgtacagagagtaggccccttgcactatatgtggtacattccacttgtgcctgattattaactgggatctttaattgttctgagcttacactgcaaagtgattttttcctcccagagtctggaaagagcaatgaaagaaaaggcggtcgatctcgttcccatactcgctcaaaatccaggtctagctcaaaatcccattctagaaggaaaagatcacaatcaaaacacaggtgagaatttctgctgtcatatttaaattttattttagttttgtatttaaaatattaagattttatgagttttcgtcaaaatatcagaagttagaaattttagtagtgtacacctgaagtgtggttacctttaaatattgttctaattgtaatactgtagttgagaatgaaattttgtctaatgatacttaatttttaaatatttgaacttatctttatttttagaagttagttttgtgtctaaagatactctattccagatttttctaagagtaaactagtctttatatagaagtgacaaaagctgttttcattcttcatattgagaaaagggaacatccttagtgaccatgctgaaaataattgctcaagttgcagcttttttgttttgttttcccagtctattccaagtttggggagcaccaccccagatctttcacgcaattccctattttcagtaccacgtatccaaaggaacactttgagtccttggtattgctggtgataagagcctcctctgcccacttttggacctgaaacacaggagtaacttgcagtttcagcttcagttttagtactttgcttaagctctgtttatcttatttttgatcatagctttgtccttttgattttctttatctgtcatttctttgtctttggtataaaggggaccttaaaatgcaaatttggcaataccatcctaattggaagtaccctaaagatcattactaaagttacaaattttgttgtctattttaaggtacggagggggctgtttttgaaatgtgaaagtatgtatagtggatcctaattgcatgttatgtgtacatacgtactcctatgtatgtcttgagagagcagggagggaagagtgtatctgtgtatgttgggattttaaagaaggagaaaggatttgggggagggaaaaggaaccagtttgttgtacattgttttaccagcaggctcagtttactttgtttttgtgtgtgtgtgtgttgatcaaggagattcaaagaatgaggaaaaataggatgttctttcttagattctagtaaacaagtatacaccagatatactagtgtatacttgtctattcttagtttgcaaaatctcctttggaatatggttttactgcgtttatccaaggacttacagtaagacactttcagaaccaagtgaaggaggttgtttcacatacaagaataaggcagtgcagcagaggccagaatcaggaaaggacagtggaacagaagctgcagtgatactagactgtggatatttccatatgttgacaggatgtggtgagggtaaaggagatcaaggaaataatagaattgggctgaagagtaatattacaacttcttttctgaggaagactgatgacctggatctcatattgtgttgattgtaagagagagctaatgtccaagactggaacaagacaaaacttgatgatgaataaaattgttgtttctttgatcatctaagtgaagttttatgtgctttatgtagatatgtctatacagatgtacacacaatgtctgcgtagcattagaaataatgtatatatattccttttttttccccccccaagatgcagtttcagtccgttgccgaggctggagtgcagtagcttgatctcggctcactgcaacctccacctcccaggcacaagtgatcctcccacctcagcttctcgagtagctaagccacagacacgcaccaccacgcctggctaattttgtattttttgtagaaacggggttttatcatactgcccaggttggtcttgaactcctgagctcaagcgatcctcccaccttggcctccaaaagtgctgggattataggcatggtatacatgttcttaactgacatatatacatacatacatacttttgtcagcatattctgtttttgtgcatgcatgtggaaacatgtagccttaagttcaagaacaaatacaaaagagagaatgagttatctttaaatgagaaaaaaaaaattccttacctaaaaacatttaacttaaagattctgacctggaaggatcccactatcccccagaaatcaggaagggaatgataggcctttcttgacatttcctcctctgctagtgggagttgttgtccttgaatctcaccctgacctattagacttagcatgagcgtgggttgcaggaaccctttaacttaaaggcccaccttctactttttcaccattttcaaatgcttctagagccatgcttcctacctcccaaccctcccccacagcctttccctgttccttccgcttcttatggttagagagaggaaggggtttcttgtcactgtgaccttggctaggactagggaggtatgtttccattttatccaagttttgatgcctgttttatttattgagacatagaaaagatggatagtactataattgttataattttaagtaacctttatagattagaacaggaactgtaagacattttataatattttaatggaaaacaactgatttacaaatgaactttgatgcagcataatggtaagttgctggttttttacagtttaatttaaaaataagattttgcattattcagaataatacaatttcgcattaaaaatgagagttaatgataaatctttagttagattagatctgctcttgactacttctagcattcttaatcagaaaactactagtgggtaagattgacgtgaaaatatttaacgtcacagttaaaatgtaataattactcttagtcactgtcttttgacatctcaattgcagggtaaggttggaagccaagtgatcagtgctttttattattaacttatttatgagagttatacttaatttttaaaaataagttttgcttaaggttggtggaaagcattgctttgaggaaaacaaaagaattatatttttagcaaggacaacttaaaacagaaatcttatagtaagactttttattaagtatgtagaagcaaaggcactttaaaagattaccctatgtggatatctgtaaacggactaataatgttctcagttttgcagttttgccttaacatctactccttaactttcatggctcttaagtactagtgataaagatttcagcaagctatgaattatcttcttgtattaaaaacatggtatgtgatttcttatctagggtctttggaaaaaaataaaataaaaaataatgtggtatgttgaaccaagtgaggctaaaaaaaaaaaatatggaatgaagacaatagtatattatttttacagccaaatagtagatgagtagtttaaatgggaaattagctatggaaatttggattggtaatgttgattagtattttaatcagaattttggactaactgaaaaatgtgtttaaaaacaaaagattttgttattaatgaggattatttggaggtttttctggtttcaaagcataccacaaaacatggtctttttcttttttcttttatttttttgcgatagaatcttgctgtgttgcccaggctggagtgcagtggagcgacctcagctcattgcaacctctgccccccgggttcagttgattctcccacctcagcttcctcagtaactgggaatacaggtgcatgccaccatacccagctaatttttgtatttttagtagagacgggtttcactatgtttggcaaggctgatcttgaaatcctgacctcaaggcaggtggacctcaagtaccacctgcctcggcctcccagagtgctgggattacaggtgtgagccactgtgcccagcccaactatatttcttttactgataattgttctaaatttattaaaacatgactatcaagatgagttttagctgtataaaggatacttatagaagttcattcagcttccttggaatacgtacataaggatataaagtttacatttatgttaacttttaatgatgatgacattgagagttaagatttttaaacatttattttgtgctagagaatactacgcagttttacatacatcatcagttgtaatcctcatgacagccctaagagatgcaggtatgattgctactccactttatagaggaagaaactcaggcttggagaggttaagtgactagccagagttctcacaggtagcgtgtggcagagctgactttcagagccagattgtcagactccaaagctgttgagtctaatcactttgctatttaagttgtgtacatctgttttgttacaatttaataagcagttaggatacctcgttatgaaaaaaatcacattctcaaaaaactttttcagtgagaaagggggcctagtccaaattggaataacagttacttttcctgcaattaaacgtttcctgcagttaacagtttcttttcatacaggttgagactcacaaatttgaaaatctgaaattcaaaaggcttcaaaactttttgagcgctttcgtgatgctcaaaggaaatgctcactggagcattttggatttttcagttgtgtgtttgggatgctcaaccagttttatgcgtgtgtatatatagaatgcaaatattcgaaaatctccaaaaatgtgaaattcaaaacacttttggttccaagcatttcacataagggatactcaactggtagctatgattatagttacagctataaaatcaaggcatgcaaatccaatatttgattatatctagttttaacttatgagtaatgatttttattttcctgtcacagtggcgctgtcattaggactgtgcttccttttatatattctttntgttgttatgacagacagcacacattcacaggaactactcaaccacgtaaccactactccctgtcatgatgtgttatgaccagattacatgcaagtcaacagggaaaaatcttctatactgatttgaggcataaaatgactagcaaaagccacatctgaaaatatacgaaataactgttaaattcttgtttctgtctctgttctagacaatgaaatatccggtaaagtttccagtaaatgtatttcagattatgtaactaaagtattatttaagagaaatttttaaaatattgttaaatactgttaggatagattttaaattttcttgtttgaaagatcgtaaattaagttttgatattctaacaattttttttctttaggagtagatcccataatagatcacgttcaagacagaaagacagacgtagatctaagagcccacataaaaaacgctctaaatcaagggagagacggaagtcaaggagtcgttcgcattcacggtgagttttagagaaattaacaataatttttttttcctcagagttctgttagtgctaagggataatattttaattggcttcatttgttaaaaatctgttgtggtttaggtttttaatgagagaaattaaaccttttttattgttttagtaatctaggattaatattgattgccagtgatctgaatctgatgtcagtgtgactcatgaggtttccaaactactcagttcagcttgcgtagtatgaatagctttgtttagcagcttcttgtacacctgagctatataaaaatgtatatgtaaatgtctgtaggtactataaattgtcttgtgttggtaattgttgaagagagagaggtctttttggaggaggtagaactattttagttatgaatttatttatttttgtttttaaagggacaagagaaaagacactcgagaaaagatcaaggaaaaggaaagagtgaaagagaaagacagggaaaaggagagagagagggaaaaggaacgtgaaaaagaaaaggaacggggtaaaaacaaagaccgggacaaggaacgggaaaaggaccgggaaaaagacaaggaaaaggacagagagagagaacgggaaaaagagcatgagaaggatcgagacaaagagaaggaaaaggaacaggacaaagaaaaggaacgagaaaaagacagatccaaagagatagatgaaaaaagaaagaaggataaaaaatccagaacaccacccaggagttacaatgcatcgcgaagatctcgtagttccagcaggtttgataatgcttaaaatttttacaagggatttgctgatgacaattggaaacaaaattttttacggagggagaaaaggttactgtacgcaagtggaacctgtaaagtaatataagaacattttctcctaatttcagagtaaacatttctctagcagagtggggaaagagatgatactgggcaacattatttgaagagttttagctattctttgtaaccactattttaatagaataataataattgttattttcttagagggtgggatggcagggaaaggtactttttttaaaaagcacattaagaatttgcgtcttaggctttttcctgaactttttttgaatggtgtgattaattttaatatgtaaaatgattgctgaagttgcagtgttagccctctttgtcacctaagttaatttttatccttattttgttaagtgcataacatttaaattttggtcgtgttttattttgtcagttttaagggttagagtttttccttaggaccgtgatttcagtttattaatagctttactaccaccaggtggcagcaagttgccatagtaacagctgtacaatgagaacaacttttgagatttaagattatctaaacccacatcctttacttcagatgataccatgactgtaaatggaagttcctaacttatactacactatcttaaaaatactaaatatatatattagcaaatttttgaagatttttaaagatggttttttaatagaaaataatttgagataaaggaatatatgtttcccatttttaaaacttgtgctttagtagtttatttttaataccagcctttgactagataataaaagataatcgtagacatttattgtgcactttactgtatgccagacatgatgtcagtagactttttcatgtctcaccttatttaatcctcacaacaggcctgggagaagattattatcatcactgttttaaaacatgaggaagctgacgctctgtatgagaagtgtagtagcccttttcctttattttagagattaagtttgagaattctctagtacttgtacttacttttaaaaactacctcagaagcataaagttgaaagcagtagtatatgttaaaacaaggctcaaaataaacagatcactgctggatttcagcacattgaaccacagattgaagaattaatgtaacctcctttgctgtgggtactggtttgagccttgtaaccacacctttactgcaaagtgattttattgattctgtgtcacacatgcctttgtgtttctgtgattgtttagacattacctttcacagcaccaaatactattttcattcctttttaataacgaatttactttttttgatgacatgggaatgtttaactttttctcgggccattttaagttgtttggtgtagaggaaagttcaagtgttcacattcattcctaaatatatatgtatatattttttgaaacagagtcttgctcatcgcccaggctggagtgcagtgtcatgatcttgacccactgcaacctccccctcctcggttcacgtgattcttgtacctcagcctcccgagtagctgggattacaggtgtgcaccaccatgcctggctaatttttgtatttttagtagagatggagtttcaccatattggccaggttgatcttgaactcctggcctcaagtgatctgccctccttggcctcccaaagtgctgggattacaggcatcagtcactgcacctggctcaaatacattcttcagtaacaactggggccttgagaataaaagatgactgacattagtttataaaggcagcagtttggaatgtttcatgctttcagaagagcttggtaaagagttacaatttctttgaatttttttttttttttttttttttttagacagagtgtcactttgtcacccaggctagaatgcagtggcacaatatctgctcactgcaacctctgcctcctgggttcagcgattctcctgccttagcttcctgagtagctggaattacaggcgtgtgccaccacactcaactgatttttgtattttatttaatagagatggggtttcaccatgttggccaggctggtctcaaactcctgacctcaggtgatccacccgcctcagcctcccaaagtgctggaattacagacgtgagccgccaccgcccccagccaagagttacaatttcttgtcttttagcatttttctgcttttcaaatgttctgatttgtttactaaatggagaatattttaactgttcaaaaaatagttaatatttttatttctaacattgtctcctaatttatacttttaaagaaaatgatattaaataattttttaatgcttaaatttactgtcattaaaggtgataccaagaaagggaaggaaaaaacaatatttattgagcacctactctgtgtcacactctatgctttgcacattacagattttatcctaaatcctcaacaacctaataaaacttgaattattaattgtctttatttttcagttgaaaaacagattaggttaagtaatatgatcctggttgtatagctgggtaaggtgtataactcaaatttaagtctaaatctcaccaactttagttgttaatacaatttctttctcaagtaattgtctagattgctgtctatggagactttcctctcattatcgtcagctagtaggtattagacatccacttgtacatagtgctttctgaacaaataagtaaaagaattacactgataaaggcagagcgattttgtgtaatcttaaagtctggaatacgctgacattcacatgctttgaaaaaagtatttttggttcttaggctgagctgttaagagaatgtcattgatgtaatcaaataatgtatctaatttccacattagaagtgtaattgtggagtgtcttgggaataaaagtgggtaatggaggagagagtcttaggtagaggtagaattgagttgtgttctcagagttcttgagctttgtattttaatacatattatatataccgtgtgagcattttttattttagaaatgaaaaacttaaattattttattagtctcttagaatcagtttcctgaaatggtaaggataacatgaattccagaggatttggttttttagctatgtggtcactgattatcagaacttgtgagatagatcattgggtatgtcctcgtaccatatcccttaaattatagacctagtgaagttcattgtttctgagttgaagtagtttagaatatgtatcatttgctaatctgataagcaaaatggtttttaataataataacgtaatctattttataattattcctgtcatatttacttttcagattgtaactgttttgcttacatctaagcaacttgtacactaaattttaaattaatagaacaacagtaatgaaatgataggaggttggagggaaaagcaatttctctctaaaatgatagtaatgtaaatgctttttaagtagacattgttgataattgggtatagaaagttcacattttacaagccagtttatgtttcagtttttgaaaagggcctgttactttgttataatccacagtggggcagcaaggagctagatacatgacaaaggatttgataagcaaacttgttttagctgctgagaaaatacacttgagagaagcagaaacgccacgccattaatattttttctactgaagaaattgttcaaataaacgaggtgaaaaggaggaggtcttctactcttcctaatatgaagtcttagatgatgttttcatcagtctgtaaaatttatggttcataatttgacccactctaaagttaggtaattgaacatgctcataaaggacataagtttaaactggcctctaaagaatactgttcatatgagaatatcaaggacccttttgcttttgtatatttgaattgccgtttatttcaattgctgtttttaaaaatgatgtgtttttgattttcagggaaaggcgtaggaggaggagcaggagttcttccagatcgccaagaacatcaaaaaccataaaaaggaaatcttctagatctccgtcccccaggaggtaggttgggagcttgtgctaaaactaaacaggagaaagcaataaatattttttgaaattttaaatttctctctttattttttaaactttatattttgaatgaataatacatatgcattattcagaaattaaagataaaagttatgtatcaggaagtcttaatttccactcttgcccatctacactgttcccagaagtaatgacttcgtgaggtttttttgtatatgcttccagtttcatatacagataacaagatgagaatgtatcatttttttctaatacaagaagcaacacagaatacacactgttgtgcccttggttttgtcatttaactaccaggaagtctttttgtcacttaacttaccaggtcagagagagcttcttcaattcctttttataattgcgtaggcttccgttgtatggccataccttagttttttaactaggctacagtagaaggggttttttgaattttttttaccataaattatgtaatgctgtaatgaatagctttggacttaagttgtttttagtgtgcatgtgtgtaggaaaaatctcaagaaatggcattgttaagttagataataagcatgtttgtaatttttgagagatatttcctaattatcctctataagagttggcagcagtttgcactcttaattatgagagaagtgaccacttcatagatttgaaagccatttgtatttctttttctgcgaattgtctgtatactctgcccattttcctgttggcctttttgtttccttttctatttccaagaactcttttatattagggagcttattgtttagtgatgtgattataaataacattctcagtttgctgtttcttttaaaaaattgtttgtgagacttgattttacaaaggtttttcatttttaaaataactttctctttttcttttatgacttcttatgtgagtcaaaaactgataaaaggcttttcctattccaagattatgatagaactttcccattgttccttcttgtacttttatggttttatattttgcagttaaatctctggttagagtcttattcttgtgtacaatatggcaaatgggttcagttttattttacaaatgcttccgtgttgttgcagtaccatttgttaaaaactcaatttttctaacattagtttgatatgttgcctttgtcatgtgctgtgtttttctgtgtgtttgggtctatttctgggtcttctgtgcccttggattggtttgactggccgttcatgtgccagtgtcccacccttttaattattgagattataccgtatttttaagtatttggcaaggcctgttctctatacccctcattgcttttttgagtatagttagctttcctttcagtggttatttttctgcttgaacatgagtcagttgtctgcattccagaaataaaacctattgatgatttgtgttacagttgcattcgatttataaattaacttagggaaaattgataaacaggtttattaataaagattcatgatgacaagtcgtctgtccaggaatatggtgtatctgatgagatcgggcatgctcagggtgatatggctgtagacaaggaatgtggtatatcttattaggccatcattagtgttttcagaaatatttcatcgtttgtttcatacaggctttatgcatttcttaattcctagaaatttttgttgttgttgctgttggaaatgaggtattttctttcattatgtttaattggaggttaggtttgtacataggaaagttattgatttctgtatatttatttttttaatcccactgccttactaattggttatggttttttaggtgattttctgtgattttccagcagaggggtcttttgtttatttgcttataggtttttggcttttgtgagaataacggaaggcttaggatactatagatgcaggccatgtttgtatttttgaaacaaatactttacccaggaaagtcaaaacttttctcttatgaactgaaattagacaaaaagatacattcagaaaatgtcactcctgtctccattccatctgccttgttcccattcaccctgtgtaattgaccaatcatttgattgtctttcctttgtttctctttgcgaaatgaggcggatacatattcatttggttttattttctccttattgcagtacataaacaaatattgaatattcgaaaactattaaataggctatgccaaatagtgttttatgagaacatatggtggcctctgccaaaatgacttgtgtatccttaagaaactaactggggtaagggtggggtaggtcaggttgtagggctcatttatgttactttgcaaaccagcttactgttgatgcttattaacaatgcattattttagatatccagtgttagaaaaggatattttgtcaagaatataatagatcttacaatttcttagaatttaactgacatatcaatattcttatagcagaaataagaaggataaaaagagagaaaaagaaagggaccacatcagtgaaagaagagagagagaacgttcaacgtctatgagaaagagttctaatgatagagatgggaaggagaagttggagaagaacagtacttcacttaaagtaagcagcagtcattcggtgtctggcacttgaaagtggcttctcttactctgcantaccaaactcggttcttcagacgtgaaacgctctcttggcggaacagctgtcttgtacattgttggcattttatggcattttaaaatatttaaaatatttaattggtaatttaaaaaaactaaatgttgaagagataagagccaattaaaactaaaaaaactaagttaaatcctaacatggcatgcaataagaaaaatttaagaaatcaacagtaacaaatgtatttgattttatgtagataggatttctgcctgatgccattttcctcaatttatgtttcagcaagtttgaaaagactttgtgtagttaacattaggtttgttgggttagaatacctaatggaaaaccacattccaccaagtgagcttttttgtcacttggataaatacttcaagtagttgtgaattaagttacttacactggtaaagtatatttgtatttggaaattatgaattttggaacatctatcttatagttttatgtactgtaatactgatagacgattatcatcatcatcaataacattgataacatttattaagcatttacgatgtgccgggcactgtttgttctcatttaactcttttaaattgagggtagaaattggagtgctcttgaacagccttttccaggaggcatagtgacttccttttccacatttccttatttttgctgcattggtttgcagattaaaaatctatcctggcatccttggaaattatttcactctttcaatagatctgtctccgtttttcaagtctgtcagcaacatttattgagcacttgcttaaaatttctgttcaccaattctaatttaatttccatggattgtccatcttttatgagaacacaaaggggaaattgatagtgtttgcatattcattttgtgtgaaaacgtaatgagagaaaatcatacccagttttttaaatttgcaaaagataaagtttcacatttttgtcgtcatagcaggcagttcttgaggaaaatattaaatgcataccttaattactcattgtaggagaaagagcacaataaagaaccagattcaagtgtgagcaaagaagtagatgacaaggatgcaccaaggactgaggaaaacaaaatacagcacaatgggaattgtcagctgaatgaagaaaacctctctaccaaaacagaagcagtataggaccgacaagtgtacctctgcactcaatgctggaatcaaatccaaagcttttaattctctcaacaagatgtaaacaggaaagaaatctagttgagcatgaagataggatctaacagcttttccagttgttagatgactttgtggccatcttgttattgagtaagaaaataaagcatggacatcatgaaaataacagatgttacccaaactcatcttctaaaatctgtgcatttccatggtggctgacacacttgtcatgtggtctgttagtgtttgccaagaaccattgcaaataaattgaacatcaaagatccaagtttgtactatccctaaagactggagataagcattggaggctcttttaaaaaatgctagttactgaattttgtattgttttacttttttttttatttcaatatatacagtttgatgatgtgcttgaaattggtgcaaatatatacacacccttgtaagtgcaaagtatgtaagaagttttaacatttacttcacaggacttgtgattgtgttaaattctcactattgtgttttcttttgctcactgtttaggacaatttttctttaaaatagttttgcagattaaaattgcttaaataagtggattaaaaaactgacaatgcatgctactgttctctttcaaaaggaagagcaaccgtgttgaatactaataatgatgaattagtattcagtgtttagaatcattgggactacccacaaagtgagcatttctttttaaattttcttgacatttccaagcttattatgaataatattgcagtgtgtcttgtcagctgtaggtggcaaaggtgcccttataaaaaaggaaactggcttttcaaaatgggctatgggagcacaagctgaagctttagtgccttctacaatgtggtatactgttttctagaattttatatgtgctagtcattctcaattcatatggaatctagatggatatttcatgcatacccatagagaagtgtgtaagtgatatgtcagaagagcttcttactgatttcacctaaaatgagaaggaagtcctgttttcaagaatgacattagagtcatgcagctttgggaccatcagttttatactgtgataattgaaaatgaaacatgttcttattttccttaaattgaagaaaaccctttagttgtctacattggatggccttattacctctcaatcatcttttcataaatgatgtgcagaaattgtacttaaggacttaggagtatatgggaggttattggttttatgtttaaggatacgtttacttgagtttaagatacaggtcatccatcattcttaggctcactttttacagaaagtatgcaaatagtaaagtgacagcactgctaatgtttttccccagtactataacttgtggtttctgaactcattattgttgtatttccaaaaaagtaataccttttaattagtgtattaaaagttaagtataattattttaatgcaatctaatacaatcagattactcagttgccttacctcatgggaagagttacttttttagatctaaaaagctgaatagcatgttagttacttggtttcaacttgagttttcttttaatgttaataagattgaaactttagtatttagtggggaatggaaagagttgcccttgttgcaagtaatgaagcctgatttgattatgaagctgcttaatcactcttcatgtgttcagaattactgttttttttgtttgtttttcctttttgtcactgtgtacattaaaattttggaagatgctttactatgtaaagtatagatggtcattttaatcattcagccacatacggttggctggtaaacagcttattctgatacaagaatgcttgggtgcatatggaaagattgtgaaagagtgtgtcttgcatcaacagctgtcttatttatgatatataagtagaaatagagcaaatgttggaatctgttatttttagtaccatgtctttaataaagctaagtattttagaggaaaatgtttgtttatgcatttcaaaaaagcattttagttttatcctgctcattttagttgtcatagagattgttgtgacgtggagagtgcat

SEQ ID NO: 7791 - DNA, 225 bp, Homo sapiens
taggcctgcctggattgccttctgttgtggtagacaaatcaccattaaatgactaagtttcactgttttatgtgttaatgatccttaataacaaaaagttttaaagtcttaatttcgtaagattatgtaaaggttaagaaagaaattttaagtgaaaatgataaaaccaagcaaatgtttattagttcaattgtttttctttttatcttgcagcaacgcacctct

SEQ ID NO: 7792 - DNA, 3046 bp, Homo sapiens
ataaaacaagtcatttaaagtatgagtgttttcttgtactctggacctattacatgtttctttatgttggtaattaacatttaatttggttcttgctgctaattattttctctgctgatatttattaagctttaaaataatcgtactataatcttgaaacactgatttgtaaaaactaagaatgagtaggaatacaagagatctggaggaacaaatcagattgttattagggtttgactttttttttacatgggcttatggaagcaaggcattctagggtctagagggatgtgtgtgtgtgcttgtgtgtccatgtgtgcgcatgcgcacgtgtgtatctgtttgagacatactttctctgttcacttaaaagagctcatgttttcatttgtttattcttttctttcagggtattttgtttttttctttaagacttctttttttaaatcccaggtagatgttgtcagataaacttgaggtaaggccaagaagacagacattttatgcttcatactttctgtaattatcttttgtagcttgattacatagagtaccctctcttccttaagttgtagttgctatttatcattgtagacaaattctgttgcctttcagcaacgtatgctgaactagtatcataagatggtgcatcagttcataagctagtgcataagttttgtgtcaaaacttttaaatcctgaagttctgcagttatcatcttagttattttctatctaattagcttataattgcaaacactagtcagcttgtgatctctgtgtttcaagttcttttcttcacgaggttcagtacctgctatgttgatctttggcagtgccagaggcttaaattttgacctgctcaattaaaaataaacactggcgtttataatgaaaaggtttttttgtcgggggggggggggtcaagagaatttattttgtgatagtaataattttcaagaccttcagtcattcctatgtctatgttgctatctttattttaaaacttagaaccctgatctaactcccttctcaagtgaagatactgtgtagattcaagaattataatgtagagtaataggcctttaagtttttttttaatctgttagaaataaagagcatgatttaattattgttgaattaacaattaaaatgaatccctttggagggatggcattgaataacttataatttcagtgaatcatttacgttttcattggaagacagtatctgatttcaactggtgcgttacgaagtagagccattcccacaaagtaaatgtgcagtgcccatgtttcttgtgtttaaatattttttattttcactacatatatattattttctcatgtttatttactaatgtaattttcacttaaaattagatgtttattttcaaattttaaaagctagtgctcttaaaagagctaaattatatttctggaagcaggagtttagtataaatgtaataaaattttaaaataaaattgacttccctacttaatcttgggtttgtgggtgagtttgtttttagtacactcttattggtggttttgcctgaagagtaatacattattattattacttttctttttgagacagggtctcactctgtcactcaggctggagtgcagtgacacgatcatggctcactgcaatcttgacctttctcggcatggatgatcctctcacctcagcctcttgaatagctgggaccacagacatgtgccaccaagcccagttaattttagaattttttttgtagagacaggatcttgccatgttgcctagactggtctcaaactcctgggctcaaacaatctgtctgcctcagccttctaaagtgctgagattacaggtgtgaggtactgcacctggcaatacgttattttaaaagtaaacgctaagccatttatgactttggttatattcagtcagttggatttagtaactaataactagctttcttccattctaaggtacttttatagtttctagcaattagtttgttacaattagcttatatcagatataacagttcttaatataatgtttataaaaggttttaagtctgttgcctgatttttaaatttatatctagttaacattttaattttaaaattgccaacttttgggagatttcacatattttacctctatattttatttttccaggattggtatggaggagtagtaccttctattcttggtttatttttatttgctagacataatttcttaactacatatgtaagtataaattcataaaaatcacactgaaagaataggttgatttcaaccattttgagggtactggtaggtaacacactgttggggaataaactaaagaatttctgatttctacaatagatttaagtatgaaatttgagtatactgtgtagctgtgtagatcaacttaatgcttaaaaaattacctccttaatgattagattaatagaacagtgttagattatcaagggaagagtttggaatgtaaacataaacatgctgcataggtggtggttatttgtgagtaggactacttttaaatggtactagtaaagatttatcaaacaatgctgctattatgttgctatatttttaataaaatgaaaatcttaaaatcttgccactgttgagtagtaatttcacctatttctggaacagttatttgcatatttacatcttatttctataactgaaaggtgataataggcttttccagggttcaagattactaccaaaaatggaaggttttgcatacggggcaatcttcgtgttttgtggcagttaactccagtcaaggcttttcatattaaacattgtgcagtatccaagtaagtgatagctgctctctgaatctcccttctccccagccgccacaaattcagcttcttgctaggatatttgtacaatgaaaactatcactttgtcttttaacaacaggtggaatgccttctcccacttataagaggtgtaactctccatttggtgaatgagctgtgtgctcagggtggtcacttaggtaagacagcctattagcctattag

SEQ ID NO: 7793 - DNA, 225 bp, Homo sapiens; identical to SEQ ID NO: 7791

SEQ ID NO: 7794 - DNA, 242 bp, Homo sapiens; identical to SEQ ID NO: 5397

SEQ ID NO: 7795 - DNA, 5088 bp, Homo sapiens; identical to SEQ ID NO: 7545
  SITE (5): n equals a,t,g, or c
  SITE (6): n equals a,t,g, or c
  SITE (7): n equals a,t,g, or c
  SITE (8): n equals a,t,g, or c
  SITE (9): n equals a,t,g, or c
  SITE (10): n equals a,t,g, or c
  SITE (11): n equals a,t,g, or c
  SITE (12): n equals a,t,g, or c
  SITE (13): n equals a,t,g, or c
  SITE (14): n equals a,t,g, or c
  SITE (15): n equals a,t,g, or c
  SITE (16): n equals a,t,g, or c
  SITE (17): n equals a,t,g, or c
  SITE (18): n equals a,t,g, or c
  SITE (19): n equals a,t,g, or c
  SITE (20): n equals a,t,g, or c
  SITE (21): n equals a,t,g, or c
  SITE (22): n equals a,t,g, or c
  SITE (23): n equals a,t,g, or c
  SITE (24): n equals a,t,g, or c
  SITE (25): n equals a,t,g, or c
  SITE (26): n equals a,t,g, or c
  SITE (27): n equals a,t,g, or c
  SITE (28): n equals a,t,g, or c
  SITE (29): n equals a,t,g, or c
  SITE (30): n equals a,t,g, or c
  SITE (31): n equals a,t,g, or c
  SITE (32): n equals a,t,g, or c
  SITE (33): n equals a,t,g, or c
  SITE (34): n equals a,t,g, or c
  SITE (35): n equals a,t,g, or c
  SITE (36): n equals a,t,g, or c
  SITE (37): n equals a,t,g, or c
  SITE (38): n equals a,t,g, or c
  SITE (39): n equals a,t,g, or c
  SITE (40): n equals a,t,g, or c
  SITE (41): n equals a,t,g, or c
  SITE (42): n equals a,t,g, or c
  SITE (43): n equals a,t,g, or c
  SITE (44): n equals a,t,g, or c
  SITE (45): n equals a,t,g, or c
  SITE (46): n equals a,t,g, or c
  SITE (47): n equals a,t,g, or c
  SITE (48): n equals a,t,g, or c
  SITE (49): n equals a,t,g, or c
  SITE (50): n equals a,t,g, or c
  SITE (51): n equals a,t,g, or c
  SITE (52): n equals a,t,g, or c
  SITE (53): n equals a,t,g, or c
  SITE (54): n equals a,t,g, or c
  SITE (55): n equals a,t,g, or c
  SITE (56): n equals a,t,g, or c
  SITE (57): n equals a,t,g, or c
  SITE (58): n equals a,t,g, or c
  SITE (59): n equals a,t,g, or c
  SITE (60): n equals a,t,g, or c
  SITE (61): n equals a,t,g, or c
  SITE (62): n equals a,t,g, or c
  SITE (63): n equals a,t,g, or c
  SITE (64): n equals a,t,g, or c
  SITE (65): n equals a,t,g, or c
  SITE (66): n equals a,t,g, or c
  SITE (67): n equals a,t,g, or c
  SITE (68): n equals a,t,g, or c
  SITE (69): n equals a,t,g, or c
  SITE (70): n equals a,t,g, or c
  SITE (71): n equals a,t,g, or c
  SITE (72): n equals a,t,g, or c
  SITE (73): n equals a,t,g, or c
  SITE (74): n equals a,t,g, or c
  SITE (75): n equals a,t,g, or c
  SITE (76): n equals a,t,g, or c
  SITE (77): n equals a,t,g, or c
  SITE (78): n equals a,t,g, or c
  SITE (79): n equals a,t,g, or c
  SITE (80): n equals a,t,g, or c
  SITE (81): n equals a,t,g, or c
  SITE (82): n equals a,t,g, or c
  SITE (83): n equals a,t,g, or c
  SITE (84): n equals a,t,g, or c
  SITE (85): n equals a,t,g, or c
  SITE (86): n equals a,t,g, or c
  SITE (87): n equals a,t,g, or c
  SITE (88): n equals a,t,g, or c
  SITE (89): n equals a,t,g, or c
  SITE (90): n equals a,t,g, or c
  SITE (91): n equals a,t,g, or c
  SITE (92): n equals a,t,g, or c
  SITE (93): n equals a,t,g, or c
  SITE (94): n equals a,t,g, or c
  SITE (95): n equals a,t,g, or c
  SITE (96): n equals a,t,g, or c
  SITE (97): n equals a,t,g, or c
  SITE (98): n equals a,t,g, or c
  SITE (99): n equals a,t,g, or c
  SITE (100): n equals a,t,g, or c
  SITE (101): n equals a,t,g, or c
  SITE (102): n equals a,t,g, or c
  SITE (103): n equals a,t,g, or c
  SITE (104): n equals a,t,g, or c
  SITE (105): n equals a,t,g, or c
  SITE (106): n equals a,t,g, or c
  SITE (107): n equals a,t,g, or c
  SITE (108): n equals a,t,g, or c
  SITE (109): n equals a,t,g, or c
  SITE (110): n equals a,t,g, or c
  SITE (111): n equals a,t,g, or c
  SITE (112): n equals a,t,g, or c
  SITE (113): n equals a,t,g, or c
  SITE (114): n equals a,t,g, or c
  SITE (115): n equals a,t,g, or c
  SITE (116): n equals a,t,g, or c
  SITE (117): n equals a,t,g, or c
  SITE (118): n equals a,t,g, or c
  SITE (119): n equals a,t,g, or c
  SITE (120): n equals a,t,g, or c
  SITE (121): n equals a,t,g, or c
  SITE (122): n equals a,t,g, or c
  SITE (123): n equals a,t,g, or c
  SITE (124): n equals a,t,g, or c
  SITE (125): n equals a,t,g, or c
  SITE (126): n equals a,t,g, or c
  SITE (127): n equals a,t,g, or c
  SITE (128): n equals a,t,g, or c
  SITE (129): n equals a,t,g, or c
  SITE (130): n equals a,t,g, or c
  SITE (131): n equals a,t,g, or c
  SITE (132): n equals a,t,g, or c
  SITE (133): n equals a,t,g, or c
  SITE (134): n equals a,t,g, or c
  SITE (135): n equals a,t,g, or c
  SITE (136): n equals a,t,g, or c
  SITE (137): n equals a,t,g, or c
  SITE (138): n equals a,t,g, or c
  SITE (139): n equals a,t,g, or c
  SITE (140): n equals a,t,g, or c
  SITE (141): n equals a,t,g, or c
  SITE (142): n equals a,t,g, or c
  SITE (143): n equals a,t,g, or c
  SITE (144): n equals a,t,g, or c
  SITE (145): n equals a,t,g, or c
  SITE (146): n equals a,t,g, or c
  SITE (147): n equals a,t,g, or c
  SITE (148): n equals a,t,g, or c
  SITE (149): n equals a,t,g, or c
  SITE (150): n equals a,t,g, or c
  SITE (151): n equals a,t,g, or c
  SITE (152): n equals a,t,g, or c
  SITE (153): n equals a,t,g, or c
  SITE (154): n equals a,t,g, or c
  SITE (155): n equals a,t,g, or c
  SITE (156): n equals a,t,g, or c
  SITE (157): n equals a,t,g, or c
  SITE (158): n equals a,t,g, or c
  SITE (159): n equals a,t,g, or c
  SITE (160): n equals a,t,g, or c
  SITE (161): n equals a,t,g, or c
  SITE (162): n equals a,t,g, or c
  SITE (163): n equals a,t,g, or c
  SITE (164): n equals a,t,g, or c
  SITE (165): n equals a,t,g, or c
  SITE (166): n equals a,t,g, or c
  SITE (167): n equals a,t,g, or c
  SITE (168): n equals a,t,g, or c
  SITE (169): n equals a,t,g, or c
  SITE (170): n equals a,t,g, or c
  SITE (171): n equals a,t,g, or c
  SITE (172): n equals a,t,g, or c
  SITE (173): n equals a,t,g, or c
  SITE (174): n equals a,t,g, or c
  SITE (175): n equals a,t,g, or c
  SITE (176): n equals a,t,g, or c
  SITE (177): n equals a,t,g, or c
  SITE (178): n equals a,t,g, or c
  SITE (179): n equals a,t,g, or c
  SITE (180): n equals a,t,g, or c
  SITE (181): n equals a,t,g, or c
  SITE (182): n equals a,t,g, or c
  SITE (183): n equals a,t,g, or c
  SITE (184): n equals a,t,g, or c
  SITE (185): n equals a,t,g, or c
  SITE (186): n equals a,t,g, or c
  SITE (187): n equals a,t,g, or c
  SITE (188): n equals a,t,g, or c
  SITE (189): n equals a,t,g, or c
  SITE (190): n equals a,t,g, or c
  SITE (191): n equals a,t,g, or c
  SITE (192): n equals a,t,g, or c
  SITE (193): n equals a,t,g, or c
  SITE (194): n equals a,t,g, or c
  SITE (195): n equals a,t,g, or c
  SITE (196): n equals a,t,g, or c
  SITE (197): n equals a,t,g, or c
  SITE (198): n equals a,t,g, or c
  SITE (199): n equals a,t,g, or c
  SITE (200): n equals a,t,g, or c
  SITE (201): n equals a,t,g, or c
  SITE (202): n equals a,t,g, or c
  SITE (203): n equals a,t,g, or c
  SITE (204): n equals a,t,g, or c
  SITE (205): n equals a,t,g, or c
  SITE (206): n equals a,t,g, or c
  SITE (207): n equals a,t,g, or c
  SITE (208): n equals a,t,g, or c
  SITE (209): n equals a,t,g, or c
  SITE (210): n equals a,t,g, or c
  SITE (211): n equals a,t,g, or c
  SITE (212): n equals a,t,g, or c
  SITE (213): n equals a,t,g, or c
  SITE (214): n equals a,t,g, or c
  SITE (215): n equals a,t,g, or c
  SITE (216): n equals a,t,g, or c
  SITE (217): n equals a,t,g, or c
  SITE (218): n equals a,t,g, or c
  SITE (219): n equals a,t,g, or c
  SITE (220): n equals a,t,g, or c
  SITE (221): n equals a,t,g, or c
  SITE (222): n equals a,t,g, or c
  SITE (223): n equals a,t,g, or c
  SITE (224): n equals a,t,g, or c
  SITE (225): n equals a,t,g, or c
  SITE (226): n equals a,t,g, or c
  SITE (227): n equals a,t,g, or c
  SITE (228): n equals a,t,g, or c
  SITE (229): n equals a,t,g, or c
  SITE (230): n equals a,t,g, or c
  SITE (231): n equals a,t,g, or c
  SITE (232): n equals a,t,g, or c
  SITE (233): n equals a,t,g, or c
  SITE (234): n equals a,t,g, or c
  SITE (235): n equals a,t,g, or c
  SITE (236): n equals a,t,g, or c
  SITE (237): n equals a,t,g, or c
  SITE (238): n equals a,t,g, or c
  SITE (239): n equals a,t,g, or c
  SITE (240): n equals a,t,g, or c
  SITE (241): n equals a,t,g, or c
  SITE (242): n equals a,t,g, or c
  SITE (243): n equals a,t,g, or c
  SITE (244): n equals a,t,g, or c
  SITE (245): n equals a,t,g, or c
  SITE (246): n equals a,t,g, or c
  SITE (247): n equals a,t,g, or c
  SITE (248): n equals a,t,g, or c
  SITE (249): n equals a,t,g, or c
  SITE (250): n equals a,t,g, or c
  SITE (251): n equals a,t,g, or c
  SITE (252): n equals a,t,g, or c
  SITE (253): n equals a,t,g, or c
  SITE (254): n equals a,t,g, or c
  SITE (255): n equals a,t,g, or c
  SITE (256): n equals a,t,g, or c
  SITE (257): n equals a,t,g, or c
  SITE (258): n equals a,t,g, or c
  SITE (259): n equals a,t,g, or c
  SITE (260): n equals a,t,g, or c
  SITE (261): n equals a,t,g, or c
  SITE (262): n equals a,t,g, or c
  SITE (263): n equals a,t,g, or c
  SITE (264): n equals a,t,g, or c
  SITE (265): n equals a,t,g, or c
  SITE (266): n equals a,t,g, or c
  SITE (267): n equals a,t,g, or c
  SITE (268): n equals a,t,g, or c
  SITE (269): n equals a,t,g, or c
  SITE (270): n equals a,t,g, or c
  SITE (271): n equals a,t,g, or c
  SITE (272): n equals a,t,g, or c
  SITE (273): n equals a,t,g, or c
  SITE (274): n equals a,t,g, or c
  SITE (275): n equals a,t,g, or c
  SITE (276): n equals a,t,g, or c
  SITE (277): n equals a,t,g, or c
  SITE (278): n equals a,t,g, or c
  SITE (279): n equals a,t,g, or c
  SITE (280): n equals a,t,g, or c
  SITE (281): n equals a,t,g, or c
  SITE (282): n equals a,t,g, or c
  SITE (283): n equals a,t,g, or c
  SITE (284): n equals a,t,g, or c
  SITE (285): n equals a,t,g, or c
  SITE (286): n equals a,t,g, or c
  SITE (287): n equals a,t,g, or c
  SITE (288): n equals a,t,g, or c
  SITE (289): n equals a,t,g, or c
  SITE (290): n equals a,t,g, or c
  SITE (291): n equals a,t,g, or c
  SITE (292): n equals a,t,g, or c
  SITE (293): n equals a,t,g, or c
  SITE (294): n equals a,t,g, or c
  SITE (295): n equals a,t,g, or c
  SITE (296): n equals a,t,g, or c
  SITE (297): n equals a,t,g, or c
  SITE (298): n equals a,t,g, or c
  SITE (299): n equals a,t,g, or c
  SITE (300): n equals a,t,g, or c
  SITE (301): n equals a,t,g, or c
  SITE (302): n equals a,t,g, or c
  SITE (303): n equals a,t,g, or c
  SITE (304): n equals a,t,g, or c
  SITE (3943): n equals a,t,g, or c
  SITE (3944): n equals a,t,g, or c
  SITE (3945): n equals a,t,g, or c
  SITE (3946): n equals a,t,g, or c
  SITE (3947): n equals a,t,g, or c
  SITE (3948): n equals a,t,g, or c
  SITE (3949): n equals a,t,g, or c
  SITE (3950): n equals a,t,g, or c
  SITE (3951): n equals a,t,g, or c
  SITE (3952): n equals a,t,g, or c
  SITE (3953): n equals a,t,g, or c
  SITE (3954): n equals a,t,g, or c
  SITE (3955): n equals a,t,g, or c
  SITE (3956): n equals a,t,g, or c
  SITE (3957): n equals a,t,g, or c
  SITE (3958): n equals a,t,g, or c
  SITE (3959): n equals a,t,g, or c
  SITE (3960): n equals a,t,g, or c
  SITE (3961): n equals a,t,g, or c
  SITE (3962): n equals a,t,g, or c
  SITE (3963): n equals a,t,g, or c
  SITE (3964): n equals a,t,g, or c
  SITE (3965): n equals a,t,g, or c
  SITE (3966): n equals a,t,g, or c
  SITE (3967): n equals a,t,g, or c
  SITE (3968): n equals a,t,g, or c
  SITE (3969): n equals a,t,g, or c
  SITE (3970): n equals a,t,g, or c
  SITE (3971): n equals a,t,g, or c
  SITE (3972): n equals a,t,g, or c
  SITE (3973): n equals a,t,g, or c
  SITE (3974): n equals a,t,g, or c
  SITE (3975): n equals a,t,g, or c
  SITE (3976): n equals a,t,g, or c
  SITE (3977): n equals a,t,g, or c
  SITE (3978): n equals a,t,g, or c
  SITE (3979): n equals a,t,g, or c
  SITE (3980): n equals a,t,g, or c
  SITE (3981): n equals a,t,g, or c
  SITE (3982): n equals a,t,g, or c
  SITE (3983): n equals a,t,g, or c
  SITE (3984): n equals a,t,g, or c
  SITE (3985): n equals a,t,g, or c
  SITE (3986): n equals a,t,g, or c
  SITE (3987): n equals a,t,g, or c
  SITE (3988): n equals a,t,g, or c
  SITE (3989): n equals a,t,g, or c
  SITE (3990): n equals a,t,g, or c
  SITE (3991): n equals a,t,g, or c
  SITE (3992): n equals a,t,g, or c
  SITE (3993): n equals a,t,g, or c
  SITE (3994): n equals a,t,g, or c
  SITE (3995): n equals a,t,g, or c
  SITE (3996): n equals a,t,g, or c
  SITE (3997): n equals a,t,g, or c
  SITE (3998): n equals a,t,g, or c
  SITE (3999): n equals a,t,g, or c
  SITE (4000): n equals a,t,g, or c
  SITE (4001): n equals a,t,g, or c
  SITE (4002): n equals a,t,g, or c
  SITE (4003): n equals a,t,g, or c
  SITE (4004): n equals a,t,g, or c
  SITE (4005): n equals a,t,g, or c
  SITE (4006): n equals a,t,g, or c
  SITE (4007): n equals a,t,g, or c
  SITE (4008): n equals a,t,g, or c
  SITE (4009): n equals a,t,g, or c
  SITE (4010): n equals a,t,g, or c
  SITE (4011): n equals a,t,g, or c
  SITE (4012): n equals a,t,g, or c
  SITE (4013): n equals a,t,g, or c
  SITE (4014): n equals a,t,g, or c
  SITE (4015): n equals a,t,g, or c
  SITE (4016): n equals a,t,g, or c
  SITE (4017): n equals a,t,g, or c
  SITE (4018): n equals a,t,g, or c
  SITE (4019): n equals a,t,g, or c
  SITE (4020): n equals a,t,g, or c
  SITE (4021): n equals a,t,g, or c
  SITE (4022): n equals a,t,g, or c
  SITE (4023): n equals a,t,g, or c
  SITE (4024): n equals a,t,g, or c
  SITE (4025): n equals a,t,g, or c
  SITE (4026): n equals a,t,g, or c
  SITE (4027): n equals a,t,g, or c
  SITE (4028): n equals a,t,g, or c
  SITE (4029): n equals a,t,g, or c
  SITE (4030): n equals a,t,g, or c
  SITE (4031): n equals a,t,g, or c
  SITE (4032): n equals a,t,g, or c
  SITE (4033): n equals a,t,g, or c
  SITE (4034): n equals a,t,g, or c
  SITE (4035): n equals a,t,g, or c
  SITE (4036): n equals a,t,g, or c
  SITE (4037): n equals a,t,g, or c
  SITE (4038): n equals a,t,g, or c
  SITE (4039): n equals a,t,g, or c
  SITE (4040): n equals a,t,g, or c
  SITE (4041): n equals a,t,g, or c
  SITE (4042): n equals a,t,g, or c
  SITE (4043): n equals a,t,g, or c
  SITE (4044): n equals a,t,g, or c
  SITE (4045): n equals a,t,g, or c
  SITE (4046): n equals a,t,g, or c
  SITE (4047): n equals a,t,g, or c
  SITE (4048): n equals a,t,g, or c
  SITE (4049): n equals a,t,g, or c
  SITE (4050): n equals a,t,g, or c
  SITE (4051): n equals a,t,g, or c
  SITE (4052): n equals a,t,g, or c
  SITE (4053): n equals a,t,g, or c
  SITE (4054): n equals a,t,g, or c
  SITE (4055): n equals a,t,g, or c
  SITE (4056): n equals a,t,g, or c
  SITE (4057): n equals a,t,g, or c
  SITE (4058): n equals a,t,g, or c
  SITE (4059): n equals a,t,g, or c
  SITE (4060): n equals a,t,g, or c
  SITE (4061): n equals a,t,g, or c
  SITE (4062): n equals a,t,g, or c
  SITE (4063): n equals a,t,g, or c
  SITE (4064): n equals a,t,g, or c
  SITE (4065): n equals a,t,g, or c
  SITE (4066): n equals a,t,g, or c
  SITE (4067): n equals a,t,g, or c
  SITE (4068): n equals a,t,g, or c
  SITE (4069): n equals a,t,g, or c
  SITE (4070): n equals a,t,g, or c
  SITE (4071): n equals a,t,g, or c
  SITE (4072): n equals a,t,g, or c
  SITE (4073): n equals a,t,g, or c
  SITE (4074): n equals a,t,g, or c
  SITE (4075): n equals a,t,g, or c
  SITE (4076): n equals a,t,g, or c
  SITE (4077): n equals a,t,g, or c
  SITE (4078): n equals a,t,g, or c
  SITE (4079): n equals a,t,g, or c
  SITE (4080): n equals a,t,g, or c
  SITE (4081): n equals a,t,g, or c
  SITE (4082): n equals a,t,g, or c
  SITE (4083): n equals a,t,g, or c
  SITE (4084): n equals a,t,g, or c
  SITE (4085): n equals a,t,g, or c
  SITE (4086): n equals a,t,g, or c
  SITE (4087): n equals a,t,g, or c
  SITE (4088): n equals a,t,g, or c
  SITE (4089): n equals a,t,g, or c
  SITE (4090): n equals a,t,g, or c
  SITE (4091): n equals a,t,g, or c
  SITE (4092): n equals a,t,g, or c
  SITE (4093): n equals a,t,g, or c
  SITE (4094): n equals a,t,g, or c
  SITE (4095): n equals a,t,g, or c
  SITE (4096): n equals a,t,g, or c
  SITE (4097): n equals a,t,g, or c
  SITE (4098): n equals a,t,g, or c
  SITE (4099): n equals a,t,g, or c
  SITE (4100): n equals a,t,g, or c
  SITE (4101): n equals a,t,g, or c
  SITE (4102): n equals a,t,g, or c
  SITE (4103): n equals a,t,g, or c
  SITE (4104): n equals a,t,g, or c
  SITE (4105): n equals a,t,g, or c
  SITE (4106): n equals a,t,g, or c
  SITE (4107): n equals a,t,g, or c
  SITE (4108): n equals a,t,g, or c
  SITE (4109): n equals a,t,g, or c
  SITE (4110): n equals a,t,g, or c
  SITE (4111): n equals a,t,g, or c
  SITE (4112): n equals a,t,g, or c
  SITE (4113): n equals a,t,g, or c
  SITE (4114): n equals a,t,g, or c
  SITE (4115): n equals a,t,g, or c
  SITE (4116): n equals a,t,g, or c
  SITE (4117): n equals a,t,g, or c
  SITE (4118): n equals a,t,g, or c
  SITE (4119): n equals a,t,g, or c
  SITE (4120): n equals a,t,g, or c
  SITE (4121): n equals a,t,g, or c
  SITE (4122): n equals a,t,g, or c
  SITE (4123): n equals a,t,g, or c
  SITE (4124): n equals a,t,g, or c
  SITE (4125): n equals a,t,g, or c
  SITE (4126): n equals a,t,g, or c
  SITE (4127): n equals a,t,g, or c
  SITE (4128): n equals a,t,g, or c
  SITE (4129): n equals a,t,g, or c
  SITE (4130): n equals a,t,g, or c
  SITE (4131): n equals a,t,g, or c
  SITE (4132): n equals a,t,g, or c
  SITE (4133): n equals a,t,g, or c
  SITE (4134): n equals a,t,g, or c
  SITE (4135): n equals a,t,g, or c
  SITE (4136): n equals a,t,g, or c
  SITE (4137): n equals a,t,g, or c
  SITE (4138): n equals a,t,g, or c
  SITE (4139): n equals a,t,g, or c
  SITE (4140): n equals a,t,g, or c
  SITE (4141): n equals a,t,g, or c
  SITE (4142): n equals a,t,g, or c
  SITE (4143): n equals a,t,g, or c
  SITE (4144): n equals a,t,g, or c
  SITE (4145): n equals a,t,g, or c
  SITE (4146): n equals a,t,g, or c
  SITE (4147): n equals a,t,g, or c
  SITE (4148): n equals a,t,g, or c
  SITE (4149): n equals a,t,g, or c
  SITE (4150): n equals a,t,g, or c
  SITE (4151): n equals a,t,g, or c
  SITE (4152): n equals a,t,g, or c
  SITE (4153): n equals a,t,g, or c
  SITE (4154): n equals a,t,g, or c
  SITE (4155): n equals a,t,g, or c
  SITE (4156): n equals a,t,g, or c
  SITE (4157): n equals a,t,g, or c
  SITE (4158): n equals a,t,g, or c
  SITE (4159): n equals a,t,g, or c
  SITE (4160): n equals a,t,g, or c
  SITE (4161): n equals a,t,g, or c
  SITE (4162): n equals a,t,g, or c
  SITE (4163): n equals a,t,g, or c
  SITE (4164): n equals a,t,g, or c
  SITE (4165): n equals a,t,g, or c
  SITE (4166): n equals a,t,g, or c
  SITE (4167): n equals a,t,g, or c
  SITE (4168): n equals a,t,g, or c
  SITE (4169): n equals a,t,g, or c
  SITE (4170): n equals a,t,g, or c
  SITE (4171): n equals a,t,g, or c
  SITE (4172): n equals a,t,g, or c
  SITE (4173): n equals a,t,g, or c
  SITE (4174): n equals a,t,g, or c
  SITE (4175): n equals a,t,g, or c
  SITE (4176): n equals a,t,g, or c
  SITE (4177): n equals a,t,g, or c
  SITE (4178): n equals a,t,g, or c
  SITE (4179): n equals a,t,g, or c
  SITE (4180): n equals a,t,g, or c
  SITE (4181): n equals a,t,g, or c
  SITE (4182): n equals a,t,g, or c
  SITE (4183): n equals a,t,g, or c
  SITE (4184): n equals a,t,g, or c
  SITE (4185): n equals a,t,g, or c
  SITE (4186): n equals a,t,g, or c
  SITE (4187): n equals a,t,g, or c
  SITE (4188): n equals a,t,g, or c
  SITE (4189): n equals a,t,g, or c
  SITE (4190): n equals a,t,g, or c
  SITE (4191): n equals a,t,g, or c
  SITE (4192): n equals a,t,g, or c
  SITE (4193): n equals a,t,g, or c
  SITE (4194): n equals a,t,g, or c
  SITE (4195): n equals a,t,g, or c
  SITE (4196): n equals a,t,g, or c
  SITE (4197): n equals a,t,g, or c
  SITE (4198): n equals a,t,g, or c
  SITE (4199): n equals a,t,g, or c
  SITE (4200): n equals a,t,g, or c
  SITE (4201): n equals a,t,g, or c
  SITE (4202): n equals a,t,g, or c
  SITE (4203): n equals a,t,g, or c
  SITE (4204): n equals a,t,g, or c
  SITE (4205): n equals a,t,g, or c
  SITE (4206): n equals a,t,g, or c
  SITE (4207): n equals a,t,g, or c
  SITE (4208): n equals a,t,g, or c
  SITE (4209): n equals a,t,g, or c
  SITE (4210): n equals a,t,g, or c
  SITE (4211): n equals a,t,g, or c
  SITE (4212): n equals a,t,g, or c
  SITE (4213): n equals a,t,g, or c
  SITE (4214): n equals a,t,g, or c
  SITE (4215): n equals a,t,g, or c
  SITE (4216): n equals a,t,g, or c
  SITE (4217): n equals a,t,g, or c
  SITE (4218): n equals a,t,g, or c
  SITE (4219): n equals a,t,g, or c
  SITE (4220): n equals a,t,g, or c
  SITE (4221): n equals a,t,g, or c
  SITE (4222): n equals a,t,g, or c
  SITE (4223): n equals a,t,g, or c
  SITE (4224): n equals a,t,g, or c
  SITE (4225): n equals a,t,g, or c
  SITE (4226): n equals a,t,g, or c
  SITE (4227): n equals a,t,g, or c
  SITE (4228): n equals a,t,g, or c
  SITE (4229): n equals a,t,g, or c
  SITE (4230): n equals a,t,g, or c
  SITE (4231): n equals a,t,g, or c
  SITE (4232): n equals a,t,g, or c
  SITE (4233): n equals a,t,g, or c
  SITE (4234): n equals a,t,g, or c
  SITE (4235): n equals a,t,g, or c
  SITE (4236): n equals a,t,g, or c
  SITE (4237): n equals a,t,g, or c
  SITE (4238): n equals a,t,g, or c
  SITE (4239): n equals a,t,g, or c
  SITE (4240): n equals a,t,g, or c
  SITE (4241): n equals a,t,g, or c
  SITE (4242): n equals a,t,g, or c
  SITE (4243): n equals a,t,g, or c
  SITE (4244): n equals a,t,g, or c
  SITE (4245): n equals a,t,g, or c
  SITE (4246): n equals a,t,g, or c
  SITE (4247): n equals a,t,g, or c
  SITE (4248): n equals a,t,g, or c
  SITE (4249): n equals a,t,g, or c
  SITE (4250): n equals a,t,g, or c
  SITE (4251): n equals a,t,g, or c
  SITE (4252): n equals a,t,g, or c
  SITE (4253): n equals a,t,g, or c
  SITE (4254): n equals a,t,g, or c
  SITE (4255): n equals a,t,g, or c
  SITE (4256): n equals a,t,g, or c
  SITE (4257): n equals a,t,g, or c
  SITE (4258): n equals a,t,g, or c
  SITE (4259): n equals a,t,g, or c
  SITE (4260): n equals a,t,g, or c
  SITE (4261): n equals a,t,g, or c
  SITE (4262): n equals a,t,g, or c
  SITE (4263): n equals a,t,g, or c
  SITE (4264): n equals a,t,g, or c
  SITE (4265): n equals a,t,g, or c
  SITE (4266): n equals a,t,g, or c
  SITE (4267): n equals a,t,g, or c
  SITE (4268): n equals a,t,g, or c
  SITE (4269): n equals a,t,g, or c
  SITE (4270): n equals a,t,g, or c
  SITE (4271): n equals a,t,g, or c
  SITE (4272): n equals a,t,g, or c
  SITE (4273): n equals a,t,g, or c
  SITE (4274): n equals a,t,g, or c
  SITE (4275): n equals a,t,g, or c
  SITE (4276): n equals a,t,g, or c
  SITE (4277): n equals a,t,g, or c
  SITE (4278): n equals a,t,g, or c
  SITE (4279): n equals a,t,g, or c
  SITE (4280): n equals a,t,g, or c
  SITE (4281): n equals a,t,g, or c
  SITE (4282): n equals a,t,g, or c
  SITE (4283): n equals a,t,g, or c
  SITE (4284): n equals a,t,g, or c
  SITE (4285): n equals a,t,g, or c
  SITE (4286): n equals a,t,g, or c
  SITE (4287): n equals a,t,g, or c
  SITE (4288): n equals a,t,g, or c
  SITE (4289): n equals a,t,g, or c
  SITE (4290): n equals a,t,g, or c
  SITE (4291): n equals a,t,g, or c
  SITE (4292): n equals a,t,g, or c
  SITE (4293): n equals a,t,g, or c
  SITE (4294): n equals a,t,g, or c
  SITE (4295): n equals a,t,g, or c
  SITE (4296): n equals a,t,g, or c
  SITE (4297): n equals a,t,g, or c
  SITE (4298): n equals a,t,g, or c
  SITE (4299): n equals a,t,g, or c
  SITE (4300): n equals a,t,g, or c
  SITE (4301): n equals a,t,g, or c
  SITE (4302): n equals a,t,g, or c
  SITE (4303): n equals a,t,g, or c
  SITE (4304): n equals a,t,g, or c
  SITE (4305): n equals a,t,g, or c
  SITE (4306): n equals a,t,g, or c
  SITE (4307): n equals a,t,g, or c
  SITE (4308): n equals a,t,g, or c
  SITE (4309): n equals a,t,g, or c
  SITE (4310): n equals a,t,g, or c
  SITE (4311): n equals a,t,g, or c
  SITE (4312): n equals a,t,g, or c
  SITE (4313): n equals a,t,g, or c
  SITE (4314): n equals a,t,g, or c
  SITE (4315): n equals a,t,g, or c
  SITE (4316): n equals a,t,g, or c
  SITE (4317): n equals a,t,g, or c
  SITE (4318): n equals a,t,g, or c
  SITE (4319): n equals a,t,g, or c
  SITE (4320): n equals a,t,g, or c
  SITE (4321): n equals a,t,g, or c
  SITE (4322): n equals a,t,g, or c
  SITE (4323): n equals a,t,g, or c
  SITE (4324): n equals a,t,g, or c
  SITE (4325): n equals a,t,g, or c
  SITE (4326): n equals a,t,g, or c
  SITE (4327): n equals a,t,g, or c
  SITE (4328): n equals a,t,g, or c
  SITE (4329): n equals a,t,g, or c
  SITE (4330): n equals a,t,g, or c
  SITE (4331): n equals a,t,g, or c
  SITE (4332): n equals a,t,g, or c
  SITE (4333): n equals a,t,g, or c
  SITE (4334): n equals a,t,g, or c
  SITE (4335): n equals a,t,g, or c
  SITE (4336): n equals a,t,g, or c
  SITE (4337): n equals a,t,g, or c
  SITE (4338): n equals a,t,g, or c
  SITE (4339): n equals a,t,g, or c
  SITE (4340): n equals a,t,g, or c
  SITE (4341): n equals a,t,g, or c
  SITE (4342): n equals a,t,g, or c
  SITE (4343): n equals a,t,g, or c
  SITE (4344): n equals a,t,g, or c
  SITE (4345): n equals a,t,g, or c
  SITE (4346): n equals a,t,g, or c
  SITE (4347): n equals a,t,g, or c
  SITE (4348): n equals a,t,g, or c
  SITE (4349): n equals a,t,g, or c
  SITE (4350): n equals a,t,g, or c
  SITE (4351): n equals a,t,g, or c
  SITE (4352): n equals a,t,g, or c
  SITE (4353): n equals a,t,g, or c
  SITE (4354): n equals a,t,g, or c
  SITE (4355): n equals a,t,g, or c
  SITE (4356): n equals a,t,g, or c
  SITE (4357): n equals a,t,g, or c
  SITE (4358): n equals a,t,g, or c
  SITE (4359): n equals a,t,g, or c
  SITE (4360): n equals a,t,g, or c
  SITE (4361): n equals a,t,g, or c
  SITE (4362): n equals a,t,g, or c
  SITE (4363): n equals a,t,g, or c
  SITE (4364): n equals a,t,g, or c
  SITE (4365): n equals a,t,g, or c
  SITE (4366): n equals a,t,g, or c
  SITE (4367): n equals a,t,g, or c
  SITE (4368): n equals a,t,g, or c
  SITE (4369): n equals a,t,g, or c
  SITE (4370): n equals a,t,g, or c
  SITE (4371): n equals a,t,g, or c
  SITE (4372): n equals a,t,g, or c
  SITE (4373): n equals a,t,g, or c
  SITE (4374): n equals a,t,g, or c
  SITE (4375): n equals a,t,g, or c
  SITE (4376): n equals a,t,g, or c
  SITE (4377): n equals a,t,g, or c
  SITE (4378): n equals a,t,g, or c
  SITE (4379): n equals a,t,g, or c
  SITE (4380): n equals a,t,g, or c
  SITE (4381): n equals a,t,g, or c
  SITE (4382): n equals a,t,g, or c
  SITE (4383): n equals a,t,g, or c
  SITE (4384): n equals a,t,g, or c
  SITE (4385): n equals a,t,g, or c
  SITE (4386): n equals a,t,g, or c
  SITE (4387): n equals a,t,g, or c
  SITE (4388): n equals a,t,g, or c
  SITE (4389): n equals a,t,g, or c
  SITE (4390): n equals a,t,g, or c
  SITE (4391): n equals a,t,g, or c
  SITE (4392): n equals a,t,g, or c
  SITE (4393): n equals a,t,g, or c
  SITE (4394): n equals a,t,g, or c
  SITE (4395): n equals a,t,g, or c
  SITE (4396): n equals a,t,g, or c
  SITE (4397): n equals a,t,g, or c
  SITE (4398): n equals a,t,g, or c
  SITE (4399): n equals a,t,g, or c
  SITE (4400): n equals a,t,g, or c
  SITE (4401): n equals a,t,g, or c
  SITE (4402): n equals a,t,g, or c
  SITE (4403): n equals a,t,g, or c
  SITE (4404): n equals a,t,g, or c
  SITE (4405): n equals a,t,g, or c
  SITE (4406): n equals a,t,g, or c
  SITE (4407): n equals a,t,g, or c
  SITE (4408): n equals a,t,g, or c
  SITE (4409): n equals a,t,g, or c
  SITE (4410): n equals a,t,g, or c
  SITE (4411): n equals a,t,g, or c
  SITE (4412): n equals a,t,g, or c
  SITE (4413): n equals a,t,g, or c
  SITE (4414): n equals a,t,g, or c
  SITE (4415): n equals a,t,g, or c
  SITE (4416): n equals a,t,g, or c
  SITE (4417): n equals a,t,g, or c
  SITE (4418): n equals a,t,g, or c
  SITE (4419): n equals a,t,g, or c
  SITE (4420): n equals a,t,g, or c
  SITE (4421): n equals a,t,g, or c
  SITE (4422): n equals a,t,g, or c
  SITE (4423): n equals a,t,g, or c
  SITE (4424): n equals a,t,g, or c
  SITE (4425): n equals a,t,g, or c
  SITE (4426): n equals a,t,g, or c
  SITE (4427): n equals a,t,g, or c
  SITE (4428): n equals a,t,g, or c
  SITE (4429): n equals a,t,g, or c
  SITE (4430): n equals a,t,g, or c
  SITE (4431): n equals a,t,g, or c
  SITE (4432): n equals a,t,g, or c
  SITE (4433): n equals a,t,g, or c
  SITE (4434): n equals a,t,g, or c
  SITE (4435): n equals a,t,g, or c
  SITE (4436): n equals a,t,g, or c
  SITE (4437): n equals a,t,g, or c
  SITE (4438): n equals a,t,g, or c
  SITE (4439): n equals a,t,g, or c
  SITE (4440): n equals a,t,g, or c
  SITE (4441): n equals a,t,g, or c
  SITE (4442): n equals a,t,g, or c
  SITE (4443): n equals a,t,g, or c
  SITE (4444): n equals a,t,g, or c
  SITE (4445): n equals a,t,g, or c
  SITE (4446): n equals a,t,g, or c
  SITE (4447): n equals a,t,g, or c
  SITE (4448): n equals a,t,g, or c
  SITE (4449): n equals a,t,g, or c
  SITE (4450): n equals a,t,g, or c
  SITE (4451): n equals a,t,g, or c
  SITE (4452): n equals a,t,g, or c
  SITE (4453): n equals a,t,g, or c
  SITE (4454): n equals a,t,g, or c
  SITE (4455): n equals a,t,g, or c
  SITE (4456): n equals a,t,g, or c
  SITE (4457): n equals a,t,g, or c
  SITE (4458): n equals a,t,g, or c
  SITE (4459): n equals a,t,g, or c
  SITE (4460): n equals a,t,g, or c
  SITE (4461): n equals a,t,g, or c
  SITE (4462): n equals a,t,g, or c
  SITE (4463): n equals a,t,g, or c
  SITE (4464): n equals a,t,g, or c
  SITE (4465): n equals a,t,g, or c
  SITE (4466): n equals a,t,g, or c
  SITE (4467): n equals a,t,g, or c
  SITE (4468): n equals a,t,g, or c
  SITE (4469): n equals a,t,g, or c
  SITE (4470): n equals a,t,g, or c
  SITE (4471): n equals a,t,g, or c
  SITE (4472): n equals a,t,g, or c
  SITE (4473): n equals a,t,g, or c
  SITE (4474): n equals a,t,g, or c
  SITE (4475): n equals a,t,g, or c
  SITE (4476): n equals a,t,g, or c
  SITE (4477): n equals a,t,g, or c
  SITE (4478): n equals a,t,g, or c
  SITE (4479): n equals a,t,g, or c
  SITE (4480): n equals a,t,g, or c
  SITE (4481): n equals a,t,g, or c
  SITE (4482): n equals a,t,g, or c
  SITE (4483): n equals a,t,g, or c
  SITE (4484): n equals a,t,g, or c
  SITE (4485): n equals a,t,g, or c
  SITE (4486): n equals a,t,g, or c
  SITE (4487): n equals a,t,g, or c
  SITE (4488): n equals a,t,g, or c
  SITE (4489): n equals a,t,g, or c
  SITE (4490): n equals a,t,g, or c
  SITE (4491): n equals a,t,g, or c
  SITE (4492): n equals a,t,g, or c
  SITE (4493): n equals a,t,g, or c
  SITE (4494): n equals a,t,g, or c
  SITE (4495): n equals a,t,g, or c
  SITE (4496): n equals a,t,g, or c
  SITE (4497): n equals a,t,g, or c
  SITE (4498): n equals a,t,g, or c
  SITE (4499): n equals a,t,g, or c
  SITE (4500): n equals a,t,g, or c
  SITE (4501): n equals a,t,g, or c
  SITE (4502): n equals a,t,g, or c
  SITE (4503): n equals a,t,g, or c
  SITE (4504): n equals a,t,g, or c
  SITE (4505): n equals a,t,g, or c
  SITE (4506): n equals a,t,g, or c
  SITE (4507): n equals a,t,g, or c
  SITE (4508): n equals a,t,g, or c
  SITE (4509): n equals a,t,g, or c
  SITE (4510): n equals a,t,g, or c
  SITE (4511): n equals a,t,g, or c
  SITE (4512): n equals a,t,g, or c
  SITE (4513): n equals a,t,g, or c
  SITE (4514): n equals a,t,g, or c
  SITE (4515): n equals a,t,g, or c
  SITE (4516): n equals a,t,g, or c
  SITE (4517): n equals a,t,g, or c
  SITE (4518): n equals a,t,g, or c
  SITE (4519): n equals a,t,g, or c
  SITE (4520): n equals a,t,g, or c
  SITE (4521): n equals a,t,g, or c
  SITE (4522): n equals a,t,g, or c
  SITE (4523): n equals a,t,g, or c
  SITE (4524): n equals a,t,g, or c
  SITE (4525): n equals a,t,g, or c
  SITE (4526): n equals a,t,g, or c
  SITE (4527): n equals a,t,g, or c
  SITE (4528): n equals a,t,g, or c
  SITE (4529): n equals a,t,g, or c
  SITE (4530): n equals a,t,g, or c
  SITE (4531): n equals a,t,g, or c
  SITE (4532): n equals a,t,g, or c
  SITE (4533): n equals a,t,g, or c
  SITE (4534): n equals a,t,g, or c
  SITE (4535): n equals a,t,g, or c
  SITE (4536): n equals a,t,g, or c
  SITE (4537): n equals a,t,g, or c
  SITE (4538): n equals a,t,g, or c
  SITE (4539): n equals a,t,g, or c
  SITE (4540): n equals a,t,g, or c
  SITE (4541): n equals a,t,g, or c
  SITE (4542): n equals a,t,g, or c
  SITE (4543): n equals a,t,g, or c
  SITE (4544): n equals a,t,g, or c
  SITE (4545): n equals a,t,g, or c
  SITE (4546): n equals a,t,g, or c
  SITE (4547): n equals a,t,g, or c
  SITE (4548): n equals a,t,g, or c
  SITE (4549): n equals a,t,g, or c
  SITE (4550): n equals a,t,g, or c
  SITE (4551): n equals a,t,g, or c
  SITE (4552): n equals a,t,g, or c
  SITE (4553): n equals a,t,g, or c
  SITE (4554): n equals a,t,g, or c
  SITE (4555): n equals a,t,g, or c
  SITE (4556): n equals a,t,g, or c
  SITE (4557): n equals a,t,g, or c
  SITE (4558): n equals a,t,g, or c
  SITE (4559): n equals a,t,g, or c
  SITE (4560): n equals a,t,g, or c
  SITE (4561): n equals a,t,g, or c
  SITE (4562): n equals a,t,g, or c
  SITE (4563): n equals a,t,g, or c
  SITE (4564): n equals a,t,g, or c
  SITE (4565): n equals a,t,g, or c
  SITE (4566): n equals a,t,g, or c
  SITE (4567): n equals a,t,g, or c
  SITE (4568): n equals a,t,g, or c
  SITE (4569): n equals a,t,g, or c
  SITE (4570): n equals a,t,g, or c
  SITE (4571): n equals a,t,g, or c
  SITE (4572): n equals a,t,g, or c
  SITE (4573): n equals a,t,g, or c
  SITE (4574): n equals a,t,g, or c
  SITE (4575): n equals a,t,g, or c
  SITE (4576): n equals a,t,g, or c
  SITE (4577): n equals a,t,g, or c
  SITE (4578): n equals a,t,g, or c
  SITE (4579): n equals a,t,g, or c
  SITE (4580): n equals a,t,g, or c
  SITE (4581): n equals a,t,g, or c
  SITE (4582): n equals a,t,g, or c
  SITE (4583): n equals a,t,g, or c
  SITE (4584): n equals a,t,g, or c
  SITE (4585): n equals a,t,g, or c
  SITE (4586): n equals a,t,g, or c
  SITE (4587): n equals a,t,g, or c
  SITE (4588): n equals a,t,g, or c
  SITE (4589): n equals a,t,g, or c
  SITE (4590): n equals a,t,g, or c
  SITE (4591): n equals a,t,g, or c
  SITE (4592): n equals a,t,g, or c
  SITE (4593): n equals a,t,g, or c
  SITE (4594): n equals a,t,g, or c
  SITE (4595): n equals a,t,g, or c
  SITE (4596): n equals a,t,g, or c
  SITE (4597): n equals a,t,g, or c
  SITE (4598): n equals a,t,g, or c
  SITE (4599): n equals a,t,g, or c
  SITE (4600): n equals a,t,g, or c
  SITE (4601): n equals a,t,g, or c
  SITE (4602): n equals a,t,g, or c
  SITE (4603): n equals a,t,g, or c
  SITE (4604): n equals a,t,g, or c
  SITE (4605): n equals a,t,g, or c
  SITE (4606): n equals a,t,g, or c
  SITE (4607): n equals a,t,g, or c
  SITE (4608): n equals a,t,g, or c
  SITE (4609): n equals a,t,g, or c
  SITE (4610): n equals a,t,g, or c
  SITE (4611): n equals a,t,g, or c
  SITE (4612): n equals a,t,g, or c
  SITE (4613): n equals a,t,g, or c
  SITE (4614): n equals a,t,g, or c
  SITE (4615): n equals a,t,g, or c
  SITE (4616): n equals a,t,g, or c
  SITE (4617): n equals a,t,g, or c
  SITE (4618): n equals a,t,g, or c
  SITE (4619): n equals a,t,g, or c
  SITE (4620): n equals a,t,g, or c
  SITE (4621): n equals a,t,g, or c
  SITE (4622): n equals a,t,g, or c
  SITE (4623): n equals a,t,g, or c
  SITE (4624): n equals a,t,g, or c
  SITE (4625): n equals a,t,g, or c
  SITE (4626): n equals a,t,g, or c
  SITE (4627): n equals a,t,g, or c
  SITE (4628): n equals a,t,g, or c
  SITE (4629): n equals a,t,g, or c
  SITE (4630): n equals a,t,g, or c
  SITE (4631): n equals a,t,g, or c
  SITE (4632): n equals a,t,g, or c
  SITE (4633): n equals a,t,g, or c
  SITE (4634): n equals a,t,g, or c
  SITE (4635): n equals a,t,g, or c
  SITE (4636): n equals a,t,g, or c
  SITE (4637): n equals a,t,g, or c
  SITE (4638): n equals a,t,g, or c
  SITE (4639): n equals a,t,g, or c
  SITE (4640): n equals a,t,g, or c
  SITE (4641): n equals a,t,g, or c
  SITE (4642): n equals a,t,g, or c
  SITE (4643): n equals a,t,g, or c
  SITE (4644): n equals a,t,g, or c
  SITE (4645): n equals a,t,g, or c
  SITE (4646): n equals a,t,g, or c
  SITE (4647): n equals a,t,g, or c
  SITE (4648): n equals a,t,g, or c
  SITE (4649): n equals a,t,g, or c
  SITE (4650): n equals a,t,g, or c
  SITE (4651): n equals a,t,g, or c
  SITE (4652): n equals a,t,g, or c
  SITE (4653): n equals a,t,g, or c
  SITE (4654): n equals a,t,g, or c
  SITE (4655): n equals a,t,g, or c
  SITE (4656): n equals a,t,g, or c
  SITE (4657): n equals a,t,g, or c
  SITE (4658): n equals a,t,g, or c
  SITE (4659): n equals a,t,g, or c
  SITE (4660): n equals a,t,g, or c
  SITE (4661): n equals a,t,g, or c
  SITE (4662): n equals a,t,g, or c
  SITE (4663): n equals a,t,g, or c
  SITE (4664): n equals a,t,g, or c
  SITE (4665): n equals a,t,g, or c
  SITE (4666): n equals a,t,g, or c
  SITE (4667): n equals a,t,g, or c
  SITE (4668): n equals a,t,g, or c
  SITE (4669): n equals a,t,g, or c
  SITE (4670): n equals a,t,g, or c
  SITE (4671): n equals a,t,g, or c
  SITE (4672): n equals a,t,g, or c
  SITE (4673): n equals a,t,g, or c
  SITE (4674): n equals a,t,g, or c
  SITE (4675): n equals a,t,g, or c
  SITE (4676): n equals a,t,g, or c
  SITE (4677): n equals a,t,g, or c
  SITE (4678): n equals a,t,g, or c
  SITE (4679): n equals a,t,g, or c
  SITE (4680): n equals a,t,g, or c
  SITE (4681): n equals a,t,g, or c
  SITE (4682): n equals a,t,g, or c
  SITE (4683): n equals a,t,g, or c
  SITE (4684): n equals a,t,g, or c
  SITE (4685): n equals a,t,g, or c
  SITE (4686): n equals a,t,g, or c
  SITE (4687): n equals a,t,g, or c
  SITE (4688): n equals a,t,g, or c
  SITE (4689): n equals a,t,g, or c
  SITE (4690): n equals a,t,g, or c
  SITE (4691): n equals a,t,g, or c
  SITE (4692): n equals a,t,g, or c
  SITE (4693): n equals a,t,g, or c
  SITE (4694): n equals a,t,g, or c
  SITE (4695): n equals a,t,g, or c
  SITE (4696): n equals a,t,g, or c
  SITE (4697): n equals a,t,g, or c
  SITE (4698): n equals a,t,g, or c
  SITE (4699): n equals a,t,g, or c
  SITE (4700): n equals a,t,g, or c
  SITE (4701): n equals a,t,g, or c
  SITE (4702): n equals a,t,g, or c
  SITE (4703): n equals a,t,g, or c
  SITE (4704): n equals a,t,g, or c
  SITE (4705): n equals a,t,g, or c
  SITE (4706): n equals a,t,g, or c
  SITE (4707): n equals a,t,g, or c
  SITE (4708): n equals a,t,g, or c
  SITE (4709): n equals a,t,g, or c
  SITE (4710): n equals a,t,g, or c
  SITE (4711): n equals a,t,g, or c
  SITE (4712): n equals a,t,g, or c
  SITE (4713): n equals a,t,g, or c
  SITE (4714): n equals a,t,g, or c
  SITE (4715): n equals a,t,g, or c
  SITE (4716): n equals a,t,g, or c
  SITE (4717): n equals a,t,g, or c
  SITE (4718): n equals a,t,g, or c
  SITE (4719): n equals a,t,g, or c
  SITE (4720): n equals a,t,g, or c
  SITE (4721): n equals a,t,g, or c
  SITE (4722): n equals a,t,g, or c
  SITE (4723): n equals a,t,g, or c
  SITE (4724): n equals a,t,g, or c
  SITE (4725): n equals a,t,g, or c
  SITE (4726): n equals a,t,g, or c
  SITE (4727): n equals a,t,g, or c
  SITE (4728): n equals a,t,g, or c
  SITE (4729): n equals a,t,g, or c
  SITE (4730): n equals a,t,g, or c
  SITE (4731): n equals a,t,g, or c
  SITE (4732): n equals a,t,g, or c
  SITE (4733): n equals a,t,g, or c
  SITE (4734): n equals a,t,g, or c
  SITE (4735): n equals a,t,g, or c
  SITE (4736): n equals a,t,g, or c
  SITE (4737): n equals a,t,g, or c
  SITE (4738): n equals a,t,g, or c
  SITE (4739): n equals a,t,g, or c
  SITE (4740): n equals a,t,g, or c
  SITE (4741): n equals a,t,g, or c
  SITE (4742): n equals a,t,g, or c
  SITE (4743): n equals a,t,g, or c
  SITE (4744): n equals a,t,g, or c
  SITE (4745): n equals a,t,g, or c
  SITE (4746): n equals a,t,g, or c
  SITE (4747): n equals a,t,g, or c
  SITE (4748): n equals a,t,g, or c
  SITE (4749): n equals a,t,g, or c
  SITE (4750): n equals a,t,g, or c
  SITE (4751): n equals a,t,g, or c
  SITE (4752): n equals a,t,g, or c
  SITE (4753): n equals a,t,g, or c
  SITE (4754): n equals a,t,g, or c
  SITE (4755): n equals a,t,g, or c
  SITE (4756): n equals a,t,g, or c
  SITE (4757): n equals a,t,g, or c
  SITE (4758): n equals a,t,g, or c
  SITE (4759): n equals a,t,g, or c
  SITE (4760): n equals a,t,g, or c
  SITE (4761): n equals a,t,g, or c
  SITE (4762): n equals a,t,g, or c
  SITE (4763): n equals a,t,g, or c
  SITE (4764): n equals a,t,g, or c
  SITE (4765): n equals a,t,g, or c
  SITE (4766): n equals a,t,g, or c
  SITE (4767): n equals a,t,g, or c
  SITE (4768): n equals a,t,g, or c
  SITE (4769): n equals a,t,g, or c
  SITE (4770): n equals a,t,g, or c
  SITE (4771): n equals a,t,g, or c
  SITE (4772): n equals a,t,g, or c
  SITE (4773): n equals a,t,g, or c
  SITE (4774): n equals a,t,g, or c
  SITE (4775): n equals a,t,g, or c
  SITE (4776): n equals a,t,g, or c
  SITE (4777): n equals a,t,g, or c
  SITE (4778): n equals a,t,g, or c
  SITE (4779): n equals a,t,g, or c
  SITE (4780): n equals a,t,g, or c
  SITE (4781): n equals a,t,g, or c
  SITE (4782): n equals a,t,g, or c
  SITE (4783): n equals a,t,g, or c
  SITE (4784): n equals a,t,g, or c
  SITE (4785): n equals a,t,g, or c
  SITE (4786): n equals a,t,g, or c
  SITE (4787): n equals a,t,g, or c
  SITE (4788): n equals a,t,g, or c
  SITE (4789): n equals a,t,g, or c
  SITE (4790): n equals a,t,g, or c
  SITE (4791): n equals a,t,g, or c
  SITE (4792): n equals a,t,g, or c
  SITE (4793): n equals a,t,g, or c
  SITE (4794): n equals a,t,g, or c
  SITE (4795): n equals a,t,g, or c
  SITE (4796): n equals a,t,g, or c
  SITE (4797): n equals a,t,g, or c
  SITE (4798): n equals a,t,g, or c
  SITE (4799): n equals a,t,g, or c
  SITE (4800): n equals a,t,g, or c
  SITE (4801): n equals a,t,g, or c
  SITE (4802): n equals a,t,g, or c
  SITE (4803): n equals a,t,g, or c
  SITE (4804): n equals a,t,g, or c
  SITE (4805): n equals a,t,g, or c
  SITE (4806): n equals a,t,g, or c
  SITE (4807): n equals a,t,g, or c
  SITE (4808): n equals a,t,g, or c
  SITE (4809): n equals a,t,g, or c
  SITE (4810): n equals a,t,g, or c
  SITE (4811): n equals a,t,g, or c
  SITE (4812): n equals a,t,g, or c
  SITE (4813): n equals a,t,g, or c
  SITE (4814): n equals a,t,g, or c
  SITE (4815): n equals a,t,g, or c
  SITE (4816): n equals a,t,g, or c
  SITE (4817): n equals a,t,g, or c
  SITE (4818): n equals a,t,g, or c
  SITE (4819): n equals a,t,g, or c
  SITE (4820): n equals a,t,g, or c
  SITE (4821): n equals a,t,g, or c
  SITE (4822): n equals a,t,g, or c
  SITE (4823): n equals a,t,g, or c
  SITE (4824): n equals a,t,g, or c
  SITE (4825): n equals a,t,g, or c
  SITE (4826): n equals a,t,g, or c
  SITE (4827): n equals a,t,g, or c
  SITE (4828): n equals a,t,g, or c
  SITE (4829): n equals a,t,g, or c
  SITE (4830): n equals a,t,g, or c
  SITE (4831): n equals a,t,g, or c
  SITE (4832): n equals a,t,g, or c
  SITE (4833): n equals a,t,g, or c
  SITE (4834): n equals a,t,g, or c
  SITE (4835): n equals a,t,g, or c
  SITE (4836): n equals a,t,g, or c
  SITE (4837): n equals a,t,g, or c
  SITE (4838): n equals a,t,g, or c
  SITE (4839): n equals a,t,g, or c
  SITE (4840): n equals a,t,g, or c
  SITE (4841): n equals a,t,g, or c
  SITE (4842): n equals a,t,g, or c
  SITE (4843): n equals a,t,g, or c
  SITE (4844): n equals a,t,g, or c
  SITE (4845): n equals a,t,g, or c
  SITE (4846): n equals a,t,g, or c
  SITE (4847): n equals a,t,g, or c
  SITE (4848): n equals a,t,g, or c
  SITE (4849): n equals a,t,g, or c
  SITE (4850): n equals a,t,g, or c
  SITE (4851): n equals a,t,g, or c
  SITE (4852): n equals a,t,g, or c
  SITE (4853): n equals a,t,g, or c
  SITE (4854): n equals a,t,g, or c
  SITE (4855): n equals a,t,g, or c
  SITE (4856): n equals a,t,g, or c
  SITE (4857): n equals a,t,g, or c
  SITE (4858): n equals a,t,g, or c
  SITE (4859): n equals a,t,g, or c
  SITE (4860): n equals a,t,g, or c
  SITE (4861): n equals a,t,g, or c
  SITE (4862): n equals a,t,g, or c
  SITE (4863): n equals a,t,g, or c
  SITE (4864): n equals a,t,g, or c
  SITE (4865): n equals a,t,g, or c
  SITE (4866): n equals a,t,g, or c
  SITE (4867): n equals a,t,g, or c
  SITE (4868): n equals a,t,g, or c
  SITE (4869): n equals a,t,g, or c
  SITE (4870): n equals a,t,g, or c
  SITE (4871): n equals a,t,g, or c
  SITE (4872): n equals a,t,g, or c
  SITE (4873): n equals a,t,g, or c
  SITE (4874): n equals a,t,g, or c
  SITE (4875): n equals a,t,g, or c
  SITE (4876): n equals a,t,g, or c
  SITE (4877): n equals a,t,g, or c
  SITE (4878): n equals a,t,g, or c
  SITE (4879): n equals a,t,g, or c
  SITE (4880): n equals a,t,g, or c
  SITE (4881): n equals a,t,g, or c
  SITE (4882): n equals a,t,g, or c
  SITE (4883): n equals a,t,g, or c
  SITE (4884): n equals a,t,g, or c
  SITE (4885): n equals a,t,g, or c
  SITE (4886): n equals a,t,g, or c
  SITE (4887): n equals a,t,g, or c
  SITE (4888): n equals a,t,g, or c
  SITE (4889): n equals a,t,g, or c
  SITE (4890): n equals a,t,g, or c
  SITE (4891): n equals a,t,g, or c
  SITE (4892): n equals a,t,g, or c

SEQ ID NO: 7796 - DNA, 181 bp, Homo sapiens; identical to SEQ ID NO: 5399

SEQ ID NO: 7797 - DNA, 142 bp, Homo sapiens; identical to SEQ ID NO: 5400

SEQ ID NO: 7798 - DNA, 319 bp, Homo sapiens; identical to SEQ ID NO: 5402

SEQ ID NO: 7799 - DNA, 316 bp, Homo sapiens; identical to SEQ ID NO: 5403

SEQ ID NO: 7800 - DNA, 322 bp, Homo sapiens; identical to SEQ ID NO: 5405

SEQ ID NO: 7801 - DNA, 286 bp, Homo sapiens; identical to SEQ ID NO: 5406

SEQ ID NO: 7802 - DNA, 305 bp, Homo sapiens; identical to SEQ ID NO: 5407

SEQ ID NO: 7803 - DNA, 168 bp, Homo sapiens; identical to SEQ ID NO: 5968

SEQ ID NO: 7804 - DNA, 300 bp, Homo sapiens
cggtggctcacgcctgtaatcccagcactttgggaggccgaggcgggcggatcacgaggtcaggagatcgagaccatcccggctaaaatggtgaaaccccgtctctactaaaaatacaaaaaattagccgggcgtagtggcgggcgcctgtggtcccagctacttgggaagctgaggcaggagaatggcgtgaacccgggaggcggagcttgcagtgagccgagatcccgccactgcactccagcctgggcgacagagcgagactccgtctcaaaaaaaaaaaaaaaaaaaaacttgaga

SEQ ID NO: 7805 - DNA, 316 bp, Homo sapiens; identical to SEQ ID NO: 5409

SEQ ID NO: 7806 - DNA, 283 bp, Homo sapiens; identical to SEQ ID NO: 5410

SEQ ID NO: 7807 - DNA, 293 bp, Homo sapiens; identical to SEQ ID NO: 5412

SEQ ID NO: 7808 - DNA, 170 bp, Homo sapiens; identical to SEQ ID NO: 5414

SEQ ID NO: 7809 - DNA, 300 bp, Homo sapiens; identical to SEQ ID NO: 5417

SEQ ID NO: 7810 - DNA, 306 bp, Homo sapiens; identical to SEQ ID NO: 5419

SEQ ID NO: 7811 - DNA, 294 bp, Homo sapiens; identical to SEQ ID NO: 5420

SEQ ID NO: 7812 - DNA, 184 bp, Homo sapiens; identical to SEQ ID NO: 5421

SEQ ID NO: 7813 - DNA, 299 bp, Homo sapiens; identical to SEQ ID NO: 5424
  SITE (18): n equals a,t,g, or c
  SITE (27): n equals a,t,g, or c

SEQ ID NO: 7814 - DNA, 147 bp, Homo sapiens; identical to SEQ ID NO: 5241

SEQ ID NO: 7815 - DNA, 316 bp, Homo sapiens; identical to SEQ ID NO: 5429

SEQ ID NO: 7816 - DNA, 131 bp, Homo sapiens; identical to SEQ ID NO: 5432

SEQ ID NO: 7817 - DNA, 257 bp, Homo sapiens
tcacacctgtaatcccagcactttgggaggccgaggcgggtggatcacgaggtcaggagatcgagaccatcctggctaatacggtgaaagcccgtctctactaaaaatacaaaaaattagccgggcgtggtggcgggcacctgtggtcccagctacttcgggaggctgaggcaggagaatggtgtgaacccgggaggcagagcttgcagtgagccaagatcgcgccactgcattccagcctgggcgacagagcgaga

SEQ ID NO: 7818 - DNA, 227 bp, Homo sapiens; identical to SEQ ID NO: 5436

SEQ ID NO: 7819 - DNA, 296 bp, Homo sapiens
tatttaggccgggtgcggtggctcacgcgtgtaatcccagcactttgggaggctgaggcgggcggatcacaaggtcaggagatcgagaccatcttggctaacacggtgaaaccccgtctctactaaaaatacaaaaaatgtggcaggtgcctgtagtcccagctactcgggaggctgaggcaggagaatggcgtgaacccgggaggcggagcttgcagtgagccgagatcgcgccactgcactctagcctgggcgacagagcaagactccgtctcaaaaaacaaaacaaaacaaaa

SEQ ID NO: 7820 - DNA, 235 bp, Homo sapiens; identical to SEQ ID NO: 5438
  SITE (230): n equals a,t,g, or c

SEQ ID NO: 7821 - DNA, 220 bp, Homo sapiens; identical to SEQ ID NO: 5444

SEQ ID NO: 7822 - DNA, 306 bp, Homo sapiens; identical to SEQ ID NO: 5445

SEQ ID NO: 7823 - DNA, 143 bp, Homo sapiens; identical to SEQ ID NO: 5446

SEQ ID NO: 7824 - DNA, 170 bp, Homo sapiens; identical to SEQ ID NO: 5447

SEQ ID NO: 7825 - DNA, 171 bp, Homo sapiens; identical to SEQ ID NO: 5452

SEQ ID NO: 7826 - DNA, 125 bp, Homo sapiens; identical to SEQ ID NO: 5454

SEQ ID NO: 7827 - DNA, 196 bp, Homo sapiens; identical to SEQ ID NO: 5455
  SITE (106): n equals a,t,g, or c

SEQ ID NO: 7828 - DNA, 183 bp, Homo sapiens; identical to SEQ ID NO: 5243

SEQ ID NO: 7829 - DNA, 319 bp, Homo sapiens; identical to SEQ ID NO: 5458

SEQ ID NO: 7830 - DNA, 311 bp, Homo sapiens; identical to SEQ ID NO: 5460

SEQ ID NO: 7831 - DNA, 175 bp, Homo sapiens; identical to SEQ ID NO: 5462

SEQ ID NO: 7832 - DNA, 196 bp, Homo sapiens; identical to SEQ ID NO: 5463

SEQ ID NO: 7833 - DNA, 159 bp, Homo sapiens; identical to SEQ ID NO: 5465

SEQ ID NO: 7834 - DNA, 219 bp, Homo sapiens; identical to SEQ ID NO: 5467

SEQ ID NO: 7835 - DNA, 301 bp, Homo sapiens; identical to SEQ ID NO: 5468

SEQ ID NO: 7836 - DNA, 154 bp, Homo sapiens; identical to SEQ ID NO: 5469

SEQ ID NO: 7837 - DNA, 2548 bp, Homo sapiens; identical to SEQ ID NO: 5470

SEQ ID NO: 7838 - DNA, 6141 bp, Homo sapiens; identical to SEQ ID NO: 5471

SEQ ID NO: 7839 - DNA, 207 bp, Homo sapiens; identical to SEQ ID NO: 5474

SEQ ID NO: 7840 - DNA, 230 bp, Homo sapiens; identical to SEQ ID NO: 5475

SEQ ID NO: 7841 - DNA, 288 bp, Homo sapiens; identical to SEQ ID NO: 5476

SEQ ID NO: 7842 - DNA, 189 bp, Homo sapiens; identical to SEQ ID NO: 5479

SEQ ID NO: 7843 - DNA, 207 bp, Homo sapiens; identical to SEQ ID NO: 5480

SEQ ID NO: 7844 - DNA, 150 bp, Homo sapiens; identical to SEQ ID NO: 5482
  SITE (21): n equals a,t,g, or c

SEQ ID NO: 7845 - DNA, 162 bp, Homo sapiens; identical to SEQ ID NO: 5244

SEQ ID NO: 7846 - DNA, 301 bp, Homo sapiens; identical to SEQ ID NO: 5486
  SITE (98): n equals a,t,g, or c

SEQ ID NO: 7847 - DNA, 301 bp, Homo sapiens; identical to SEQ ID NO: 5488

SEQ ID NO: 7848 - DNA, 611 bp, Homo sapiens; identical to SEQ ID NO: 5489

SEQ ID NO: 7849 - DNA, 291 bp, Homo sapiens; identical to SEQ ID NO: 5490

SEQ ID NO: 7850 - DNA, 303 bp, Homo sapiens; identical to SEQ ID NO: 5492

SEQ ID NO: 7851 - DNA, 267 bp, Homo sapiens; identical to SEQ ID NO: 5493

SEQ ID NO: 7852 - DNA, 246 bp, Homo sapiens
gatcacgaggtcaggagatcgagaccatcctggctaacacggtgaaaccccatctctactaaaaatacaaaaaattagctgggcgtggtggcaggcgcctgtagtcccagctactcaggaggctgaggcaggagaatggcgtgaacctgggaggtggagcttgcagtgagccgagattgcgccactgcactccagcctgggcgacagagtgagactccgtctcaaaaaaaaaaaacaaaaaaacaa

SEQ ID NO: 7853 - DNA, 100 bp, Homo sapiens; identical to SEQ ID NO: 5916

SEQ ID NO: 7854 - DNA, 129 bp, Homo sapiens; identical to SEQ ID NO: 5494

SEQ ID NO: 7855 - DNA, 193 bp, Homo sapiens; identical to SEQ ID NO: 5245

SEQ ID NO: 7856 - DNA, 169 bp, Homo sapiens
attagccgggcgaggtggcgggcgcctgtagtcccagctactcgggaggctgaggcaggagaatggcgtgaacccgggaggcggagcttgcagtgagccgagattgcaccactgcactccagcctgggcaacagagtgagactctttctcaaaaaaaaataataataaa

SEQ ID NO: 7857 - DNA, 3991 bp, Homo sapiens; identical to SEQ ID NO: 5499

SEQ ID NO: 7858 - DNA, 177 bp, Homo sapiens; identical to SEQ ID NO: 5500

SEQ ID NO: 7859 - DNA, 292 bp, Homo sapiens; identical to SEQ ID NO: 5501

SEQ ID NO: 7860 - DNA, 140 bp, Homo sapiens; identical to SEQ ID NO: 5978

SEQ ID NO: 7861 - DNA, 294 bp, Homo sapiens
ctgctgggtgcggtggctcacgcctgtaatcccagcactttgggaggccagagcgggtggatcacgaggtcaggagatggagaccatcctgactaacatggtgaaaccccgtctctactaagaatacaaaaaattagctgggcgtgttggcgggcacctgtagtcccagctactcaggaggctgaggcaggagaatggcgtgaacccgggaggcggagcttgcagtgagccgagatcgcaccactgcactccagcctgggcgacagagcaagactctgtctcaaaaaaaaaaaa

SEQ ID NO: 7862 - DNA, 280 bp, Homo sapiens; identical to SEQ ID NO: 5505

SEQ ID NO: 7863 - DNA, 187 bp, Homo sapiens; identical to SEQ ID NO: 5506

SEQ ID NO: 7864 - DNA, 246 bp, Homo sapiens; identical to SEQ ID NO: 5507

SEQ ID NO: 7865 - DNA, 114 bp, Homo sapiens; identical to SEQ ID NO: 5508

SEQ ID NO: 7866 - DNA, 173 bp, Homo sapiens; identical to SEQ ID NO: 5510

SEQ ID NO: 7867 - DNA, 3905 bp, Homo sapiens; identical to SEQ ID NO: 5513

SEQ ID NO: 7868 - DNA, 153 bp, Homo sapiens; identical to SEQ ID NO: 5246

SEQ ID NO: 7869 - DNA, 269 bp, Homo sapiens; identical to SEQ ID NO: 5515

SEQ ID NO: 7870 - DNA, 202 bp, Homo sapiens; identical to SEQ ID NO: 5516

SEQ ID NO: 7871 - DNA, 203 bp, Homo sapiens; identical to SEQ ID NO: 5247

SEQ ID NO: 7872 - DNA, 166 bp, Homo sapiens; identical to SEQ ID NO: 5519

SEQ ID NO: 7873 - DNA, 295 bp, Homo sapiens; identical to SEQ ID NO: 5520

SEQ ID NO: 7874 - DNA, 280 bp, Homo sapiens; identical to SEQ ID NO: 5522

SEQ ID NO: 7875 - DNA, 190 bp, Homo sapiens; identical to SEQ ID NO: 5523

SEQ ID NO: 7876 - DNA, 2364 bp, Homo sapiens; identical to SEQ ID NO: 5525

SEQ ID NO: 7877 - DNA, 304 bp, Homo sapiens; identical to SEQ ID NO: 5526

SEQ ID NO: 7878 - DNA, 261 bp, Homo sapiens; identical to SEQ ID NO: 5527

SEQ ID NO: 7879 - DNA, 318 bp, Homo sapiens
gaaataggtgccgggcgcggtggctcacgcctgtaatcccagcactttgggaggccgaggcgggcggatcacgaggtcaggagatcaagaccatcccggctaaaaacggtgaaaccccgtctctactaaaaatacaaaaaattagctgggcgtagtggcgggcgcctgtagtcccagctacttgggaggctgaggcaggagaatggcgtgaacccgggaggcggagcttgcagtgagccgagatcccgccactgcactccagcctgggcgacagagcgagactccatctcaaaaaaaaaaaaaaagaaaggaaataag

SEQ ID NO: 7880 - DNA, 61 bp, Homo sapiens; identical to SEQ ID NO: 7550

SEQ ID NO: 7881 - DNA, 312 bp, Homo sapiens; identical to SEQ ID NO: 5530

SEQ ID NO: 7882 - DNA, 158 bp, Homo sapiens; identical to SEQ ID NO: 5531

SEQ ID NO: 7883 - DNA, 298 bp, Homo sapiens; identical to SEQ ID NO: 5532

SEQ ID NO: 7884 - DNA, 303 bp, Homo sapiens; identical to SEQ ID NO: 5537

SEQ ID NO: 7885 - DNA, 191 bp, Homo sapiens; identical to SEQ ID NO: 5538

SEQ ID NO: 7886 - DNA, 193 bp, Homo sapiens; identical to SEQ ID NO: 5539

SEQ ID NO: 7887 - DNA, 195 bp, Homo sapiens; identical to SEQ ID NO: 5540

SEQ ID NO: 7888 - DNA, 281 bp, Homo sapiens; identical to SEQ ID NO: 5541

SEQ ID NO: 7889 - DNA, 297 bp, Homo sapiens; identical to SEQ ID NO: 5544

SEQ ID NO: 7890 - DNA, 182 bp, Homo sapiens; identical to SEQ ID NO: 5545

SEQ ID NO: 7891 - DNA, 323 bp, Homo sapiens; identical to SEQ ID NO: 5548

SEQ ID NO: 7892 - DNA, 309 bp, Homo sapiens; identical to SEQ ID NO: 5551

SEQ ID NO: 7893 - DNA, 310 bp, Homo sapiens; identical to SEQ ID NO: 5552

SEQ ID NO: 7894 - DNA, 311 bp, Homo sapiens; identical to SEQ ID NO: 5555

SEQ ID NO: 7895 - DNA, 183 bp, Homo sapiens; identical to SEQ ID NO: 5556

SEQ ID NO: 7896 - DNA, 303 bp, Homo sapiens
actgtagaggccgggcgcggtggctcacgcctgtaatcccagcactttgggaggccgaggtgggcggatcacgaggtcaggagatcgaaaccatcctggctaacacggtgaaaccccgtctctactaaaaatacaaaaaaattagccaggcgtggtggcaggcacctgtagccccagctactcgggaggctgaggcaggagaatggcatgaacccaggaggcagagcttgcagtgagccgagatcccgccactgcactccagcctgggtgatagagcaagactccgtctcaaaaaaaaaaaga

SEQ ID NO: 7897 - DNA, 292 bp, Homo sapiens; identical to SEQ ID NO: 5557

SEQ ID NO: 7898 - DNA, 136 bp, Homo sapiens; identical to SEQ ID NO: 5560

SEQ ID NO: 7899 - DNA, 273 bp, Homo sapiens; identical to SEQ ID NO: 5561
  SITE (18): n equals a,t,g, or c

SEQ ID NO: 7900 - DNA, 279 bp, Homo sapiens; identical to SEQ ID NO: 5923

SEQ ID NO: 7901 - DNA, 243 bp, Homo sapiens; identical to SEQ ID NO: 5565

SEQ ID NO: 7902 - DNA, 296 bp, Homo sapiens; identical to SEQ ID NO: 5566

SEQ ID NO: 7903 - DNA, 202 bp, Homo sapiens; identical to SEQ ID NO: 5567

SEQ ID NO: 7904 - DNA, 192 bp, Homo sapiens; identical to SEQ ID NO: 5569

SEQ ID NO: 7905 - DNA, 320 bp, Homo sapiens; identical to SEQ ID NO: 5570

SEQ ID NO: 7906 - DNA, 311 bp, Homo sapiens
  SITE (301): n equals a,t,g, or c
agaagaggaagaggctgggtgcggtggctcacgcctgtaatcccagcactttgggaggccgaggcgggtggatcacgaggtcaggagatcgagaccatcctggctaacacggtgaaaccccgtctctactaaaaatacaaaaaaattagccaggcatggtggtgggcacctgtggtcccagctacttgggaggctgaggcaggagaatggcgtgaacccgggaggcggagcttgcagtgagctgagatggcgccactgcactccagcctgggcaacagagcgagactccgtctcaaaaaanaaaaaaaaaa

SEQ ID NO: 7907 - DNA, 308 bp, Homo sapiens; identical to SEQ ID NO: 5572

SEQ ID NO: 7908 - DNA, 153 bp, Homo sapiens; identical to SEQ ID NO: 5573

SEQ ID NO: 7909 - DNA, 300 bp, Homo sapiens; identical to SEQ ID NO: 5574

SEQ ID NO: 7910 - DNA, 308 bp, Homo sapiens; identical to SEQ ID NO: 5575

SEQ ID NO: 7911 - DNA, 150 bp, Homo sapiens; identical to SEQ ID NO: 5248

SEQ ID NO: 7912 - DNA, 198 bp, Homo sapiens; identical to SEQ ID NO: 5578

SEQ ID NO: 7913 - DNA, 266 bp, Homo sapiens; identical to SEQ ID NO: 5581

SEQ ID NO: 7914 - DNA, 322 bp, Homo sapiens; identical to SEQ ID NO: 5582

SEQ ID NO: 7915 - DNA, 250 bp, Homo sapiens; identical to SEQ ID NO: 5583

SEQ ID NO: 7916 - DNA, 142 bp, Homo sapiens; identical to SEQ ID NO: 5249

SEQ ID NO: 7917 - DNA, 181 bp, Homo sapiens; identical to SEQ ID NO: 5586

SEQ ID NO: 7918 - DNA, 122 bp, Homo sapiens; identical to SEQ ID NO: 5588

SEQ ID NO: 7919 - DNA, 123 bp, Homo sapiens; identical to SEQ ID NO: 5589

SEQ ID NO: 7920 - DNA, 270 bp, Homo sapiens; identical to SEQ ID NO: 5591

SEQ ID NO: 7921 - DNA, 237 bp, Homo sapiens; identical to SEQ ID NO: 5593

SEQ ID NO: 7922 - DNA, 45 bp, Homo sapiens
ccagcctgggggacagagcgagactccgtctcaaaaaaaaaaaaa

SEQ ID NO: 7923 - DNA, 214 bp, Homo sapiens; identical to SEQ ID NO: 5597

SEQ ID NO: 7924 - DNA, 297 bp, Homo sapiens; identical to SEQ ID NO: 5599
  SITE (22): n equals a,t,g, or c
  SITE (29): n equals a,t,g, or c
  SITE (94): n equals a,t,g, or c
  SITE (261): n equals a,t,g, or c

SEQ ID NO: 7925 - DNA, 177 bp, Homo sapiens; identical to SEQ ID NO: 5600

SEQ ID NO: 7926 - DNA, 318 bp, Homo sapiens; identical to SEQ ID NO: 5602

SEQ ID NO: 7927 - DNA, 154 bp, Homo sapiens; identical to SEQ ID NO: 5604

SEQ ID NO: 7928 - DNA, 177 bp, Homo sapiens; identical to SEQ ID NO: 5605

SEQ ID NO: 7929 - DNA, 187 bp, Homo sapiens; identical to SEQ ID NO: 5606

SEQ ID NO: 7930 - DNA, 243 bp, Homo sapiens
acgagatcaggagatcgagaccatcctggctaacacggtgaaaccctgtctctactaaaaatacataaaattagccgggcgtgttggcgggcgcctgtagtcccagctactcgggaggctgaggcaggagaatggcgtgaacccgggaggtggagcttgcagtgagctgagattgcgccactgcactccagcctgggcgacagagcgagactctgtctcaaaaaaaaaaaattaaattaaatt

SEQ ID NO: 7931 - DNA, 307 bp, Homo sapiens; identical to SEQ ID NO: 5607

SEQ ID NO: 7932 - DNA, 166 bp, Homo sapiens; identical to SEQ ID NO: 5608

SEQ ID NO: 7933 - DNA, 142 bp, Homo sapiens; identical to SEQ ID NO: 5251

SEQ ID NO: 7934 - DNA, 306 bp, Homo sapiens; identical to SEQ ID NO: 5611

SEQ ID NO: 7935 - DNA, 228 bp, Homo sapiens; identical to SEQ ID NO: 7553

SEQ ID NO: 7936 - DNA, 131 bp, Homo sapiens; identical to SEQ ID NO: 5613

SEQ ID NO: 7937 - DNA, 214 bp, Homo sapiens; identical to SEQ ID NO: 5614

SEQ ID NO: 7938 - DNA, 268 bp, Homo sapiens; identical to SEQ ID NO: 5616

SEQ ID NO: 7939 - DNA, 906 bp, Homo sapiens; identical to SEQ ID NO: 5620

SEQ ID NO: 7940 - DNA, 368 bp, Homo sapiens; identical to SEQ ID NO: 5252

SEQ ID NO: 7941 - DNA, 131 bp, Homo sapiens
ttttttttttgagatggagtctcgctctgtcgcccaggctggagtgcagtggcgggatctcggctcactgcaagctccgcctcccgggttcacgccattctcctgcctcagcctcccaagtagctgggact

SEQ ID NO: 7942 - DNA, 572 bp, Homo sapiens
agtcttgtttccacctgaattgactctcccttagctaagagagccagagagactccatcttggctctttcactggcagccccttcctcaaggacttaacttgtgcaagctgactcctagcacatccaagaatgcaattaactgataagatactgtggcaagctatatccgcagttcccaggaattcgtccgattgataaacgcccaaagccccggatctatcaccttgtaatagtcttaaagcccctgcacctggaactgtttactttcctgtaaccatttgtccttttaactttttgactactttacttccgtaaaattgttttaactagaccccccctccccttcctaaaccaaggtataaaagttaatcaagccccttccttggggccgagagaattttgagcattagccgtctctaggtcgccggctaataaaagactcttaatttgtctcaaagtgtggcgtttttctaactcgcttgggtacaacaaggccaaggtggaaggatcacttgaagctaggagtttgagcaacctgtgcaacctagtgagacccccatctttttaatag

SEQ ID NO: 7943 - DNA, 2925 bp, Homo sapiens; identical to SEQ ID NO: 5990

SEQ ID NO: 7944 - DNA, 3086 bp, Homo sapiens
gtgtgaagggcctgggcattgctatcaaggagctgtttgcagggaagcctgtgctgcggcatcccctggcttggattctgctgctgagcctcatcgtctgtgtgagcacacagattaattacctaaatagggccctggatatattcaacacttccattgtgactccaatatattatgtattctttacaacatcagttttaacttgttcagctattctttttaaggagtggcaagatatgcctgttgacgatgtcattggtactttgagtggcttctttacaatcattgtggggatattcttgttgcatgcctttaaagacgtcagctttagtctagcaagtctgcctgtgtcttttcgaaaagacgagaaagcaatgaatggcaatctctctaatatgtatgaagttcttaataataatgaagaaagcttaacctgtggaatcgaacaacacactggtgaaaatgtctcccgaagaaatggaaatctgacagctttttaagaaaggtgtaattaaaggttaatctgtgattgttatgaagtgaatttgaatatcatcagaatgtgtctgaaaaaacattgtcctcaaataatgttctttaaaggcaatctttttaaagatttcactaatttggaccaagaaattacttttcttgtatttaaacaaacaatggtagctcactaaaatgacctcagcacatgacgatttctattaacattttattgttgtagaagtattttacattttcatcccttctccaaaagccgaatgcactaatgacagttttaagtctatgaaaatgctttattttttcattggtgatgaaagtctgaaatgtgcatttgtcatccccactccatcaatccctgaccatgtaaggcttttttattttaaaaaaacagagttatcccaatacattatcctgtgatttaccttacctacaaaagtggctcctgtttgtttgatgatgattggttttatttttgaaatatttattaagggaaaactaagttactgaatgaaggaacctctttcttacaaaacaaaaaaaagggcagaaatcaccccaaggaacgatttctcaggttgagatgatcaccgtgaatccggcttcctctgagcattcgatggccttagcacctcatcaagccagcacatcctgcctgctgttgcagcctggctgggtttattcttcagttaccctaatcccatgatgcctggaaccttgattaccgttttacatcagctcttgtacttttcagtatattttcataatgagttatattgtcatttagactttgaacagctctgggaaatagaagactagggttgtttcttaaatttagctcatgttataataaaaagttgaaatgaagttcttattctaaaagtctgaatgcttagaacaaacttaacatgtttatagaatatggtctctttgtaccaagtactttgcttaagagctcctttgggccactacatattttggtttctagaaaatgtttgtttatgaagaagtcgatggaaaactgcaaacatatgcagaaaaggtagaataataaaaaaggtctaatgaactccattcagctttgaacctatccactcataaccattgactggcctttaaaaaaaagtattggcagaattaatttccacctaggtgatgggaagaaagtgttcgcctgttccagcctgtggctcctgcctggaggttacccagtggtgcgccagcgccaagccatcactccccgagggcctcccctgccaatggtgctggtatcccatgcagctcaccactggctgcgtggaaactcccttttttccaactttattattggccttctaaggagctgttttagatgttttttctaactgcctcctcccatgccattttaatactacagatgtactacgtatctgtttatatactgtacctacatctgtgctttgtacataaaagaaccagttttctcccccttgaggacagagactcatttgaacatgcataggttaataaataataaattcttatttaacattttgtagcacttgagattgtcttatacctaaggtattacatatttggtatataattaagccttataaaacttggtaattgattaagttttaccataatttttcatcctattctgtagtttctaagataagcacagctaccacctctaaatctgcagcagaatgctggccccagggttattaattcacattaccaaaagcatttttagggaactttttataaagaaagaataattgtttgttaggcttcatgtcacttgagtgagtttggcagtgtaacaggatggttcgtacacttactacttttctgtgccgtgcatcatatgcttctggacagtttccaaaggcctccggaaaagtaggcgaggcctgctttttatggcaacttggcatccatagaaaattttaaaattggtgaaggttgcaatactccaaataatgtaaaatgactgccaggctacaatataaagtgagttcagttaatcatgctggacttgtgtttatctgtagtattcatctacaataaacaggcatagcatctttttccattcagttagttaggattttcagaacctcattgccttagtactttttaaaatatggctttagtttctcaaacatgttcgtgactctactggtagtctagaccgattgtttttcattctgacagatcatgtgaaccagctccagccatgtgagccctgtggatcggggacagctgaaggctggactcggtgctcccggtccctttgtgcagcacccactgggcctgactgatctcctcccacattgctggcttcctccaggtcatgggcacaggtaacagagaggcactgagtagcctcttcatatccagattggagcagccaacacggccgttttacacctcatttgcctgcggaaccctaaatataaagctaaacctgtgctgaggtgagcggtatatgggatggtgtcacggtcccatcccacctcagccttagaggtgacctccatcccagctggcctggtatgtgagttcaggttagagttccttgccaagccaggcag

SEQ ID NO: 7945 - DNA, 4706 bp, Homo sapiens; identical to SEQ ID NO: 5625

SEQ ID NO: 7946 - DNA, 1548 bp, Homo sapiens; identical to SEQ ID NO: 5628

SEQ ID NO: 7947 - DNA, 4704 bp, Homo sapiens; identical to SEQ ID NO: 5253

SEQ ID NO: 7948 - DNA, 1090 bp, Homo sapiens; identical to SEQ ID NO: 5631

SEQ ID NO: 7949 - DNA, 102 bp, Homo sapiens
ttttttttttttttttttttgagacggagtctcgctctgtcgcccaggctggagtgcagtggcacgatctcggctcactgcaagctctgcctcccgggttca

SEQ ID NO: 7950 - DNA, 522 bp, Homo sapiens; identical to SEQ ID NO: 5633

SEQ ID NO: 7951 - DNA, 126 bp, Homo sapiens; identical to SEQ ID NO: 5635

SEQ ID NO: 7952 - DNA, 4852 bp, Homo sapiens
agatgctgcattcctggcccgagagaaagcgaaagcagatgctgaatattatgctgcacacaaatatgccacctcaaacaaggtgactggctccctggccactttcctaatgatgcatttcggggttttgctttctcttttcaggagctctgatatgatagaagtgattttatccattgtcaagaaagtgtagtgaccaagacatcctccagaattagtcagttagcaagaaatatttcacattgattgggtagggacacaggccaaatgccgtaattccattcatttgtactgctatataaggctgaataattaattaagttgaaggtcttctgaaataagagtgacagaagagtaaagtctatttagaattgctttccaaataaggtagtttttttggtagatacttagcttgattagagcagtatttctcatcaaaggcattcctggcatttggggttgagatactttttcattgttgaagaccatctcatgcattgtaggatattttgtatccctggcccttgtctactgaatgtcagtagtggtcaccagttgttttaactgccacacacacatgcatgtatttccatatgccccttgttgagtactccttgtttattggatttaaaaaactattccagtcatgaggaatttcatgtgggataacttgagaaggcaggttgggtgatatataggtgataatttggtgtaaggactggggtaagctggctagacggtacagggctagtgagcaggggctatttaagaggcagctagaactccgatagtattctgagaagggaagggtatgtccaagatttataaggttatcgtggagcagattggaacagataaagggttgagaaagagattactaaagtggatgatgcagtttgaaggattagagtcaagttttaagatatagacagggcttttaatttagaaaggaacaacataatccgtatttagaagaaatgataagatgatagaatgagagttgtcagtactttgaaaaccaatataaattttaaaatgaacataacattgaaagacacagttctatagacacagaatggaatttggccaaaagaaaggcatgacaggaaactccagttgaggaaactaggagtccaaatctaatgggagaagctcgtcaggcacaagtttcaagaccttgccattgaggtctaccttattcagaaaggggcagtagttttatgccattttgaaaaatgtgactcagatactaacctatattaaaaaggcttgaggaagaaatgtggttgtgcactatgaccagatttgattggagtgtttcgacagaggatatgaatcacctggagaagatagagatccaaagagtgaaagatgtcaaagtgtagaaaataaatgctgtaggactgtgaaggacaagatggacttttgcctgggggacaggccaggactcaagataaggagaggatcacagagcagggtctgaggggctttgaaaggcatatgttacagggaacagtggaaatgggttttaatcaaatccagatagattctggttagatacatcttggcatcctgatttagacaaaacaaaacagtgtgacagagggagatctggtggtcgacgagttttaatcaaacccagataggttctggttagatacatcttggcatcctgatttaaacaaaacactgtcacatagatctggtggtcgacaaacatctgtctgtcacaagcagcttaaacatccagcttctggggaaaggcagaaggccagatcaggtgacaacttgagattttattctagttctagaatttgttcaagaaaagcagaatcacagctaatgataagataatgagcaccagcccttcctttgaagttctgctctcatccactgacctgtgtatctctctcaagagaatcaacagagaaccaggcatgatggctcattcctgtagcctccctggaggctaagatgagagtatctcttgagcccagaagtttgaggctgcagcagcgagctataattgaaccactgtattccagcctgggcaacagagtgagatctcatctccagaaaaaaaaaaggctgggtgcagtggctcacatctttgattccgacactttgggaggccaaggtaggaggattgcttgaggccaggagtttgagaccagcctggcaacatagaccccatctctacaaaaataaaaataatttttttagaaaagagaatcaacagaaactccagaccaattccaggttgaattcaactagatgaaatgaaagtcactttagaaatattagttattatcattagttatcacaaattgttttccaactcccccatccttttattaaaaagtgaacagcttctcttgcattaagtcatgagcttaatgaaggaattttaagtcaggaacgcagctgttaatgtgataaccactctccaaagtgagagagggtcattggcagttattcagacttgactcatgatactcaggagagcaataggtgaaatgtatatagggagagagaagactgttgcaccagagtattctgatgcctttgctcttgtttgctcccacacagcacaagttgaccccggaatatctggagctcaaaaagtaccaggccattgcttctaacagtaagatctattttggcagcaacatcctaaacatgttcgtggactcctcatgtgcattcctaatacttagatgttggactggaagagaaagctcactcccctctaaggaggctcttgaaccctctggagagaactttatccaaaacaaagagagcacaggttgatgcaagaggtggaaatgttctccatatcaagatgtggcccaaggggttaagtgggaacaatcattatacggactcttcagatttacagagaacttacacttcatctgttccacctctcctgcgatagtcctgggtgctccactgattggaggatagagccagctgtctgacacacaaatggtcttttcagccacagtcttatcaagtatcctatatgtattcctttctaaactgctactcatgaatgaggaaagtctgatgctaagatactgcctgcactggaatgttaaacactaaatatataacaagctgtgttttcctaagctgagatctgttgaataatgtttacattcgtcccccggggaaatgtatgctcagccaccattcaagagatgactgagaaggagatggtaagttcaagaagactgattgcacctgggacccaggccctttctttgggatccagtcccagccttcatccatgtgattaagatccaggccgctgaagttccccaggaaatgatcttccacttgagcaaccttttacttgatacgatttgcacctttctgttttcctgcagtcagggtggtggcctgcagggacctgagctttgctacccaaccagattcctcatagagattcctaatcactagtttcttgtattcataaactcagagatacagagggcttggtttgaagttggggtgagatgaaacctttgctctgagccaaagctctggggccttgcattccctgcattgggttgatgactgtcagcatcactgccgcaggccatgcttgactaaggtacctggttttagccacagccacctccttgtatgttacctttcagctctggccaagagtgggacagggttttaaccacaaataggagcagcatgcaattcctagtgacttgctgcacagtattgtatcataattacaggaagtttttatttttaaaactggatctggggtatattcatttgccccatcacctctgtctaaaggcccaagtcctagggctgccatggtcacaagcacactgatgctccttaagattgtttatctggagcccacatagtgtggaacaaaaagtcacctagaaagcatccttggtcatcattgtctccttcccacctggcccagagatgcttaaatccaagttgtttctccagctgtcacctcccccaggagatcaggattccactgacgtcctgggcagccagtgaatttaattttccatgagaaacaacagagttaacctgtggcattaggagacctacttcatgtggaccctttttttccttcagtttaacttttctggagcagtgtgctgcgtagttcggcctgagtttgtgcagcttgttaagacaactcttgtgtacgctatgttgaagctcaacaaaaaagtcatgggaccacttctagaaatctttcagctgtcaggcctgtcagtctcatgacagtttgttggttgtgccaaacactttatttgggaaaggaaagcccagatttgaatgggtctttcccctgggccttatcctatagaggcatttgtaatatggagaaaataatttttcatttttgctcatttaattctataaattctctttataaatgaattttgtgttctttagttctccttaaaagaacttttgaattataaaaataaaatctttacctgtcgaattgttgctgcagatgattgttgtggaaaatctggatcattgacctctgtgctttcattcctagagatgttttatagttacatgagcaaaagctgttgccccaaagtgatggccctggaggcggggctgaggaacagggaaatgccgctgtgaagtcttaaagcacttctgcttaaactcccatgtgtgaggagtgtgcctccctgtgccctctcagctctgaggctggccgtctttcggggtgttccttttggcaaatatacactgtaatcttgagtctaaatttatatgttgaaatgctaccttttttaaaataagaaactaaataaaattattttactatcagtga

SEQ ID NO: 7953 - DNA, 102 bp, Homo sapiens
gtgcctataatccccagctactcaggaggctgaggcaggagaatcacttgaacctgggaggtggaggttgtagtgagctgagatcgagccactgcactccag

SEQ ID NO: 7954 - DNA, 323 bp, Homo sapiens
atctctggccgggcgggggggtttacgcctgtaatcccagcactttgggaggccgaggcgggcggatcacaaggtcaggagatcgagaccatcccggctaaaacggtgaaaccccgtctctactaaaaatacaaaaaattagccgggcgtggtggcgggcgcctgtagtcccagctacttgggaggctgaggcaggagaatggcgtgaacctgggaggcggagcttgcagtgagccgagatcccgccactgcactccagcctgggcgacagagcgagactccgtctcaaaaaataaaaaaaaaattaaaaataaataaacccc

SEQ ID NO: 7955 - DNA, 4793 bp, Homo sapiens
cagagtgttcacattgataaagagacggcgagtcgactgaagtctatgattaacactactttgatcatcaccaacataccctacatcatcatggcgctgggtgtgttctttggtttggtttttacctggcttgcatgcaaaggacagggatccatggatgaggtgagaactggctgaaggaacttcttccttactggataactttacctgaggaattcaactgtacttcactgaagggctgtcagctggcttattaggataaattctgggattttatgctgggcatagtgatttcgtgcttattttactgctggaccaaatgggaagcaaaggaagtgtgtcaaagaaggtggagggttagaaggtaccatctaatatttggggaatagaatctctttggatgtatcccctgggagttaactttatgtctttgaaaacaataacctgaaagaaaaggaagaatatataacagttacacatctgatctttggtgtcagactgcctgagttcaaatcccagttctgccacttaacagctatacgaccctagaaactgtgcttcagtttcttcatctgtaaaatgggataataaaagcctcccttatgagtttttcatgaggattagatgatatagtagacttaaaggacttggcccagtgttagcatatagtaagagctcaataaaggtttaagtattattaaatatgataaaacagctccaagattatagagcaagacagccagggtcctgcttggaaagaatccctgatgtatccgaagatacctatgatttaggtatcactgcataataaatgattggaacatgggtgtagttactttcctggaaggctaggataaagagttgggttcgcctttccaagtgaccagcagcccagccaggaacctgaatacctgcaatgagccttttctgtagaagcccttcttaaattttctgcagcttcctttttttttacaacagtggccttttttcctccagtttcctcaactaagtgtccaaggcaaatgtgaagtagaaaataaatacgtgaaaccatctgagtaaaattagctgaatttccctgacttccatattcttccattatttctcttatcccctgccagtcactttagcctgaattagctgtgaggcaaactattttgccatttctatgtgtggatcttccagtgtgattttatgcagtcattgaaattgtcttaagcacaaatgaaacctcatggaaatgttaattactgctcctacaattaaccttcctcatatattcaacaagcaaggaattattgagaactaatacctctgagacactactccttagtaggtttcaaaccaggaaggaggcaagttgaatagagtctaagttttataatccagatcaacacagagaagggtactgctctggtattgagggtgggagtggtcagagaaggcctcctggaaaggataggcctgaatcttcaagaacaagcagcagcccaagaggggaggtgagtgagatgagccaccttcctataggtctctcctccttccatgcccccactccccacccaaacttttcacactggggagaagtttctgacatgaacatctaacttgttttctctcttctgtgtttcagggaacagcggatgaaagagcacccctcattcgaacctaaacattgcctttgcttggtgaagaaactgtgtgagctgtcctgacctggacgatgacgtggggaaaccctccacctccttgcaggcttgttgcctgttgaaagaaggaaaaagacacggcgctggcaagtgataggaacattctggccagaggttaaagagcaggctgacatggctggccattaagctttataaaatcatgtgggctctgaaattgttcttttatgtgtctagcaagtatttaataaacccttgtatagtaattttgttgttgttgggtgctggtagctccagaattttgtgaccactattgtgggtaaaatgtctctgcatcacttgttaatgctactggtctaacttcattcagtatgcttcattcaccgaactttgtgctcaaaatgcgtatataccattttatgttgtattcctccatttcacttgcaaaacagaagtaaataagagttcgggacccagggtaaaatggtagcttcatccaatatatcattcaaatgcatctgatttctaaaacatattacattttatgctgatcttcagttcataattcttccaggaaaactcagtcttccaactgcaataaaatactgggtagaatcaaatgggaaaggggttgggtggggcaatacccatgagttgatagtgataagctcctaaggatttttaacttgtacttttgtgaacgaagagaatgcataaataatgttggtgaggataaagtacagatatttcatgtagaattaattgctagttatgatgcttgtggatagttaactgttttttttttagtcaaaatgatcatgctacgaaaagatgcttctgagagaatgtaatgagtaactgatttttcttcctgagtcgcccttgccaaatatgttactgtattaattaatctaatattgagtgattatttgtaaaattatgaatatgggaaatccatctatctacagcctaagttacacataagtttcagaaagtctgattagactaaagagatatttcttctgggacagccttcttcttggtaattttgaagttctttttacaagttccttcctcagtttcagttctttccagtgttttgtagctcactgtcactcactgaatagagaaacgtgtgccctatacttcctgtgacaatcattttgctgacagaatgatggatgtttaaaatattgcacaaagtactttaaagaaaggtctgttaggaccagaagcagagacaccacttttcaaaggacttcttggtttcagcataacctaagacagggaattgggagccatcatatgtcacagtgttcagaattcaagcatatttaagggcattttctttgattctcaaagttcagcattcattttgaattgagaagcctatacatttagctgacaaagtgcttatagaatttcttaacaactgaaccattcaaaaggattttttttgtttaaaactggatttcaatgtaagcaaatgaagaaaaaaatatagatttcatttccatagcttcttatccctgtattgaggtaataaattgttttactgacaatttttcctttttctacactaaaacaatatgtgatatatttcccctcttgaagaggcaattcattaaactctcaaattttctatagaatcaagatagaacctttagatactccaactcaccaaaatgtaaaaaaactaacaaaaatatttggtcttcaataatgctaaatatctacatttttagaatttatcaacatttaactagataattgggcatgtcttaattatgcatgtacttatccatactaataaaattgacaatgctagtgcatacttattggtttagtcctattatcaggatataatcatctgtgaggaggatattttaaatactgtaaatgataacagttaatgatatacacatttagactgagttgcacactggcagggagaccaaaaacattacttccatacttgtgtcatgattcttttttttttgagagagtctcactctgtcgccaggctggagtacagtggcatgatctcggctcactgcaacctctgcctcccgggttcaagcaattctcctgcctcagccacccaagtagctgggactacaggtgcgtgccaccacgcccagctaaattttgtatttttagtggagacggggtttcaccatgttggccaggatggtctcaatctcctgaccctgcgatctgcccacctcagcctcccaaagtgctgggattacaggcgtaagccaccgggcctggcctgttttatgattcttaatagttacttggtttaaatcacatttgatactatccttctgaaaagtctgagacagatctacaaactacagtcaaaattatagattaagaggaatgaatgcacctatttggctttaagttgaagatgaattatttctcatgctcattttcttgcggcagttatcttagaaagacccccaaaggctttgtgattgtaagcactgtcatgatcacagaatgcaagcttctggtaccatgatcctcaacttagagaggaagaaaccaagacagagagcttaactcacttctctcagggaaaattaggagttgagcacaggacaggaaatgggctttgccacttttagctccaggcttttctaaccagacttgatttcctcatgttctagaaagatcactaatggtcaagtggaacaagcactacacgactaacccctattggggtttttaacttaagggaggctaatttttaatttaaactgctcgagatatgagttctgcaaaaggtggtccgcatccttggccctctggacattatcactaaattgcttgtgcctgttaacaagaatactgaccagaatgctcttcatgtagcttatacagttggttcacttcatgcggttcttgacatgtttatttctacccttaatgcaatgaaatgtttcattaataaaaaaccactttatataaaattgctctagaagtcatatgtcattggatgtcctgttgtttatggagtttccctggaaagatgttccttgacagatgcagccctgagtcacacacttgggccatgtctgatttcagcttcgctgtagtggacagttacaatcagcc

SEQ ID NO: 7956 - DNA, 2066 bp, Homo sapiens
ggtcttgctgtgttgcccaggctggagtgcagtggcacaatcactgctcactgcagcctcaatctcccaggctcaagcgatcctctgcctcctgagtagctgggactacaggcatgcaccattatgcccagttaatttttttaaaaatgttttgtatagacagggtctcgctatattgcccaggctggtctcaaactcctggcctcaaaagatcctcccacctcggcctcccaaagtgctgggattaaaggcatgagccagccaccatgcctggtctattttttattgataaatgaaatagaccatgcctgttctatttttaattgataaatatcctgggagaaatactttgggacaatgcaaatatcctgtttctcctccaacttttacccactgatttcagcatatatcagtggatcttgcctgcaaccattattaccatggcatttgcctactagtgattttgtgtttccttcatttgttctccatttattaattggaattcttctgtaaggaggagttgtcccttctccccaacttatccatttattcaattttttttgtaaactatggactcatgggcatctattttattctatgagctataattcaatactgtcatcatttagtttcttgctcaagttattctaacttcagccattgggagctccttcagactggctactatgctgtcttgtcatgcccccaccctttctctagcactttcttacattcttacaccaaaagacattacagcctcatcttgtattttccctgcttctgtccagaattagccattattccaaagatcccgagttcctttattggagaatgatattagacacaaagatgtgggtactaagtatactcgttgctgttggggtgttaattgcttctagggcttcccaagacagagctaggaaatgaaagcatacataataacccatgcatacacacagatcaatatctattcctgtatctatctgtatacatactcatgtgtcctttctaatccacaccacggtattcatcctaaccttccctttttatttttaacttttttcctctgatagtgagaaaataggctctcattatctactctatatacatttatttgttcaacctcagtatctacatacttacatatgcctgtgaggaacagatttactaactagaatcctgtatttgtgtgcaattctttttatctttattataaatatagcacctccaggcttctttttattagtgtcagcatgacatagcttttcccatctttttactgttaatattttaaactcaaaaaaagcaaggaggaaaacagtatgctactatctgtgtgaaaatggaaaataagtatggatatatttgctcatatgtatatatataatatctatgggagagggaaaaccaaaatatcagtttggaggtcaactgattaactggggaaaagagatgaggggaaaacttcgctgcatactctactatcgttgaaatttcttaaactttttcattgagtataattcacaaatcataaaactcacccttttaaagtctacacatcagtagtttttaacacatttatatacaaagttgtgtaactatcatcactaattccaggacattttcatcacccttaaaaaaaaagccatgtacccattagtagttaattcccatacccctcacccctcactcacccatctactgcccttcacaagaccctggcaaccactaatctgctttctgtctctatggatttgccaactcttgatgtttcatataaatggaatcacacaatatgtgaccttttatgtctggcttctttcacttaacatcatgtttttaaggttcatccatgttgtagcatggatcagtactttgttcctttttgtagctgagtaatattacattgtatgtatataccatattttgttgatgtactcattagttgactgtttttctaaatttttgaattatgaaaatatccattcaaaaattaaactttaaaaaatagaaacaaaatgaaaaagcccttctcataaaaaacagaaaaatgtaaaaaaaaaaaa

SEQ ID NO: 7957 - DNA, 1342 bp, Homo sapiens
gccccacctgatctccccacccccgggacctccctgccctcatctcccactgccctcccccttcatggctctgctccagccacgctggggatcttgagtttcctcacacacaccaggctgccgccagcttcagggccttagctgtcgccattctctttgcctggaatgttcttagaaatcctcttcactgtcccctcatctcctgcatgcctctcctcaaaggtcacctcactggaggcctcctggccactgtatctaaaacagtagcccctgccattctctgcaccctttcctcacacctgacaatgtattgttatcctgaatatttaattattttttacctgctcctcctccaactcccaatgagaatgtctgcaccatggaggcagggactgtttctggttcacggctaagtcccaaggccatgaacaagaaggggacagctgtcacactctgcagtagtatatgataggcacacacatatcacatcacttctaggactgctcactctccagtgttctgtctttccagtggcttgttgctgctattttctctgtcatgctcttggtccattttcccttgctctctttcttaattgactataattatagaagtacattaccaatcacttctaagatgaacacttgttcactttttaacatctaggacattgggatgcccattacgatcaatggcatattgtaggggatgatgaataaatgggggacatagttatcagtttttacaaaagaaaaactggtcatgttacagtggagaaatccagtagatgccacttgaaccagctaattaaagttaacataatgaataagatatatcaatatcccataccctcagatgtcatgcacatcatttctgcgtgtgggtttcttttttatttgtcaaaaccacatgatctcagtctaatcatgagaaaacattcaacaagcacaaggtgagatgtattttacagaataactgaccagtattcatcctaagtgtcatggtcatgaaagacaaggaaagactgggaaagtgtcacaggttggaggagactaaggagatataaggaataaatgccatgtgggatcccagattggatcctggaacagaaaaataacattaggaagaaaattggtgacattcaaataaggtcttgagtttacttaagaatcttgtaccagtgataattccctggttttgataactgtgcaatgcatggcatgtaagttgttgacattaggggaatctggataaaaagtatacaggagtttcctgtatcacttttgtaacttttctgtaagcctaaaattattaatatttcaaaataaaatgtttaaaaggc

SEQ ID NO: 7958 - DNA, 686 bp, Homo sapiens; identical to SEQ ID NO: 6480
  SITE (95): n equals a,t,g, or c

SEQ ID NO: 7959 - DNA, 1796 bp, Homo sapiens
attcaacatttccgtgtcgcccttattcccttttttgcggcattttgccttcctgtttttgctcacccagaaacgctggtgaaagtaaaagatgctgaagatcagttgggtgcacgagtgggttacatcgaactggatctcaacagcggtaagatccttgagagttttcgccccgaagaacgttttccaatgatgagcacttttaaagttctgctatgtggcgcggtattatcccgtattgacgccgggcaagagcaactcggtcgccgcatacactattctcagaatgacttggttgagtactcaccagtcacagaaaagcatcttacggatggcatgacagtaagagaattatgcagtgctgccataaccatgagtgataacactgcggccaacttacttctgacaacgatcggaggaccgaaggagctaaccgcttttttgcacaacatgggggatcatgtaactcgccttgatcgttgggaaccggagctgaatgaagccataccaaacgacgagcgtgacaccacgatgcctgtagcaatggcaacaacgttgcgcaaactattaactggcgaactacttactctagcttcccggcaacaattaatagactggatggaggcggataaagttgcaggaccacttctgcgctcggcccttccggctggctggtttattgctgataaatctggagccggtgagcgtgggtctcgcggtatcattgcagcactggggccagatggtaagccctcccgtatcgtagttatctacacgacggggagtcaggcaactatggatgaacgaaatagacagatcgctgagataggtgcctcactgattaagcattggtaactgtcagaccaagtttactcatatatactttagattgatttaaaacttcatttttaatttaaaaggatctaggtgaagatcctttttgataatctcatgaccaaaatcccttaacgtgagttttcgttccactgagcgtcagaccccgtagaaaagatcaaaggatcttcttgagatcctttttttctgcgcgtaatctgctgcttgcaaacaaaaaaaccaccgctaccagcggtggtttgtttgccggatcaagagctaccaactctttttccgaaggtaactggcttcagcagagcgcagataccaaatactgtccttctagtgtagccgtagttaggccaccacttcaagaactctgtagcaccgcctacatacctcgctctgctaatcctgttaccagtggctgctgccagtggcgataagtcgtgtcttaccgggttggactcaagacgatagttaccggataaggcgcagcggtcgggctgaacggggggttcgtgcacacagcccagcttggagcgaacgacctacaccgaactgagatacctacagcgtgagctatgagaaagcgccacgcttcccgaagggagaaaggcggacaggtatccggtaagcggcagggtcggaacaggagagcgcacgagggagcttccagggggaaacgcctggtatctttatagtcctgtcgggtttcgccacctctgacttgagcgtcgatttttgtgatgctcgtcaggggggcggagcctatggaaaaacgccagcaacgcggcctttttacggttcctggccttttgctggccttttgctcacatgttctttcctgcgttatcccctgattctgtggataaccgtattaccgcctttgagtgagctgataccgctcgccgcagccgaacgaccgagcgcagcgagtcagtgagcgaggaagcggaaga

SEQ ID NO: 7960 - DNA, 912 bp, Homo sapiens
tactcatatatactttagattgatttaaaacttcatttttaatttaaaaggatctaggtgaagatcctttttgataatctcatgaccaaaatcccttaacgtgagtttcgttccactgagcgtcagaccccgtagaaaagatcaaaggatcttcttgagatcctttttttctgcgcgtaatctgctgcttgcaaacaaaaaaaccaccgctaccagcggtggtttgtttgccggatcaagagctaccaactctttttccgaaggtaactggcttcagcagagcgcagataccaaatactgtccttctagtgtagccgtagttaggccaccacttcaagaactctgtagcaccgcctacatacctcgctctgctaatcctgttgccagtggctgctgccagtggcgataagtcgtgtcttaccgggttggactcaagacgatagttaccggataatgcgcagcggtcgggctgaacggtgggttcttgcacacagcccagcttggagcgaacgacgtacaccgaactgagaatacatacagcgtgagctatgagaaagcgccacgcttcccgaagggagaaaggcggacaggtatccggtaagcggcagggtcggaacaggagagcgcacgagggagcttccagggggatacgcctggtatttttatagtcctgtcgggtttcgccacctctgacttgagcgtcgatttttgtgatgctcgtcaggggggcggagcctatggaaaaacgccagctacgcggcctttttacggttcctggccttttgctggccttttgctcacatgttctttcctgcgttatcccctgattctgtggataaccgtattaccgcctttgagtgagctgataccgctcgccgcagccgaacgaccgagcgcagcgagtcagtgagc

SEQ ID NO: 7961 - DNA, 706 bp, Homo sapiens
cagcggtggtttgtttgccggatcaagaactaccaactctttttccgaaggtaactggcttcagcagagcgcagataccaaatactgttcttctagtgtagccgtagttaggccaccacttcaagaactctgtagcaccgcctacatacctcgctctgctaatcctgttaccagtggctgctgccagtggcgataagtcgtgtcttaccgggttggactcaagacgatagttaccggataaggcgcagcggtcgggctgaacggggggttcgtgcacacagcccagcttggagcgaacgacctacaccgaactgagatacctacagcgtgagctatgagaaagcgccacgcttcccgaagggagaaaggcggacaggtatccggtaagcggcagggtcggaacaggagagcgcacgagggagcttccagggggaaacgcctggtatctttatagtcctgtcgggtttcgccacctctgacttgagcgtcgatttttgtgatgctcgtcaggggggcggagcctatggaaaaacgccagcaacgcggcctttttacggttcctggccttttgctggccttttgctcacatgttctttcctgcgttatcccctgattctgtggataaccgtattaccgcctttgagtgagctgataccgctcgccgcagccgaacgaccgagcgcagcgagtcagtgagcgaggaagc

SEQ ID NO: 7962 - DNA, 631 bp, Homo sapiens
ccccacttcaagaactttgaagcgccgcctacatactcgctttgatatcttgtaccagtgctgctgcaggtggccaattaagtcgtgtctttaccgggttggactcaagcgaatagtttccggataaggcgcagcggtcgggctgaacggggggttcgtgcacacagcccagtttggagcgaacgacctacaccgaactgagatacctacagcgtgagctatgagaaagcgccacgcttcccgaagggagaaaggcggacaggtatccggtaagcggcagggtcggaacaggagagcgcacgagggagcttccagggggaaacgcctggtatctttatagtcctgtcgggtttcgccacctctgacttgagcgtcgatttttgtgatgctcgtcaggggggcggagcctatggaaaaacgccagcaacgcggcctttttacggttcctggccttttgctggccttttgctcacatgttctttcctgcgttatcccctgattctgtggataaccgtattaccgcctttgagtgagctgataccgctcgccgcagccgaacgaccgagcgcagcgagtcagtgagcgaggaagcggaagagcgcccaatacgcaaacagcctctcgccgcgcg

SEQ ID NO: 7963 - DNA, 87 bp, Homo sapiens
ctggggccagatggtaagccctcccgtatcgtagttatctacacgacggggagtcaggcaactatggatgaacgaaatagacagatc

SEQ ID NO: 7964 - DNA, 4813 bp, Homo sapiens
gcgcggttgtgagtagtaccgggagtggggtgatcccgggctaggggagcgcggcggccgcgatcgggcttagtcggagctccgaagggagtgactaggacacccgggtgggctacttttcttccggtgcttttgctttttttttcctttgggctcgggctgagtgtcgcccactgagcaaagattccctcgtaaaacccagagcgaccctcccgtcaattgttgggctcgggagtgtcgcggtgccccgagcgcgccgggcgcggaggcaaagggagcggagccggccgcggacggggcccggagcttgcctgcctccctcgctcgccccagcgggttcgctcgcgtagagcgcagggcgcgcgcgatgaaggcggtgagcccggtgcgcccctcgggccgcaaggcgccgtcgggctgcggcggcggggagctggcgctgcgctgcctggccgagcacggccacagcctgggtggctccgcagccgcggcggcggcggcggcggcagcgcgctgtaaggcggccgaggcggcggccgacgagccggcgctgtgcctgcagtgcgatatgaacgactgctatagccgcctgcggaggctggtgcccaccatcccgcccaacaagaaagtcagcaaagtggagatcctgcagcacgttatcgactacatcctggacctgcagctggcgctggagacgcacccggccctgctgaggcagccaccaccgcccgcgccgccacaccacccggccgggacctgtccagccgcgccgccgcggaccccgctcactgcgctcaacaccgacccggtgagaggccgggcgccggccgtgggcggacgccgcgggggatgggaggttggtggcgtggtggcgggacgcgggcgctcaccgtcctccgggcaggggcgggccaggaatgacagccccctccccctgctcctccgggctcccccgggccgccagcagccggccgggctcggcgagcgcgggtccgggagaacgcgcagggcgggactcggggctgtgggcgccctgggctgtcaagtcccgcctgagcccggaggggcccccccggctacaggctggggtgggggcgtcggcgcgccagcctgatttccgaggacaatccaggaccgtgtcgagcgcgttgtttgcgcctgctaacctttcccttggtgttcggttgctgttccaggccggcgcggtgaacaagcagggcgacagcattctgtgccgctgagccgcgctgtccaggtgagcgcgcatttcccgtctcgggtggccggtcaccagagacgcccgtccccgagggcttccggggccaggcaccgcggtgttctttgcccccagcgtttctgagagcaaactcccaaggaagtaaatcccctctctccctgccacctaagtagcaagtaaacccgtacttagccttagaactcgaggttcagtctcggtggagacgggtcagcccttgtccccgccgtccccgtgttttttctggtggtcagcgggctcttctgccttccctagttcccgagggagggcaccctcgtgggcatgggagctgccccggtgtcctcccgtgcagtctgtcacccacaaagggggacgcgggcagggcgccggagtgggtcccctctccgggcttcccgagggccgcagctgcctgctcggcgcctggcccggccgcgggcgggtgttgtctgacctggtggtttgttttgggttgttgatcaagcatgtcttgagtttggtcggtggcgccagttagtctgcagcgagaaggttcacacaccccctctattcattcctcttccacaggtgtgcggccgcctgagcccgagccaggagcactagagagggagggggaagagcagaagttagagaaaaaaagccaccggaggaaaggaaaaaacatcggccaacctagaaacgttttcattcgtcattccaagagagagagaggaaagaaaaatacaactttcattctttctttgcacgttcataaacattctacatacgtattctcttttgtctcttcatttataactgctgtgaattgtacatttctgtgttttttggaggtgcagttaaacttttaagcttaagtgtgacaggactgataaatagaagatcaagagtagatccgactttagaagcctactttgtgaccaaggagctcaatttttgttttgaagctttactaatctaccagagcattgtagatattttttttttacatctattgtttaaaatagatgattataacggggcagagaactttcttttctctgcaagaatgttacatattgtatagataaatgagtgacatttcataccatgtatatatagagatgttctataagtgtgagaaagtatatgctttaatagatactgtaattataagatatttttaattaaatatttttttgtaaatattatgtgtgtgtttttttttaatctatgggaatatttcttttggaaaatcatttttcagctcaattacagagctcttgatatcttgaatgtcttttctgtttggcctggctcttaatttgcttttgttttgcccagtatagactcggaagtaacagttatagctagtggtcttgcatgattgcatgagatgtttaatcacaaattaaacttgttctgagtccattcaaatgtgtttttttaaatgtagattgaaatctttgtatttgaagcatacatgttgaaaatacaccttatcagtttttaagtacagggttttatagtgtaatatatacagagtaagtgtttgtttttgtttttcaactgaggtcaaaatggattctgaatgattttgcatatgggatgaggaaatgcttggatccttaaggagtttacgaaatctgctgttttatcaaagtgaaaaaaaattgcttattactcttcattttacactaaagcttaatgtcactaagtttcatgtctgtacagattatttaaatcatggaaatgaaaaaaatgttctctgcttgctaccaaaggacaaactcttggaaatgaacactttctgctttccttcctccaaagaattaataggcaacagtgggagaaaaaaaaggcataatggcaaatccttcaagcagggataaaagtcgatcttcaaacattaacttaagcagaccaaaaattctgatgaccgcatctagattatttttttataaaaatgattttcactatagctatgttacgctaagctactgtccaatctcttgtgatgtgtaacttttacatgtgaatattaaagtagatttctctgtcttgtactgtgatttctggtctcatttctttaaaaccttactcttatttttcttttaaggctcttttttctccttaaggaaggtaatattttctaggttagataggactatcagggtttgtgaacattatgcatttaatgttatgggtactttacacacaagttagatggaatttttagagtgaaagaattaagtaggatttaattgggtgctttgtaaatagtcaactgtgtgtataacgtggtctgtttgatttttaaaaggaaaggatttgtttcagattatacaagaataaaagtattatagacccaagggacttcttatgaggtcaaattcagatatttatatgaatatgaaataccatggtccctagtagtcagttgaagtggcaatgtctaaacagaaatgaacaaaactaatgctagcaggttaaaatcaatcaaaatgtttaaaaattgattctgtcctcagcatgttatttcctcagctctgataatttactggtcttgagtattttgagaatttgatgttgaacgttataaagtcaaagaactgcttgtttagatgaggtttatttttatttttgatattattcattcttgtcacacatcaagaagaaaacactagagtgctgctggaattccaaatctgaagaattctaacgactgcattctttgttattaaaaagggcacaatccttcctttttatttggcagtttaatttcagtaggaagcatgtcacatgtgcactgttggttagaattatgcatctgtcatgcctgactgctgaaccctacctaagccttttggcgcagtttaaaacttatactggtggactgtgaacctcaaaacaaatgggtatttttgggttttgaggatagatgttactccttaaagtttgtatttggggcatgaaaaactactgaaagaagaaaagtgctacagatactacatttcaaagagttggcattttccctttggccactcaagcagcatttgatgtatctaaagaaacaaagtcattgtttattttttaaaaaattatatgcagttgtacaagatactacattccattgaaatgttggctatgtcctaaccaggcaaccagataacaaaaacattttgagtcttttatctaggtagttctaattattcagctacttagtttaacaaaggaaaatatcctgacttctctcatttcatttgtagacttttcattgtataggcacaaccaaagagtcagactggtttaaaactccagaaggaaaaaaagtatcccacacagtggatgttgtttctaagaatgctacaaaatcctgacatctcagacatctcaatgttaaaggaagaaaaaaaataccttttcatttcaaagaactaatatactttgatattgtgtaaaccttactcaagtttattgtcaagctttaactgcctttttagaactttttaaaatttcgagcccacaaatctattgtattagttgccttctataacaataaatcttcactgagcaaaaggc

SEQ ID NO: 7965 - DNA, 509 bp, Homo sapiens
ttgctaagctttagcattttttaaaaagaaaacggaaaggctacacattccattccatcattatggtttcggcaaatgtgaaaaggcgaataatgaaacggaggagggaaatatagaacagaatgaacgtgccttcttgaacagcgcgtctttcttaaggcactggaatcccacggatggagtgatgggtggcggagggtccctgggcgccgtgctattaggagtggcagggtatccgcgagcagggcccaggcgctccctcagcagcctagtcgggataaggggggcggtggagagtgaattccggccgcacattcccgcagttcttcgcaggaacttcgctctctcttttcccctcccttgggcacacatcagcctggcccgactcccactcagctctcttttctcagaaccccgacccacagcgttgacggaatggagtgcccttcccattggcccgagcgtcattccccgaggtggcactgcccgcctgattggctggccactcc

SEQ ID NO: 7966 - DNA, 1654 bp, Homo sapiens
cagtgtctggtgcagtggtatgaaaacatttcatcctggaatttgggggttcatcctggaacaagtaaatctacttgttttggtcctttcaaaactattgtgtcattttgcttcttttgatttacaatttctactgagatatttgtgaaaaaaatctatgtttacaattcaattgttgtatattactacccctttagttttcaagttcagaattattgtaggaagaaatattgcagagtggttttggagttagacctgacccaattcagacaagttacttaatcttttgtcattctctggcataaaatacggataatatctactttataggattgtttgggtattaatgagataattcaagtcgattgcttagaacagtaacagtgcctggcccacaaactgtgctcagtaaatggtagctgcttttatttctattgtgtttgttaatgcagtctacagttactgttttaaaggacacacactttgagtttttcctatcatactgatgggtcagatacatgcagctgtttctgttatatataactctggagccgagaaaaattagttgatttacatggagatcaaatccctgtccttggactcagtaatatgttatggttaagttaacaacttggcaaagaacttctttctttgtctcatagttacagtacctctgtaagaagagctctgctggtcgaaacaaaaataatttccattgagaaaatttaagcataaaagctatgaatcaccgttaatgatatcagaataaaatactgattttcacagttaaattgcttgttttgttttatcagtatgatcgccctggagcatcccctaagaggaatcatgatggagaatgcacagctgcccccagtgagtcaggagtctcacactggttctttgctagacagtagtaatgttgttattgttagttgtattatgatagaaatatgtagttaaataagctacatataatagtaatatataaatgttatagtagtaacagttgcccttgtaaaacacaagttttaactgcaggcacctattatacacagatttttgttttcaataagtatattggattctttttctggagattgtcacaatttgaaaaaactcccagttgaaccacatagcctagaaatattgaaaaagttaaggaagccgggtgtggtggctcacacctgtaatcccagcaccttgggaggccgaggcaggtggatcacctgaggtcaggtgttcaagaccagcctggtcagtgtggcgaaaccccatctctactaaaaatacaaaaattagctgggcagtagtggccctcacctgtaatcccagctactcaggaggctgaggcaggagaattgcttgaatccaggaagcagaggttgccgtgagcacacatcgtgccactgcactccagcctgggcaacagagtaagactccgcctcaaaaaaaataatgtttagtgggacccatacgaagtgtcactagtgacgctggaagtgctcccaaagagcagaaaaaagtcataacatgacaagaaagagttgaactgcttgatgtctactgtagattgaggccggcagctgaggttgcctgccatttcaagaaaaatgaatccagtgtaaggaacattgtaaaaaaaaagaagagaaaa

SEQ ID NO: 7967 - DNA, 514 bp, Homo sapiens
tttgaggaactgccatactgttttccatagcagctgcaccatttgacattcccagcaacagtacaaaagggttccagtttttccacatcctcaccaacatgtgattttggggagggggggcaggggttacatcaaacccaattttgttttaaattttaacatttgattagggatagcattctccctgcgtatctctagagaaacaaattttggaaggctgggtgtggtggctcacacctgtaatcccagcactttgggaggctgaggtgggcggatcacgaggccacaaattcgagaccaacatggtgaaactctctactaaactctctaccaaaaatacaaaaattagccgggcgtggtggtcgtgtgcctataatcccagctactcaggaggctgaggcaggagaatcgcttgaaccagggaggcggaggttgcagtgagctgagatcaagccattgcactccagcctgggcgacagagcaagactctgtctccaaaaaaaagaaaaaaaaa

SEQ ID NO: 7968 - DNA, 8098 bp, Homo sapiens
tttgagtttttctggccctgtcagctgctgtggcatgacagatttatacagcatttgcaaaaaaccagcggctgctttttctttaacaatttttcttaaaaactccagttcctattctccagcttctttgtccagtctcctcccctctcctagccaccccccagactctccagatttggggctggtgtcatcaatccaatttattaagtcctcaatgagggggaggaagggccacatctccctctgcaggccctttgaccatcttgatggcttctgctcctccctgtcccctcagctctgccttggtttccccactgacaaaggggatcttctgctgtcctgtgtgccctgaaactaaaacccagggggaggccagaaatcctcagaagttttccagctccctgcaagaatagccaaggacagagaaatcacaggatcaggacgagcagggcaagctggagcagggggtagaacagaccaagtcctttaccgcagaggaagaaaccacactgtggaagggaaataaatagaggggtccagggcagcagagcccaggcccccagggcgcagtggctataggcgcagcaggcgagtgggagcccccggccgcttcagccactgaggaagagacgcttgtaggccttgttcatctgctccaagaagatgaaggtgaggacggtgtgggggcccaggcgggcatagtacggcgtgaagcccttccacaggctgaagaagccctcgtagcggacaactttgaacagcacgtcctagacacagacaggcagggcgctggggctaggactctaggtccccatccccctcacccagctgccttcacacctttcccaggggatccgacaccccctcccaggcccccagaatggcttcctcaccagcccgttcttgtattccggcttcccatcaatcatccgcatgttctggattctgcaggagaggacgcaggggcatgagagaccgaaagggcaccctcccacccacctccaggcccaggctgcacactcaccgggtcttggcaatgtccacaggcatggaggcagcagtggtgacaagaccgctgatcatgctggcacagaagtggcacaagatgttgtcagagaagtagcctgggggaggtgaggcgggggtggcagtcagctcagaggtggctcaggccaggctgggaactaagggcccagctctggatctcacctgagtccagtaagaactgcttggattgggagtaggaggcgagctgggcagcattgacgacgacggcccgagccatggtagggatgcagccctggagggaggggagcggggaagagtcagaaacccctaaaaccagacctcacagcccccaagtctccagcccctccactcacccgccacagtgtgaggacaccctcttcccgggtgattcgaatcagggcgttaaacacatttttgtagccacggcgctggtcagctggaagcctggtgggaaggcagaaagaggtcaagatcaggattgcccacaggtgcaaagaaaggaaggccagaacaggtaaacactctgctccagatccgggataaaaaactggtcctttcattctagattcgagggaatggggctggggttaggttcagacttggaactcaccggccatcggcagtcatgcggataagagccacttcggctggtgttcccacaaaggcaccagtggcacctgcggtcatgccaatcacagccttcagcagaaagccagggggagtaccatcagccccagtcaggcgctcaaacagcacggtatagatgccaaggcgggtagtggtgtaggtggcctgacgcagcaggccagccgacagcctgaggagcagaggggtcagcatatcaggccaaggtctagagctgccaacccacagtctaccctccatcctgaggccccaatacccagtgtaaatgcccctcaggccttctgccttcaggatactggtgagggcatggaagctggttttgtactctcgagtcttggccccttccccgctcaactgcatccggttcttcaccaggtccaggggctggacaaaaactgtagctcccatcctgggggaagacagaggtggagtgaagggccaggcattccagatctaccagtgcccactggagcctggcagcaagaggttacaaaggtcagggcctgccatgcgattcaagaatcaggatgctggtgagcatgtgtataagagtctatatgtacaccaagtgcaacgggtctgaaaagtctagttgtccagtaggggccatgcaatgaaagtgctccaagcagcttcatgacagtcaagcagtgacctggggctgcacgcagtccgacacagggaggggaggaaggggcatccaagatttaggactccaggtagtcctgcaggagccatttaatggcctggaaccccctgccgcccggccgagcttagcaatgcgctgggaaactcagctggcccggcgggggttgtgcaacgaccctgcatgcagtccataagggtcctgcaatggggccctagcagcccatcggggaactcgcaatacgctggagatcgcgctgaccccgtgccggcacagttcactgcaacagacccagagatgaaccgggcccggttccttttgcccttcccttcctcctcttttcccatccctggggcctgagcttacccggccaggcccccaaacaggaacttgacggacttaggggaggtacggggcttcccgtctatcccgccggccccggcactcgccgtcgccgccatcgccactcaatggccctcggctccgggtcccgtgcgcgcgcggccccgctcgcgcccaaggtgacaccgcgcgcgcaacagagcgagggcgcgcgcacgcccctccagctctcaggtccgacacccgctggaagccggcgcgggcgcaggcgcgcagcgcaaaggcggccgggagtaaggcggagctgaaggaggagcttgatggaagcgtgcgagaaggggcgtaactgatttggaaaccagaggaaaggcgctgttttcaccgaattagaatcgcgggaaaatagagaagagtttgtttgaaggtctcgcgagatcgagtgagtacggctcgccaagttggagcgctctcgcgatagacacagcaactattcagctgcgaggggacgggagaggtggtgagcactctcgcgagatttgaaggagcggcggaggccagagggaggagaggtttgtaaactaggaggctccgggtttccgggcacttttattaggtcgtcttctgggccaccagtgccccttccatctccacaggcagtccctccatcgctaacctttttttaaccggccttttaggaccggaagtccttcatctcaagcatccaatgctgaaagcggcctgattttctctaccggaagcccttttccagaggctgggaacacggcccacctagcaggaagtcccacctccttgagctccgccacccttcccgaagtttttctgtcacctgtgttaggctccgtcccctttccgcgttttatccccgtaccagaaaaggatacatttagtgcctcccacccagctccactaaacgggttggatatctcattctttgagttggtgttccttccccggcgcccccatgtagctgggaagtgggacctgggggtggttggacccctgggatcctaaaggaggggcagggagggcgcagaactccgcttctgctccttgctaccaggacgcgcggcctcctcagcctctttcctcccgctgccatgcaccctgcagccttcccgcttcctgtggttgtggccgctgtgctgtggggagcggccccgacccgggggctcattcgagcggtgagtctgagggacggatggggaaagggcgctgaaaggaagggttgcaggctgaaggggaacatcgccttttttgtccgcagacctcggaccacaatgccagcatggactttgcagaccttccagctctgtttggggctaccttgagccaggagggcctccaggtgattttctttcttttcttttcctccttccctcccttccttccttttctgtcttttttctttttttagtatttcgcaagatcctccatcctaggctggggttggggaggtttgtcctgggtgaaactggaggtaggaaaatgaagttaggaactgagcacgtctagtgtagaacccagaatctagagggagaagacagagtgtccacccctggaactccgaggttatcagggagactgaaagtggacgaagacagaaggcaggatcaacggtccttatcaggaaggtctcaggtgctagttattgcttatatgactttgggcaagttaatctctctgagccttagtttgttttactgtaaaatgggatattagaagttttcctagggttattgtgaagatcaaagtagatacgcaattttggtagtatttcatcccaaagactgccacatagcaagaactcagttgggccttagtagcagtcgagttgtttgtgagatgggtaattagaaaattgaagaggccgggcgcggtggctcacatctgtaatcccagttcaagaccagcctggccaacatggagaaaccctatctctactaaaatggcaaaaattagctgggcgtgatggtgcacgcatgtagtcccaactacttgggaggctgaggcaggagaatcacttgaaaccggaaggtggaggttgcagtgagccgagatcgcgccactgcactccagcctgggtgacaaaacgagactccatctcaaaaaaaagaaaaacaaaaagaaaactgaagggaggggagtgtgtctgtatgagtatgtgctggagaggggactgtgaaacagaacttgagagaaagtgacatgggtggtttgagaattgaattacaattggaatattagaaggcaaaaataattgcattagcttgcagtatagggtacagattagcccatctgggacagcgagagggatgatgggagagtttggtgaagggatgttttatgtcattgccttttcaagaggctaagagaaggttgtgatggtgggatgctcactcagaccccaggaaggaggaggaagtgaggatagaggatgtgcagcatgtgggctggtgtgtttggtggcccctgtagagagcagaatctagaaaggagaaatctcactgttgtttgcttccatccttcaggggttccttgtggaggctcacccagacaatgcctgcagccccattgccccaccacccccagccccggtcaatgggtcagtctttattgcgctgcttcgaagattcgactgcaactttgacctcaaggttgctgaatgaggaaggggagctgggcagctgagggtaaaaaaaaggcaccaggaatgaagacaggtaaggcccatgatggctccttgtcctctgccttgtctccctaggtcctaaatgcccagaaggctggatatggtgccgctgtagtacacaatgtgaattccaatgaacttctgaacatggtgtggaatagtggtaaggctgggggaatctatacagctgggctttcagtaggacccagagatggtgggaaggctgaaggcctcaggaaaagaagccaatcctttaggtggggtggggccaaagtgcaagatgccagggttcccagaggatttgagtagaaggttgtgagtccccagagtaacaccttgatccctgcagaggaaatccagcagcagatctggatcccgtctgtatttattggggagagaagctccgagtacctgcgtgccctctttgtctacgagaaggggtaggacatgtgcctccttcccattcttccttcagcaagcagttccatgccaacctggagcccaggcctcctcattacccgaaccattcagcctcctgtccttccttccctgcctctttgactttcttcccattcctgtccccacctatgggctttgtccagagccagttactttgtccctctttttttctccctttgcctttctcgccctgctgagactggtcatccttttcccagggctcgggtgcttctggttccagacaataccttccccttgggctattacctcatccctttcacagggattgtgggactgctggttttggccatgggagcagtaatggtgagtagctgagggaacatgatgggaagcactgaggcctgtgaggccagactggatctggagttgggagatgggagtggcttgtcctagattgtctagttttgttcctaagccttgtccatccacccccgcttcccccagatagctcgttgtatccagcaccggaaacggctccagcggaatcgacttaccaaagagcaactgaaacagattcctacacatgactatcagaagggtgagggggttaggggagaagagggcttttcccacagtttacctggttctgaaggactttgagcccagaagatagggtatacaaagatggcagtggccgggcacagtggctcacgtaatcccaagtgcctctaatcccagtactttgggaggccaaggtgggcaggtcacttgagcccaggagtttgagaccagcctgggtgacatgataaaacagaaaagtcccagcactttaggaggctgaggcaagtggatcccttgaccccgggagttcaggccagcctgggcaatgtggtgagaccccatctctataaaaaaataaaattagctgggcatggtggtgtgcacttgtagtcccagctaattgggagactgagacaggagaatcacttgaaccaggaaggcggaggttgtcgggggctgagattgcaccactgtgctccagcctgggcgacagagggagtccctttctcaaaaaaataataataaaaataaagatggcagtaggaaggtttcagcttgagatgctgtcttttcttctgtttttatgcataaatacaacgaagacgggagaggagatggaaagcaaagatgattaagtgaaataattgtgggaaacaatagagggatagactttgcttataggggatgtggacagagcagaaaaatgggaggaatggggaggattcagttagagaaggaagaaaccggtaccaaggggctggggctttaggccctggggcctccagtgcccgtataaggctgtggcagaagccctgcccatttccgttccttccactccctatctccaccctcacacctccccaaaaacccacttcccttcttacctctgcttctctttgcttgtcccttctagccctaaattcttccatgttctgccctgaccttatcctgcctacctgtcttatctcttccactggctttgtaggtgaggggaaatttttgcaaggctttaaaagccttagccctgggtcattgtggctcagtgaaggactagattattttctttctgtcccaggagaccagtatgatgtctgtgccatttgcctggatgaatatgaggatggggacaagctgcgggtactcccctgtgctcatggtgaggccctcactgcctgcccatgcccctctgccaccagcagccaccaggtgcttcaccttgttcctctctgcagcctaccacagccgctgcgtggacccctggctcactcagacccggaagacctgccccatttgcaagcagcctgttcatcggggtcctggggacgaagaccaagaggaagaaactcaagggcaagaggagggtgatgaaggggagccaagggaccaccctgcctcagaaaggaccccacttttgggttctagccccactcttcccacctcctttggttccttagccccagctccccttgtttttcctgggccttcaacagatcccccactgtcccctccctcttcccctgttatcctggtctaataaccccccacacatacacctctggtgacctatttgcacagaccgtcgtcttccctccagtcttctgagggataggggacattccatcccaagcttctcccttacccacacctatccttttgaggggctttggggtggagctggggcaagcagagggactgggtcttcacttcttgggctaataaaattgtttctttgtggactaaggaag

SEQ ID NO: 7969 - DNA, 6462 bp, Homo sapiens
  SITE (328): n equals a,t,g, or c
accggccatcggcagtcatgcggataagagccacttcggctggtgttcccacaaaggcaccagtggcacctgcggtcatgccaatcacagccttcagcagaaagccagggggagtaccatcagccccagtcaggcgctcaaacagcacggtatagatgccaaggcgggtagtggtgtaggtggcctaacgcagcaggccagccgacagcctgaggagcagaggggtcagcatatcaggccaaggtctagagctgccaacccacagtctaccctccatcctgaggccccaatacccagtgtaaatgcccctccagccttctgccttcangatactggtgagggcatggaagctggttttgtactctcgagtcttggccccttccccgctcaactgcatccggttcttcaccaggtccaggggctggacaaaaactgtagctcccatcctggggggaagacagaggtggagtgaagggccaggcattccagatctaccagtgcccactggagcctggcagcaagaggttacaaaggtcagggcctgccatgcgattcaagaatcaggatgctggtgagcatgtgtataagagtctatatgtacaccaagtgcaacgggtctgaaaagtctagttgtccagtaggggccatgcaatgaaagtgctccaagcagcttcatgacagtcaagcagtgacctggggctgcacgcagtccgacacagggaggggaggaaggggcatccaagatttaggactccaggtagtcctgcaggagccatttaatggcctggaaccccctgccgcccggccgagcttagcaatgcgctgggaaactcagctggcccggcgggggttgtgcaacgaccctgcatgcagtccataagggtcctgcaatggggccctagcagcccatcggggaactcgcaatacgctggagatcgcgctgaccccgtgccggcacagttcactgcagcagacccagagatgaaccgggcccggttccttttgcccttcccttcctcctcttttcccatccctggggcctgagcttacccggccaggcccccaaacaggaacttgacggacttaggggaggtacggggcttcccgtctatcccgccggccccggcactcgccgtcgccgccatcgccactcaatggccctcggctccgggtcccgtgcgcgcgcggccccgctcgcgcccaaggtgacaccgcgcgcgcaacagagcgagggcgcgcgcacgcccctccagctctcaggtccgacacccgctggaagccggcgcgggcgcaggcgcgcagcgcaaaggcggccgggagtaaggcggagctgaaggaggagcttgatggaagcgtgcgagaaggggcgtaactgatttggaaaccagaggaaaggcgctgttttcaccgaattagaatcgcgggaaaatagagaagagtttgtttgaaggtctcgcgagatcgagtgagtacggctcgccaagttggagcgctctcgcgatagacacagcaactattcagctgcgaggggacgggagaggtggtgagcactctcgcgagatttgaaggagcggcggaggccagagggaggagaggtttgtaaactaggaggctccgggtttccgggcacttttattaggtcgtcttctgggccaccagtgccccttccatctccacaggcagtccctccatcgctaacctttttttaaccggccttttaggaccggaagtccttcatctcaagcatccaatgctgaaagcggcctgattttctctaccggaagcccttttccagaggctgggaacacggcccacctagcaggaagtcccacctccttgagctccgccacccttcccgaagtttttctgtcacctgtgttaggctccgtcccctttccgcgttttatccccgtaccagaaaaggatacatttagtgcctcccacccagctccactaaacgggttggatatctcattctttgagttggtgttccttccccggcgcccccatgtagctgggaagtgggacctgggggtggttggacccctgggatcctaaaggaggggcagggagggcgcagaactccgcttctgctccttgctaccaggacgcgcggcctcctcagcctctttcctcccgctgccatgcaccctgcagccttcccgcttcctgtggttgtggccgctgtgctgtggggagcggccccgacccgggggctcattcgagcggtgagtctgagggacggatggggaaagggcgctgaaaggaagggttgcaggctgaaggggaacatcgccttttttgtccgcagacctcggaccacaatgccagcatggactttgcagaccttccagctctgtttggggctaccttgagccaggagggcctccaggtgattttctttcttttcttttcctccttccctcccttccttccttttctgtcttttttctttttttagtatttcgcaagatcctccatcctaggctggggttggggaggtttgtcctgggtgaaactggaggtaggaaaatgaagttaggaactgagcacgtctagtgtagaacccagaatctagagggagaagacagagtgtccacccctggaactccgaggttatcagggagactgaaagtggacgaagacagaaggcaggatcaacggtccttatcaggaaggtctcaggtgctagttattgcttatatgactttgggcaagttaatctctctgagccttagtttgttttactgtaaaatgggatattagaagttttcctagggttattgtgaagatcaaagtagatacgcaattttggtagtacttcatcccaaagactgccacatagcaagaactcagttgggccttagtagcagtcgagttgtttgtgagatgggtaattagaaaattgaagaggccgggcgcggtggctcacatctgtaatcccagttcaagaccagcctggccaacatggagaaaccctatctctactaaaatggcaaaaattagctgggcgtgatggtgcacgcatgtagtcccaactacttgggaggctgaggcaggagaatcacttgaaaccggaaggtggaggttgcagtgagccgagatcgcgccactgcactccagcctgggtgacaaaacgagactccatctcaaaaaaaagaaaaacaaaaagaaaactgaagggaggggagtgtgtctgtatgagtatgtgctggagaggggactgtgaaacagaacttgagagaaagtgacatgggtggtttgagaattgaattacaattggaatattagaaggcaaaaataattgcattagcttgcagtatagggtacagattagcccatctgggacagcgagagggatgatgggagagtttggtgaagggatgttttatgtcattgccttttcaagaggctaagagaaggttgtgatggtgggatgctcactcagaccccaggaaggaggaggaagtgaggatagaggatgtgcagcatgtgggctggtgtgtttggtggcccctgtagagagcagaatctagaaaggagaaatctcactgttgtttgcttccatccttcaggggttccttgtggaggctcacccagacaatgcctgcagccccattgccccaccacccccagccccggtcaatgggtcagtctttattgcgctgcttcgaagattcgactgcaactttgacctcaaggttgctaaatgaggaaggggagctgggcagctgagggtaaaaaaaaggcaccaggaatgaagacaggtaaggcccatgatggctccttgtcctctgccttgtctccctaggtcctaaatgcccagaaggctggatatggtgccgctgtagtacacaatgtgaattccaatgaacttctgaacatggtgtggaatagtggtaaggctgggggaatctatacagctgggctttcagtaggacccagagatggtgggaaggctgaaggcctcaggaaaagaagccaatcctttaggtggggtggggccaaagtgcaagatgccagggttcccagaggatttgagtagaaggttgtgagtccccagagtaacaccttgatccctgcagaggaaatccagcagcagatctggatcccgtctgtatttattggggagagaagctccgagtacctgcgtgccctctttgtctacgagaaggggtaggacatgtgcctccttcccattcttccttcagcaagcagttccatgccaacctggagcccaggcctcctcattacccgaaccattcagcctcctgtccttccttccctgcctctttgactttcttcccattcctgtccccacctatgggctttgtccagagccagttactttgtccctctttttttctccctttgcctttctcgccctgctgagactggtcatccttttcccagggctcgggtgcttctggttccagacaataccttccccttgggctattacctcatccctttcacagggattgtgggactgctggttttggccatgggagcagtaatggtgagtagctgagggaacatgatgggaagcactgaggcctgtgaggccagactggatctggagttgggagatgggagtggcttgtcctagattgtctagttttgttcctaagccttgtccatccacccccgcttcccccagatagctcgttgtatccagcaccggaaacggctccagcggaatcgacttaccaaagagcaactgaaacagattcctacacatgactatcagaagggtgagggggttaggggagaagagggcttttcccacagtttacctggttctgaaggactttgagcccagaagatagggtatacaaagatggcagtggccgggcacagtggctcacgtaatcccaagtgcctctaatcccagtactttgggaggccaaggtgggcaggtcacttgagcccaggagtttgagaccagcctgggtgacatgataaaacagaaaagtcccagcactttaggaggctgaggcaagtggatcccttgaccccgggagttcaggccagcctgggcaatgtggtgagaccccatctctataaaaaaataaaattagctgggcatggtggtgtgcacttgtagtcccagctaattgggagactgagacaggagaatcacttgaaccaggaaggcggaggttgtcgggggctgagattgcaccactgtgctccagcctgggcgacagagggagtccctttctcaaaaaaataataataaaaataaagatggcagtaggaaggtttcagcttgagatgctgtcttttcttctgcttttatgcataaatacaacgaagacgggagaggagatggaaagcaaagatgattaagtgaaataattgtgggaaacaatagagggacagactttgcttataggggatgtggacagagcagaaaaatgggaggaatggggaggattcagttagagaaggaagaaaccggtaccaaggggctggggctttaggccctggggcctccagtgcccgtataaggctgtggcagaagccctgcccatttccgttccttccactccctatctccaccctcacacctccccaaaaacccacttcccttcttacctctgcttctctttgcttgtcccttctagccctaaattcttccatgttctgccctgaccttatcctgcctacctgtcttatctcttccactggctttgtaggtgaggggaaatttttgcaaggctttaaaagccttagccctgggtcattgtggctcagtgaaggactagattattttctttctgtcccaggagaccagtatgatgtctgtgccatttgcctggatgaatatgaggatggggacaagctgcgggtactcccctgtgctcatggtgaggccctcactgcctgcccatgcccctctgccaccagcagccaccaggtgcttcaccttgttcctctctgcagcctaccacagccgctgcgtggacccctggctcactcagacccggaagacctgccccatttgcaagcagcctgttcatcggggtcctggggacgaagaccaagaggaagaaactcaagggcaagaggagggtgatgaaggggagccaagggaccaccctgcctcagaaaggaccccacttttgggttctagccccactcttcccacctcctttggttccttagccccagctccccttgtttttcctgggccttcaacagatcccccactgtcccctccctcttcccctgttatcctggtctaataaccccccacacatacacctctggtgacctatttgcacagaccgtcgtcttccctccagtcttctgagggataggggacattccatcccaagcttctcccttacccacacctatccttttgaggggctttggggtggggctggggcaagcagagggactgggtcttcacttcttgggctaataaaattgtttctttgtggactaaggaag

SEQ ID NO: 7970 - DNA, 327 bp, Homo sapiens
ttgccttcctggagtttaatgacaactgctgggacctacctggcagcagcctgcagtactaggggcaaaggtgggtgcctgctttgcacctgcagcctcagaagtgcagctctcctcactgcccaggtcagcaggacagcaaggggtggaccctgcagcatgcaccatcttggtgtgactgaatagtcttgggtttcctgctctcaggctgggacacaggcaaatggaaccccatttcttttctcataaatcctgccattctctaaacacactggtgtggcttcctctcctgccttgtctccagcccaatccaaggcttggggccca

SEQ ID NO: 7971 - DNA, 3387 bp, Homo sapiens
caccttgttagtagaatcttttttattcagaaaaaaaaaaccccaaaaaacaaaagttttccaaccacacacgggagggatatgggtagggggaggtgtctgtccatccagccctggcccccagcccatgtggttttggcagcaataaggggtatggggtaatggcccaaaaaataaaatggtttgtgtgtgtatggggaggaaaggggtgcaaagctgtggggagcggtgaaggggaagggacagacgaggtcagtactgggaacgccgaaggtgggaggccatttcataacatttcttgttgatcaaaccaccgtggacaccttctttgcccatcagcaggactagcgctggaggaggaggaaagagaaaggaggctaggatccaggtgtcacaattccaccccctgccagctgttcagcagctgtccagccctgggggctgtaacccaacctcatctctcccaacccgcccccccaccacacacaggcaggctgtcagtcaccctgaaacaataaggcttttcaaaagaggaaaatcaagcttaaacgctggagaggaacagactaaaaacttaggggtcaaaggctcatagactgttgattcatgtgttcaggctagaaagggctgtggatgtgcatgccacctccaggttctaacaaaagaactcaaacgatgaactcgatgattcaagaccccaacaatctacctatactcctagaaaacagtttctaatccgagctcaaggcagtaagtaatttaagaggtaatgcagttcagcaacttcgaattacaagatgaggaactgagacagaatggagggactatcccgtgttccagcatccagcagacaaggaacacaatactggtctgactcccttcatgttggggaatcacacaaaaaagcaccctcaagattaccagaaggcggtacattagagatcttggagctaaaggaagggtaagactcaggaactcactcttgtcagtcttggtgacagtgacattgaaggtgggggccccaccggtgctcttggtacgaagatccatgctaaattccccatcctgcagcagtgagtcccggatcaccgaacatttctggcccccaagtgtcagcccattcacgtaaaaacttgaccggtctttgccaaccaggacacccacctcagctggctggaagaggaaccaagcgcccatcaagttagtcagtgcaccaagattcccaccgtgttctccaaagacccacctgtcttccacttctgagaaccaccccgccgtgggggctaagtataaattatatactcagtacacatcaatgaactgtgagaaactctgaggactgtgggacgttagtgcagaaaaagatcatgattctgaaacttagaatatggaaccagggaggaagggatgacatactcctctagagatttagatgtcagtgttaatggggaaagtaaacccaggaaataaagggagtcagtgaggtaagtgaggagcctttggatgctcagaactctccttcaggaaaagcagaagcggagaggggaagggaggggggcgggcgaggcaagagaagcaactttgcccttatttggtcaaaggttctgcaggagctgttagggcccggacgcctgggtctccaagtaacctagagtttagctccaggtatctctgctctgagatgaggaagcagacccctgggggctttccgggaaagttggaaaacttttgaaggtggacaggggccagacccggcaggccagctctcgggtctaggtaccccgggaacctttcccccctccccctttcaccccaagcccccacatccggtcccctcccgcccggaaacccccttccccccccttttgaacttccgctccccctccccacttccgggcagtgtggacagggagatggtggtgggagcagcggtagtaaaccaatatactttcgcttatgctgtctcagaacttctcacaaagttcccctgctccaggccccgccggatggcgggaagggagggcgaggggacttccgggattggcctcgcaggaatgttgaatccaacgtgctgagctgggggggcgtgtggtggcctcgccctctctaacggagttaggaggggccagaagcccacagagggtgggcaagggaccaagaccacgcgcctggggctcccttccgcaccaggagaaacaatggtagagggacgcgggctggcagccggacggggagctgggggtccaaggatccccgggtcccctctcaatcccaatccccagtaaaaactgaggcgcgtccccgccccgccctgggagaggcggaagtgggccgccgcaccgggcgccgcgcccctccccgccctgtgccccggatgtaacgccccgtcgcggaaagcggggtagcgggcgggatgggcgccgccgcctggggcataggacctacgggcaactgagggacccactcacgtgcagccgccattcgcgccgcttccagggcaagcacccagtcagggcctctcgctgcgcgccctagaccgcgcccgcccccacccaagtccctccctcagggtccaaaccggagcagtgccccggaccgcgcaggcctcgcagtaccgtgatgttgacgaacgttttcccggggacggcggcccagacggagggcgagtccttgtagcccacgatggccgcgtcctgacaggtcccgtccgccatgaggttgtcgatgtaggcgttccacccggccatggcgctgctactggggctgctctcggcgctgctgctggggccgcggactgggctcgagctgcctcggctggcgggcggggggaggcggagagctcggggcacgcgctgccgtccggaccgcggctccgctcgctgtgcagcagccctcgcaccgccacttcctgctcctccccccccccgccccgctagatttttatttgcaaaggacggtaggggcggggcctactccccattccctccctcccccactcgccagcccagacaccgaactttgcaaatgcaattttaaaaatccctccccctattgcaaaatttgcagagttcgatggaaagcaatgcagaaggatggggggtggcgggagagaggtgaagggtagggtttgctccaatttgcactgaatataaaccagactttggtatcggggcagggagtgagccagaagaaggaaggaaggagaaagcaggaggaattagcaagctgcaaatttagcaaattaaggagagttcggggagcccagggttaaacgggatgactcctccttcccccacctccgccgaagggaaggaccggcgggcggcggcgcgtgtgcccgcgcctgcgcctgcgccggggccgggagtgcatggggcggtcggggcc

SEQ ID NO: 7972 - DNA, 2907 bp, Homo sapiens
caccttgttagtagaatcttttttattcagaaaaaaaaaaccccaaaaaacaaaagttttccaaccacacacgggagggatatgggtagggggaggtgtctgtccatccagccctggcccccagcccatgtggttttggcagcaataaggggtatggggtaatggcccaaaaaataaaatggtttgtgtgtgtatggggaggaaaggggtgcaaagctgtggggagcggtgaaggggaagggacagacgaggtcagtactgggaacgccgaaggtgggaggccatttcataacatttcttgttgatcaaaccaccgtggacaccttctttgcccatcagcaggactagcgctggaggaggaggaaagagaaaggaggctaggatccaggtgtcacaattccaccccctgccagctgttcagcagctgtccagccctgggggctgtaacccaacctcatctctcccaacccgcccccccaccacacacaggcaggctgtcagtcaccctgaaacaataaggcttttcaaaagaggaaaatcaagcttaaacgctggagaggaacagactaaaaacttaggggtcaaaggctcatagactgttgattcatgtgttcaggctagaaagggctgtggatgtgcatgccacctccaggttctaacaaaagaactcaaacgatgaactcgatgattcaggaccccaacaatctacctatactcctagaaaacagtttctaatccgagctcaaggcagtaagtaatttaagaggtaatgcagttcagcaacttcgaattacaagatgaggaactgagacagaatggagggactatcccatgttccagcatccagcagacaaggaacacaatactggtctgactcccttcatgttggggaatcacacaaaaaagcaccctcaagattaccagaaggcggtacattagagatcttggagctaaaggaagggtaagactcaggaactcactcttgtcagtcttggtgacagtgacattgaaggtgggggccccaccggtgctcttggtacgaagatccatgctaaattccccatcctgcagcagtgagtcccggatcaccgaacatttctggcccccaagtgtcagcccattcacgtaaaaacttgaccggtctttgccaaccaggacacccacctcagctggctggaagaggaaccaagcgcccatcaagttagtcagtgcaccaagattcccaccgtgttctccaaagacccacctgtcttccacttctgagaaccaccccgccgtgggggctaagtataaattatatactcagtacacatcaatgaactgtgagaaactctgaggactgtgggacgttagtgcagaaaaagatcatgattctgaaacttagaatatggaaccagggaggaagggatgacatactcctctagagatttagatgtcagtgttaatggggaaagtaaacccaggaaataaagggagtcagtgaggtaagtgaggagcctttggatgctcagaactctccttcaggaaaagcagaagcggagaggggaagggaggggggcgggcgaggcaagagaagcaactttgcccttatttggtcaaaggttctgcaggagctgttagggcccggacgcctgggtctccaagtaacctagagtttagctccaggtatctctgctctgagatgaggaagcagacccctgggggctttccgggaaagttggaaaacttttgaaggtggacaggggccagacccggcaggccagctctcgggtctaggtaccccgggaacctttcccccctccccctttcaccccaagcccccacatccggtcccctcccgcccggaaacccccttccccccccttttgaacttccgctccccctccccacttccgggcagtgtggacagggagatggtggtgggagcagcggtagtaaaccaatatactttcgcttatgctgtctcagaacttctcacaaagttcccctgctccaggccccgccggatggcgggaagggagggcgaggggacttccgggattggcctcgcaggaatgttgaatccaacgtgctgagctgggggggcgtgtggtggcctcgccctctctaacggagttaggaggggccaggagcccacagagggtgggcaagggaccaagaccacgcgcctggggctcccttccgcaccaggagaaacaatggtagagggacgcgggctggcagccggacggggagctgggggtccaaggatccccgggtcccctctcaatcccaatccccagtaaaaactgaggcgcgtccccgccccgccctgggagaggcggaagtgggccgccgcaccgggcgccgcgcccctccccgccctgtgccccggatgtaacgccccgtcgcggaaagcggggtagcgggcgggatgggcgccgccgcctggggcataggacctacgggcaactgagggacccactcacgtgcagccgccattcgcgccgcttccagggcaagcacccagtcagggcctctcgctgcgcgccctagaccgcgcccgcccccacccaagtccctccctcagggtccaaaccggagcagtgccccggaccgcgcaggcctcgcagtaccgtgatgttgacgaacgttttcccggggacggcggcccagacggagggcgagtccttgtagcccacgatggccgcgtcctgacaggtcccgtccgccatgaggttgtcgatgtaggcgttccacccggccatggcgctgctactggggctgctctcggcgctgctgctggggccgcggactgggctcgagctgcctcggctggcgggcggggggaggcggagagctcggggcacgcgctgccgtccggaccgcggctccgctcgctgtgcagcagccctcgcaccgccactt

SEQ ID NO: 7973 - DNA, 2213 bp, Homo sapiens
tttagggagagaattgtggctatgttacaaacaatctaccagagacttacagacggcagctgtctattccccatttgacttcatcatttatgagcagacgtttgttaagcacatattgggtagcaaaacatctataatattagcttttaattttttaaaaaacttttatttccagaaagcttagctttatctacaagtacagttggtccttgaacaatgtagattagggggtgctgaccctctgtgaagctgaaaaaccatgtataatttttgactccctgaaaacgtaacaatgaatagcctgttgttcactggaagcattgctgatgacataaatggtcaactaacacatatttgtttgttctatatattatatgctgtattcttacaataaagcaagctgggcctggcgctgtggttcacatgtgtaatcccagcaatttacgaggctgaggcgggcagatcacttgaggccagttgttcaagaccagcctggtcaacatggtgaaaccccatctctactaagaatacaaaaactattttgggtgtgggtggtgcgcacctgtaattccagttactcaggaggctgaggcaggagaatcgcttgaaccgggaggcggaggctacttgagccgagatcatgccactgcactccagctctgggcaacagagtgagactctgtctaataaataaataagtaactaaataaataactaaatagctaactaaagctagagaaaagaaaatgttattaagaaaataataaggaagagaaaatatatttactattcattaagtgcaagtggatcatcatgaagggcttcttcctcattgtcttcatgttgagtagggctgaggaggaggaagatgaggggttagtcttgctgtcttgcgggtgacagatgtggaagtaaatcctcatgtaggtgggaatgagcagttcaaacctatgttgttcaagggccaactatagttgattaactcatatctctacagttaattttcaaacagatgtgatagctgaatgagaacttttaagatagtactggacagtaaccttattggaactggaatggcctttagactttttgtgtccagtttcttctcacctcctctttctcttcaaatgtgcaactgaaactgagagacctcagtcccatgtccaaggtcaggcagatacttagcggcagagtgaggactccagcccatttctgcagctctgctgtgcagtggaagatttgggacaagtacattatttaaaaatgcccacccactaaatattacattcctaacttttcccaatacacaaatatgcttgaacttttaaaagcttgtttttggtcgtgcttggtttggaatgtgaatgactaaaactacctttagcaatttcccaaagtgtaagttcaaatgtacagagaatttttttcctgaatgcccaacacaatatgcagttttacaacacataccagattcttagattcatttggtgaaggaagcctctgaattaaaacttttaaatatttctgatttgcaaccagacgaaaaagaagaaaattgacaacttttttgatgcaactttgtgaaatcatggtgttcctggtttttctggtctggtttttgttgttgttttgttttgttttgccacagtttagttcctcacctgatctttccttgtatccacttcagagtctctgaaatgttatctgtttgttggttcctgggaaattgagagccttttcaaagactccatctagaagcatatttaaaagtgtgaaagaagacatttatgcgaccaacaaacatatgaaaaaaagcttatcatcatgggtcattagagaaatgcacagcagaaccacaatgagataccatctcataccagttagaatggtgatcactaaaaagtcaggaaaggccaggggcggtgactcatgcctgtaatcccagcactttgggaggctgaggcgggtggatcacctgaggtcaggagtacaagactagcctggccaacatagtgaaaccccatctctactaaaaatacaaaaattagctgggtgtggtggcgggcacctgtaatcctggctactcaggaggctgaggcaggagaatcgcttgaatctgggaggcagaggttgcagtgagccgagattgtcccactgcaactccagcctgggtgacagactccatctcagaaaaaaaaaaaaaaaaaaaattc

SEQ ID NO: 7974 - DNA, 1400 bp, Homo sapiens
tcatgaagggcttcttcctcattgtcttcatgttgagtagggctgaggaggaggaagatgaggggttagtcttgctgtcttgcgggtgacagatgtggaagtaaatcctcatgtaggtgggaatgagcagttcaaacctatgttgttcaagggccaactatagttgattaactcatatctctacagttaattttcaaacagatgtgatagctgaatgagaacttttaagatagtactggacagtaaccttattggaactggaatggcctttagactttttgtgtccagtttcttctcacctcctctttctcttcaaatgtgcaactgaaactgagagacctcagtcccatgtccaaggtcaggcagatacttagcggcagagtgaggactccagcccatttctgcagctctgctgtgcagtggaagatttgggacaagtacattatttaaaaatgcccacccactaaatattacattcctaacttttcccaatacacaaatatgcttgaacttttaaaagcttgtttttggtcgtgcttggtttggaatgtgaatgactaaaactacctttagcaatttcccaaagtgtaagttcaaatgtacagagaatttttttcctgaatgcccaacacaatatgcagttttacaacacataccagattcttagattcatttggtgaaggaagcctctgaattaaaacttttaaatatttctgatttgcaaccagacgaaaaagaagaaaattgacaacttttttgatgcaactttgtgaaatcatggtgttcctggtttttctggtctggtttttgttgttgttttgttttgttttgccacagtttagttcctcacctgatctttccttgtatccacttcagagtctctgaaatgttatctgtttgttggttcctgggaaattgagagccttttcaaagactccatctagaagcatatttaaaagtgtgaaagaagacatttatgcgaccaacaaacatatgaaaaaaagcttatcatcatgggtcattagagaaatgcacagcagaaccacaatgagataccatctcataccagttagaatggtgatcactaaaaagtcaggaaaggccaggggcggtgactcatgcctgtaatcccagcactttgggaggctgaggcgggtggatcacctgaggtcaggagtacaagactagcctggccaacatagtgaaaccccatctctactaaaaatacaaaaattagctgggtgtggtggcgggcacctgtaatcctggctactcaggaggctgaggcaggagaatcgcttgaatctgggaggcagaggttgcagtgagccgagattgtcccactgcaactccagcctgggtgacagactccatctcagaaaaaaaaaaaaaaaaaaaaa

SEQ ID NO: 7975 - DNA, 108 bp, Homo sapiens
tcacaatagcaaagacttggaaccaacccagatgcccatcaatgatagactggataaagaaaatgtggcacatatataccatggaatactatgtagctataaaaaagg

SEQ ID NO: 7976 - DNA, 1651 bp, Homo sapiens
tgaggttggggtgtggtggaagagtgggcagtcttctcagggcttcagccaccaagagaagctcctggtccaggcagggacgtggattcgtgaaccaatctttttttttctctgttgcaatgtggaccccatttctctccagagggaggaggagacataaagccatgagaccctggaaagcatttctgagctggggcacaagcctaggaggcagtgggtagcaaagtgagttgggatggaggaaaattactcttcatttgaggtgtggttctctctctcccactgagaagaaaatgcatggcagaaagaacatctgtcagttttgccccacagtggaaaatgcaaggctgggaaacctgagtcctgggttttcctacggccgttccaggcactgggcagcacgatgccaggaatgttctttcctttttctccagggaaggctaagtgggtgtcagccattcacacctctgtgggaaagactctaccactggcactgtccttccaacacctggataaagtcagggttttcaatgaggggcaggggctgggggaggtgatgtgattctcaaagccagggcctgtgtagggagatatctgggcccgggaccctcacccagacctgctgaggaaggcgtgagtctctcccgctcacagaggggttgggcaaagacttgaacctgagtctgtctaactccaacacagggatttttcctcccctgcccctctgtctcagccagctgcacagtttcactacaaacatcagtcccaggggagagggaggaaggagaggggcagggtggtgaggtctgcgttccttaaataaacggagggcagaattctagccagaagggggcgagggttacccagcccagtggagcatggagccgcccctctagttcccactgccaccgtgatgccatcagatgggagaaaacacagaactcgggatgaaacgtcacacggtctgggctaaagatcttgctctttaatttcccagcaggtaaccttgtggcagtcactaaccctctctacacctcaatgttctcatctgtaaaatggaaatgatgacccctgggtctcccaggaccgtgaggggtcctgaaagggcaggtgtgcgcggtgctttgtagatgataaggcatctcagaaacaccggggctttactgttattttctctccagcttgtttgggcagacaaaagagaaatcgagcccagtcattcttagcacagccaagaagggcagatttcaaaaggagccttgcttcaaactgaggaaaaccaaaaaggaaaaaacaacaaacacagctgcccctaccctccagtccacaaaacagtctgtgtctgacaagctgggctctgccagcggcccacccccagactcctgcaccagctggccttcctgacctgtgtgccctgggagccaggccgactcttcacacttccagtcaccgacacagtgcaatgcaacccattcttgctcaaggcctccttagaaattattcctcccattgctcgaacctgggagttggagattgcagtgagccacgatggtgccactccactctagcctgggtgacacagtgagaccctgcctcaaaaaaaagaaaagaaaagggaggggagggaagggaaaattaaaaaaaaagaaaa

SEQ ID NO: 7977 - DNA, 304 bp, Homo sapiens
acatcctctctctgagcctcagtttactcgtgtgtaaagcaaggaggctggactcgacaacccttaggatccattccaggtctaatctgtttccgaacctttaatgcgcacctagagtgtaccaaacactgtactatttattggggatatggtggggaacaagaggccaaggaaggggacagtaatcgggtaggcaaattaagaagcaggatagttttaggcagggatcaatgctgtgcaataaaccaggtgctgtaataagagtggctagggggtgatggaagtggagagggatttctaccat

SEQ ID NO: 7978 - DNA, 1012 bp, Homo sapiens
  SITE (39): n equals a,t,g, or c
  SITE (40): n equals a,t,g, or c
  SITE (41): n equals a,t,g, or c
  SITE (42): n equals a,t,g, or c
  SITE (43): n equals a,t,g, or c
  SITE (44): n equals a,t,g, or c
  SITE (45): n equals a,t,g, or c
  SITE (46): n equals a,t,g, or c
  SITE (47): n equals a,t,g, or c
  SITE (48): n equals a,t,g, or c
  SITE (49): n equals a,t,g, or c
  SITE (50): n equals a,t,g, or c
  SITE (51): n equals a,t,g, or c
  SITE (52): n equals a,t,g, or c
  SITE (53): n equals a,t,g, or c
  SITE (54): n equals a,t,g, or c
  SITE (55): n equals a,t,g, or c
  SITE (56): n equals a,t,g, or c
  SITE (57): n equals a,t,g, or c
  SITE (58): n equals a,t,g, or c
  SITE (59): n equals a,t,g, or c
  SITE (60): n equals a,t,g, or c
  SITE (61): n equals a,t,g, or c
  SITE (62): n equals a,t,g, or c
  SITE (63): n equals a,t,g, or c
  SITE (64): n equals a,t,g, or c
  SITE (65): n equals a,t,g, or c
  SITE (66): n equals a,t,g, or c
  SITE (67): n equals a,t,g, or c
  SITE (68): n equals a,t,g, or c
  SITE (69): n equals a,t,g, or c
  SITE (70): n equals a,t,g, or c
  SITE (71): n equals a,t,g, or c
  SITE (72): n equals a,t,g, or c
  SITE (73): n equals a,t,g, or c
  SITE (74): n equals a,t,g, or c
  SITE (75): n equals a,t,g, or c
  SITE (76): n equals a,t,g, or c
  SITE (77): n equals a,t,g, or c
  SITE (78): n equals a,t,g, or c
  SITE (79): n equals a,t,g, or c
  SITE (80): n equals a,t,g, or c
  SITE (81): n equals a,t,g, or c
  SITE (82): n equals a,t,g, or c
  SITE (83): n equals a,t,g, or c
  SITE (84): n equals a,t,g, or c
  SITE (85): n equals a,t,g, or c
  SITE (86): n equals a,t,g, or c
  SITE (87): n equals a,t,g, or c
  SITE (88): n equals a,t,g, or c
  SITE (89): n equals a,t,g, or c
  SITE (90): n equals a,t,g, or c
  SITE (91): n equals a,t,g, or c
  SITE (92): n equals a,t,g, or c
  SITE (93): n equals a,t,g, or c
  SITE (94): n equals a,t,g, or c
  SITE (95): n equals a,t,g, or c
  SITE (96): n equals a,t,g, or c
  SITE (97): n equals a,t,g, or c
  SITE (98): n equals a,t,g, or c
  SITE (99): n equals a,t,g, or c
  SITE (100): n equals a,t,g, or c
  SITE (101): n equals a,t,g, or c
  SITE (102): n equals a,t,g, or c
  SITE (103): n equals a,t,g, or c
  SITE (104): n equals a,t,g, or c
  SITE (105): n equals a,t,g, or c
  SITE (106): n equals a,t,g, or c
  SITE (107): n equals a,t,g, or c
  SITE (108): n equals a,t,g, or c
  SITE (109): n equals a,t,g, or c
  SITE (110): n equals a,t,g, or c
  SITE (111): n equals a,t,g, or c
  SITE (112): n equals a,t,g, or c
  SITE (113): n equals a,t,g, or c
  SITE (114): n equals a,t,g, or c
  SITE (115): n equals a,t,g, or c
  SITE (116): n equals a,t,g, or c
  SITE (117): n equals a,t,g, or c
  SITE (118): n equals a,t,g, or c
  SITE (119): n equals a,t,g, or c
  SITE (120): n equals a,t,g, or c
  SITE (121): n equals a,t,g, or c
  SITE (122): n equals a,t,g, or c
  SITE (123): n equals a,t,g, or c
  SITE (124): n equals a,t,g, or c
  SITE (125): n equals a,t,g, or c
  SITE (126): n equals a,t,g, or c
  SITE (127): n equals a,t,g, or c
  SITE (128): n equals a,t,g, or c
  SITE (129): n equals a,t,g, or c
  SITE (130): n equals a,t,g, or c
  SITE (131): n equals a,t,g, or c
  SITE (132): n equals a,t,g, or c
  SITE (133): n equals a,t,g, or c
  SITE (134): n equals a,t,g, or c
  SITE (135): n equals a,t,g, or c
  SITE (136): n equals a,t,g, or c
  SITE (137): n equals a,t,g, or c
  SITE (138): n equals a,t,g, or c
  SITE (139): n equals a,t,g, or c
  SITE (140): n equals a,t,g, or c
  SITE (141): n equals a,t,g, or c
  SITE (142): n equals a,t,g, or c
  SITE (143): n equals a,t,g, or c
  SITE (144): n equals a,t,g, or c
  SITE (145): n equals a,t,g, or c
  SITE (146): n equals a,t,g, or c
  SITE (147): n equals a,t,g, or c
  SITE (148): n equals a,t,g, or c
  SITE (149): n equals a,t,g, or c
  SITE (150): n equals a,t,g, or c
  SITE (151): n equals a,t,g, or c
  SITE (152): n equals a,t,g, or c
  SITE (153): n equals a,t,g, or c
  SITE (154): n equals a,t,g, or c
  SITE (155): n equals a,t,g, or c
  SITE (156): n equals a,t,g, or c
  SITE (157): n equals a,t,g, or c
  SITE (158): n equals a,t,g, or c
  SITE (159): n equals a,t,g, or c
  SITE (160): n equals a,t,g, or c
  SITE (161): n equals a,t,g, or c
  SITE (162): n equals a,t,g, or c
  SITE (163): n equals a,t,g, or c
  SITE (164): n equals a,t,g, or c
  SITE (165): n equals a,t,g, or c
  SITE (166): n equals a,t,g, or c
  SITE (167): n equals a,t,g, or c
  SITE (168): n equals a,t,g, or c
  SITE (169): n equals a,t,g, or c
  SITE (170): n equals a,t,g, or c
  SITE (171): n equals a,t,g, or c
  SITE (172): n equals a,t,g, or c
  SITE (173): n equals a,t,g, or c
  SITE (174): n equals a,t,g, or c
  SITE (175): n equals a,t,g, or c
  SITE (176): n equals a,t,g, or c
  SITE (177): n equals a,t,g, or c
  SITE (178): n equals a,t,g, or c
  SITE (179): n equals a,t,g, or c
  SITE (180): n equals a,t,g, or c
  SITE (181): n equals a,t,g, or c
  SITE (182): n equals a,t,g, or c
  SITE (183): n equals a,t,g, or c
  SITE (184): n equals a,t,g, or c
  SITE (185): n equals a,t,g, or c
  SITE (186): n equals a,t,g, or c
  SITE (187): n equals a,t,g, or c
  SITE (188): n equals a,t,g, or c
  SITE (189): n equals a,t,g, or c
  SITE (190): n equals a,t,g, or c
  SITE (191): n equals a,t,g, or c
  SITE (192): n equals a,t,g, or c
  SITE (193): n equals a,t,g, or c
  SITE (194): n equals a,t,g, or c
  SITE (195): n equals a,t,g, or c
  SITE (196): n equals a,t,g, or c
  SITE (197): n equals a,t,g, or c
  SITE (198): n equals a,t,g, or c
  SITE (199): n equals a,t,g, or c
  SITE (200): n equals a,t,g, or c
  SITE (201): n equals a,t,g, or c
  SITE (202): n equals a,t,g, or c
  SITE (203): n equals a,t,g, or c
  SITE (204): n equals a,t,g, or c
  SITE (205): n equals a,t,g, or c
  SITE (206): n equals a,t,g, or c
  SITE (207): n equals a,t,g, or c
  SITE (208): n equals a,t,g, or c
  SITE (209): n equals a,t,g, or c
  SITE (210): n equals a,t,g, or c
  SITE (211): n equals a,t,g, or c
  SITE (212): n equals a,t,g, or c
  SITE (213): n equals a,t,g, or c
  SITE (214): n equals a,t,g, or c
  SITE (215): n equals a,t,g, or c
  SITE (216): n equals a,t,g, or c
  SITE (217): n equals a,t,g, or c
  SITE (218): n equals a,t,g, or c
  SITE (219): n equals a,t,g, or c
  SITE (220): n equals a,t,g, or c
  SITE (221): n equals a,t,g, or c
  SITE (222): n equals a,t,g, or c
  SITE (223): n equals a,t,g, or c
  SITE (224): n equals a,t,g, or c
  SITE (225): n equals a,t,g, or c
  SITE (226): n equals a,t,g, or c
  SITE (227): n equals a,t,g, or c
  SITE (228): n equals a,t,g, or c
  SITE (229): n equals a,t,g, or c
  SITE (230): n equals a,t,g, or c
  SITE (231): n equals a,t,g, or c
  SITE (232): n equals a,t,g, or c
  SITE (233): n equals a,t,g, or c
  SITE (234): n equals a,t,g, or c
  SITE (235): n equals a,t,g, or c
  SITE (236): n equals a,t,g, or c
  SITE (237): n equals a,t,g, or c
  SITE (238): n equals a,t,g, or c
  SITE (239): n equals a,t,g, or c
  SITE (240): n equals a,t,g, or c
  SITE (241): n equals a,t,g, or c
  SITE (242): n equals a,t,g, or c
  SITE (243): n equals a,t,g, or c
  SITE (244): n equals a,t,g, or c
  SITE (245): n equals a,t,g, or c
  SITE (246): n equals a,t,g, or c
  SITE (247): n equals a,t,g, or c
  SITE (248): n equals a,t,g, or c
  SITE (249): n equals a,t,g, or c
  SITE (250): n equals a,t,g, or c
  SITE (251): n equals a,t,g, or c
  SITE (252): n equals a,t,g, or c
  SITE (253): n equals a,t,g, or c
  SITE (254): n equals a,t,g, or c
  SITE (255): n equals a,t,g, or c
  SITE (256): n equals a,t,g, or c
  SITE (257): n equals a,t,g, or c
  SITE (258): n equals a,t,g, or c
  SITE (259): n equals a,t,g, or c
  SITE (260): n equals a,t,g, or c
  SITE (261): n equals a,t,g, or c
  SITE (262): n equals a,t,g, or c
  SITE (263): n equals a,t,g, or c
  SITE (264): n equals a,t,g, or c
  SITE (265): n equals a,t,g, or c
  SITE (266): n equals a,t,g, or c
  SITE (267): n equals a,t,g, or c
  SITE (268): n equals a,t,g, or c
  SITE (269): n equals a,t,g, or c
  SITE (270): n equals a,t,g, or c
  SITE (271): n equals a,t,g, or c
  SITE (272): n equals a,t,g, or c
  SITE (273): n equals a,t,g, or c
  SITE (274): n equals a,t,g, or c
  SITE (275): n equals a,t,g, or c
  SITE (276): n equals a,t,g, or c
  SITE (277): n equals a,t,g, or c
  SITE (278): n equals a,t,g, or c
  SITE (279): n equals a,t,g, or c
  SITE (280): n equals a,t,g, or c
  SITE (281): n equals a,t,g, or c
  SITE (282): n equals a,t,g, or c
  SITE (283): n equals a,t,g, or c
  SITE (284): n equals a,t,g, or c
  SITE (285): n equals a,t,g, or c
  SITE (286): n equals a,t,g, or c
  SITE (287): n equals a,t,g, or c
  SITE (288): n equals a,t,g, or c
  SITE (289): n equals a,t,g, or c
  SITE (290): n equals a,t,g, or c
  SITE (291): n equals a,t,g, or c
  SITE (292): n equals a,t,g, or c
  SITE (293): n equals a,t,g, or c
  SITE (294): n equals a,t,g, or c
  SITE (295): n equals a,t,g, or c
  SITE (296): n equals a,t,g, or c
  SITE (297): n equals a,t,g, or c
  SITE (298): n equals a,t,g, or c
  SITE (299): n equals a,t,g, or c
  SITE (300): n equals a,t,g, or c
  SITE (301): n equals a,t,g, or c
  SITE (302): n equals a,t,g, or c
  SITE (303): n equals a,t,g, or c
  SITE (304): n equals a,t,g, or c
  SITE (305): n equals a,t,g, or c
  SITE (306): n equals a,t,g, or c
  SITE (307): n equals a,t,g, or c
  SITE (308): n equals a,t,g, or c
  SITE (309): n equals a,t,g, or c
  SITE (310): n equals a,t,g, or c
  SITE (311): n equals a,t,g, or c
  SITE (312): n equals a,t,g, or c
  SITE (313): n equals a,t,g, or c
  SITE (314): n equals a,t,g, or c
  SITE (315): n equals a,t,g, or c
  SITE (316): n equals a,t,g, or c
  SITE (317): n equals a,t,g, or c
  SITE (318): n equals a,t,g, or c
  SITE (319): n equals a,t,g, or c
  SITE (320): n equals a,t,g, or c
  SITE (321): n equals a,t,g, or c
  SITE (322): n equals a,t,g, or c
  SITE (323): n equals a,t,g, or c
  SITE (324): n equals a,t,g, or c
  SITE (325): n equals a,t,g, or c
  SITE (326): n equals a,t,g, or c
  SITE (327): n equals a,t,g, or c
  SITE (328): n equals a,t,g, or c
  SITE (329): n equals a,t,g, or c
  SITE (330): n equals a,t,g, or c
  SITE (331): n equals a,t,g, or c
  SITE (332): n equals a,t,g, or c
  SITE (333): n equals a,t,g, or c
  SITE (334): n equals a,t,g, or c
  SITE (335): n equals a,t,g, or c
  SITE (336): n equals a,t,g, or c
  SITE (337): n equals a,t,g, or c
  SITE (338): n equals a,t,g, or c
  SITE (339): n equals a,t,g, or c
  SITE (340): n equals a,t,g, or c
  SITE (341): n equals a,t,g, or c
  SITE (342): n equals a,t,g, or c
  SITE (343): n equals a,t,g, or c
  SITE (344): n equals a,t,g, or c
  SITE (345): n equals a,t,g, or c
  SITE (346): n equals a,t,g, or c
  SITE (347): n equals a,t,g, or c
  SITE (348): n equals a,t,g, or c
  SITE (349): n equals a,t,g, or c
  SITE (350): n equals a,t,g, or c
  SITE (351): n equals a,t,g, or c
  SITE (352): n equals a,t,g, or c
  SITE (353): n equals a,t,g, or c
  SITE (354): n equals a,t,g, or c
  SITE (355): n equals a,t,g, or c
  SITE (356): n equals a,t,g, or c
  SITE (357): n equals a,t,g, or c
  SITE (358): n equals a,t,g, or c
  SITE (359): n equals a,t,g, or c
  SITE (360): n equals a,t,g, or c
  SITE (361): n equals a,t,g, or c
  SITE (362): n equals a,t,g, or c
  SITE (363): n equals a,t,g, or c
  SITE (364): n equals a,t,g, or c
  SITE (365): n equals a,t,g, or c
  SITE (366): n equals a,t,g, or c
  SITE (367): n equals a,t,g, or c
  SITE (368): n equals a,t,g, or c
  SITE (369): n equals a,t,g, or c
  SITE (370): n equals a,t,g, or c
  SITE (371): n equals a,t,g, or c
  SITE (372): n equals a,t,g, or c
  SITE (373): n equals a,t,g, or c
  SITE (374): n equals a,t,g, or c
  SITE (375): n equals a,t,g, or c
  SITE (376): n equals a,t,g, or c
  SITE (377): n equals a,t,g, or c
  SITE (378): n equals a,t,g, or c
  SITE (379): n equals a,t,g, or c
  SITE (380): n equals a,t,g, or c
  SITE (381): n equals a,t,g, or c
  SITE (382): n equals a,t,g, or c
  SITE (383): n equals a,t,g, or c
  SITE (384): n equals a,t,g, or c
  SITE (385): n equals a,t,g, or c
  SITE (386): n equals a,t,g, or c
  SITE (387): n equals a,t,g, or c
  SITE (388): n equals a,t,g, or c
  SITE (389): n equals a,t,g, or c
  SITE (390): n equals a,t,g, or c
  SITE (391): n equals a,t,g, or c
  SITE (392): n equals a,t,g, or c
  SITE (393): n equals a,t,g, or c
  SITE (394): n equals a,t,g, or c
  SITE (395): n equals a,t,g, or c
  SITE (396): n equals a,t,g, or c
  SITE (397): n equals a,t,g, or c
  SITE (398): n equals a,t,g, or c
  SITE (399): n equals a,t,g, or c
  SITE (400): n equals a,t,g, or c
  SITE (401): n equals a,t,g, or c
  SITE (402): n equals a,t,g, or c
  SITE (403): n equals a,t,g, or c
  SITE (404): n equals a,t,g, or c
  SITE (405): n equals a,t,g, or c
  SITE (406): n equals a,t,g, or c
  SITE (407): n equals a,t,g, or c
  SITE (408): n equals a,t,g, or c
  SITE (409): n equals a,t,g, or c
  SITE (410): n equals a,t,g, or c
  SITE (411): n equals a,t,g, or c
  SITE (412): n equals a,t,g, or c
  SITE (413): n equals a,t,g, or c
  SITE (414): n equals a,t,g, or c
  SITE (415): n equals a,t,g, or c
  SITE (416): n equals a,t,g, or c
  SITE (417): n equals a,t,g, or c
  SITE (418): n equals a,t,g, or c
  SITE (419): n equals a,t,g, or c
  SITE (420): n equals a,t,g, or c
  SITE (421): n equals a,t,g, or c
  SITE (422): n equals a,t,g, or c
  SITE (423): n equals a,t,g, or c
  SITE (424): n equals a,t,g, or c
  SITE (425): n equals a,t,g, or c
  SITE (426): n equals a,t,g, or c
  SITE (427): n equals a,t,g, or c
  SITE (428): n equals a,t,g, or c
  SITE (429): n equals a,t,g, or c
  SITE (430): n equals a,t,g, or c
  SITE (431): n equals a,t,g, or c
  SITE (432): n equals a,t,g, or c
  SITE (433): n equals a,t,g, or c
  SITE (434): n equals a,t,g, or c
  SITE (435): n equals a,t,g, or c
  SITE (436): n equals a,t,g, or c
  SITE (437): n equals a,t,g, or c
  SITE (438): n equals a,t,g, or c
  SITE (439): n equals a,t,g, or c
  SITE (440): n equals a,t,g, or c
  SITE (441): n equals a,t,g, or c
  SITE (442): n equals a,t,g, or c
  SITE (443): n equals a,t,g, or c
  SITE (444): n equals a,t,g, or c
  SITE (445): n equals a,t,g, or c
  SITE (446): n equals a,t,g, or c
  SITE (447): n equals a,t,g, or c
  SITE (448): n equals a,t,g, or c
  SITE (449): n equals a,t,g, or c
  SITE (450): n equals a,t,g, or c
  SITE (451): n equals a,t,g, or c
  SITE (452): n equals a,t,g, or c
  SITE (453): n equals a,t,g, or c
  SITE (454): n equals a,t,g, or c
  SITE (455): n equals a,t,g, or c
  SITE (456): n equals a,t,g, or c
  SITE (457): n equals a,t,g, or c
  SITE (458): n equals a,t,g, or c
  SITE (459): n equals a,t,g, or c
  SITE (460): n equals a,t,g, or c
  SITE (461): n equals a,t,g, or c
  SITE (462): n equals a,t,g, or c
  SITE (463): n equals a,t,g, or c
  SITE (464): n equals a,t,g, or c
  SITE (465): n equals a,t,g, or c
  SITE (466): n equals a,t,g, or c
  SITE (467): n equals a,t,g, or c
  SITE (468): n equals a,t,g, or c
  SITE (469): n equals a,t,g, or c
  SITE (470): n equals a,t,g, or c
  SITE (471): n equals a,t,g, or c
  SITE (472): n equals a,t,g, or c
  SITE (473): n equals a,t,g, or c
  SITE (474): n equals a,t,g, or c
  SITE (475): n equals a,t,g, or c
  SITE (476): n equals a,t,g, or c
  SITE (477): n equals a,t,g, or c
  SITE (478): n equals a,t,g, or c
  SITE (479): n equals a,t,g, or c
  SITE (480): n equals a,t,g, or c
  SITE (481): n equals a,t,g, or c
  SITE (482): n equals a,t,g, or c
  SITE (483): n equals a,t,g, or c
  SITE (484): n equals a,t,g, or c
  SITE (485): n equals a,t,g, or c
  SITE (486): n equals a,t,g, or c
  SITE (487): n equals a,t,g, or c
  SITE (488): n equals a,t,g, or c
  SITE (489): n equals a,t,g, or c
  SITE (490): n equals a,t,g, or c
  SITE (491): n equals a,t,g, or c
  SITE (492): n equals a,t,g, or c
  SITE (493): n equals a,t,g, or c
  SITE (494): n equals a,t,g, or c
  SITE (495): n equals a,t,g, or c
  SITE (496): n equals a,t,g, or c
  SITE (497): n equals a,t,g, or c
  SITE (498): n equals a,t,g, or c
  SITE (499): n equals a,t,g, or c
  SITE (500): n equals a,t,g, or c
  SITE (501): n equals a,t,g, or c
  SITE (502): n equals a,t,g, or c
  SITE (503): n equals a,t,g, or c
  SITE (504): n equals a,t,g, or c
  SITE (505): n equals a,t,g, or c
  SITE (506): n equals a,t,g, or c
  SITE (507): n equals a,t,g, or c
  SITE (508): n equals a,t,g, or c
  SITE (509): n equals a,t,g, or c
  SITE (510): n equals a,t,g, or c
  SITE (511): n equals a,t,g, or c
  SITE (512): n equals a,t,g, or c
  SITE (513): n equals a,t,g, or c
  SITE (514): n equals a,t,g, or c
  SITE (515): n equals a,t,g, or c
  SITE (516): n equals a,t,g, or c
  SITE (517): n equals a,t,g, or c
  SITE (518): n equals a,t,g, or c
  SITE (519): n equals a,t,g, or c
  SITE (520): n equals a,t,g, or c
  SITE (521): n equals a,t,g, or c
  SITE (522): n equals a,t,g, or c
  SITE (523): n equals a,t,g, or c
  SITE (524): n equals a,t,g, or c
  SITE (525): n equals a,t,g, or c
  SITE (526): n equals a,t,g, or c
  SITE (527): n equals a,t,g, or c
  SITE (528): n equals a,t,g, or c
  SITE (529): n equals a,t,g, or c
  SITE (530): n equals a,t,g, or c
  SITE (531): n equals a,t,g, or c
  SITE (532): n equals a,t,g, or c
  SITE (533): n equals a,t,g, or c
  SITE (534): n equals a,t,g, or c
  SITE (535): n equals a,t,g, or c
  SITE (536): n equals a,t,g, or c
  SITE (537): n equals a,t,g, or c
  SITE (538): n equals a,t,g, or c
  SITE (539): n equals a,t,g, or c
  SITE (540): n equals a,t,g, or c
  SITE (541): n equals a,t,g, or c
  SITE (542): n equals a,t,g, or c
  SITE (543): n equals a,t,g, or c
  SITE (544): n equals a,t,g, or c
  SITE (545): n equals a,t,g, or c
  SITE (546): n equals a,t,g, or c
  SITE (547): n equals a,t,g, or c
  SITE (548): n equals a,t,g, or c
  SITE (549): n equals a,t,g, or c
  SITE (550): n equals a,t,g, or c
  SITE (551): n equals a,t,g, or c
  SITE (552): n equals a,t,g, or c
  SITE (553): n equals a,t,g, or c
  SITE (554): n equals a,t,g, or c
  SITE (555): n equals a,t,g, or c
  SITE (556): n equals a,t,g, or c
  SITE (557): n equals a,t,g, or c
  SITE (558): n equals a,t,g, or c
  SITE (559): n equals a,t,g, or c
  SITE (560): n equals a,t,g, or c
  SITE (561): n equals a,t,g, or c
  SITE (562): n equals a,t,g, or c
  SITE (563): n equals a,t,g, or c
  SITE (564): n equals a,t,g, or c
  SITE (565): n equals a,t,g, or c
  SITE (566): n equals a,t,g, or c
  SITE (567): n equals a,t,g, or c
  SITE (568): n equals a,t,g, or c
  SITE (569): n equals a,t,g, or c
  SITE (570): n equals a,t,g, or c
  SITE (571): n equals a,t,g, or c
  SITE (572): n equals a,t,g, or c
  SITE (573): n equals a,t,g, or c
  SITE (574): n equals a,t,g, or c
  SITE (575): n equals a,t,g, or c
  SITE (576): n equals a,t,g, or c
  SITE (577): n equals a,t,g, or c
  SITE (578): n equals a,t,g, or c
  SITE (579): n equals a,t,g, or c
  SITE (580): n equals a,t,g, or c
  SITE (581): n equals a,t,g, or c
  SITE (582): n equals a,t,g, or c
  SITE (583): n equals a,t,g, or c
  SITE (584): n equals a,t,g, or c
  SITE (585): n equals a,t,g, or c
  SITE (586): n equals a,t,g, or c
  SITE (587): n equals a,t,g, or c
  SITE (588): n equals a,t,g, or c
  SITE (589): n equals a,t,g, or c
  SITE (590): n equals a,t,g, or c
  SITE (591): n equals a,t,g, or c
  SITE (592): n equals a,t,g, or c
  SITE (593): n equals a,t,g, or c
  SITE (594): n equals a,t,g, or c
  SITE (595): n equals a,t,g, or c
  SITE (596): n equals a,t,g, or c
  SITE (597): n equals a,t,g, or c
  SITE (598): n equals a,t,g, or c
  SITE (599): n equals a,t,g, or c
  SITE (600): n equals a,t,g, or c
  SITE (601): n equals a,t,g, or c
  SITE (602): n equals a,t,g, or c
  SITE (603): n equals a,t,g, or c
  SITE (604): n equals a,t,g, or c
  SITE (605): n equals a,t,g, or c
  SITE (606): n equals a,t,g, or c
  SITE (607): n equals a,t,g, or c
  SITE (608): n equals a,t,g, or c
  SITE (609): n equals a,t,g, or c
  SITE (610): n equals a,t,g, or c
  SITE (611): n equals a,t,g, or c
  SITE (612): n equals a,t,g, or c
  SITE (613): n equals a,t,g, or c
  SITE (614): n equals a,t,g, or c
  SITE (615): n equals a,t,g, or c
  SITE (616): n equals a,t,g, or c
  SITE (617): n equals a,t,g, or c
  SITE (618): n equals a,t,g, or c
  SITE (619): n equals a,t,g, or c
  SITE (620): n equals a,t,g, or c
  SITE (621): n equals a,t,g, or c
  SITE (622): n equals a,t,g, or c
  SITE (623): n equals a,t,g, or c
  SITE (624): n equals a,t,g, or c
  SITE (625): n equals a,t,g, or c
  SITE (626): n equals a,t,g, or c
  SITE (627): n equals a,t,g, or c
  SITE (628): n equals a,t,g, or c
  SITE (629): n equals a,t,g, or c
  SITE (630): n equals a,t,g, or c
  SITE (631): n equals a,t,g, or c
  SITE (632): n equals a,t,g, or c
  SITE (633): n equals a,t,g, or c
  SITE (634): n equals a,t,g, or c
  SITE (635): n equals a,t,g, or c
  SITE (636): n equals a,t,g, or c
  SITE (637): n equals a,t,g, or c
  SITE (638): n equals a,t,g, or c
  SITE (639): n equals a,t,g, or c
  SITE (640): n equals a,t,g, or c
  SITE (641): n equals a,t,g, or c
  SITE (642): n equals a,t,g, or c
  SITE (643): n equals a,t,g, or c
  SITE (644): n equals a,t,g, or c
  SITE (645): n equals a,t,g, or c
  SITE (646): n equals a,t,g, or c
  SITE (647): n equals a,t,g, or c
  SITE (648): n equals a,t,g, or c
  SITE (649): n equals a,t,g, or c
  SITE (650): n equals a,t,g, or c
  SITE (651): n equals a,t,g, or c
  SITE (652): n equals a,t,g, or c
  SITE (653): n equals a,t,g, or c
  SITE (654): n equals a,t,g, or c
  SITE (655): n equals a,t,g, or c
  SITE (656): n equals a,t,g, or c
  SITE (657): n equals a,t,g, or c
  SITE (658): n equals a,t,g, or c
  SITE (659): n equals a,t,g, or c
  SITE (660): n equals a,t,g, or c
  SITE (661): n equals a,t,g, or c
  SITE (662): n equals a,t,g, or c
  SITE (663): n equals a,t,g, or c
  SITE (664): n equals a,t,g, or c
  SITE (665): n equals a,t,g, or c
  SITE (666): n equals a,t,g, or c
  SITE (667): n equals a,t,g, or c
  SITE (668): n equals a,t,g, or c
  SITE (669): n equals a,t,g, or c
  SITE (670): n equals a,t,g, or c
  SITE (671): n equals a,t,g, or c
  SITE (672): n equals a,t,g, or c
  SITE (673): n equals a,t,g, or c
  SITE (674): n equals a,t,g, or c
  SITE (675): n equals a,t,g, or c
  SITE (676): n equals a,t,g, or c
  SITE (677): n equals a,t,g, or c
  SITE (678): n equals a,t,g, or c
  SITE (679): n equals a,t,g, or c
  SITE (680): n equals a,t,g, or c
  SITE (681): n equals a,t,g, or c
  SITE (682): n equals a,t,g, or c
  SITE (683): n equals a,t,g, or c
  SITE (684): n equals a,t,g, or c
  SITE (685): n equals a,t,g, or c
  SITE (686): n equals a,t,g, or c
  SITE (687): n equals a,t,g, or c
  SITE (688): n equals a,t,g, or c
  SITE (689): n equals a,t,g, or c
  SITE (690): n equals a,t,g, or c
  SITE (691): n equals a,t,g, or c
  SITE (692): n equals a,t,g, or c
  SITE (693): n equals a,t,g, or c
  SITE (694): n equals a,t,g, or c
  SITE (695): n equals a,t,g, or c
  SITE (696): n equals a,t,g, or c
  SITE (697): n equals a,t,g, or c
  SITE (698): n equals a,t,g, or c
  SITE (699): n equals a,t,g, or c
  SITE (700): n equals a,t,g, or c
  SITE (701): n equals a,t,g, or c
  SITE (702): n equals a,t,g, or c
  SITE (703): n equals a,t,g, or c
  SITE (704): n equals a,t,g, or c
  SITE (705): n equals a,t,g, or c
  SITE (706): n equals a,t,g, or c
  SITE (707): n equals a,t,g, or c
  SITE (708): n equals a,t,g, or c
  SITE (709): n equals a,t,g, or c
  SITE (710): n equals a,t,g, or c
  SITE (711): n equals a,t,g, or c
  SITE (712): n equals a,t,g, or c
  SITE (713): n equals a,t,g, or c
  SITE (714): n equals a,t,g, or c
  SITE (715): n equals a,t,g, or c
  SITE (716): n equals a,t,g, or c
  SITE (717): n equals a,t,g, or c
  SITE (718): n equals a,t,g, or c
  SITE (719): n equals a,t,g, or c
  SITE (720): n equals a,t,g, or c
  SITE (721): n equals a,t,g, or c
  SITE (722): n equals a,t,g, or c
  SITE (723): n equals a,t,g, or c
  SITE (724): n equals a,t,g, or c
  SITE (725): n equals a,t,g, or c
  SITE (726): n equals a,t,g, or c
  SITE (727): n equals a,t,g, or c
  SITE (728): n equals a,t,g, or c
  SITE (729): n equals a,t,g, or c
  SITE (730): n equals a,t,g, or c
  SITE (731): n equals a,t,g, or c
  SITE (732): n equals a,t,g, or c
  SITE (733): n equals a,t,g, or c
  SITE (734): n equals a,t,g, or c
  SITE (735): n equals a,t,g, or c
  SITE (736): n equals a,t,g, or c
  SITE (737): n equals a,t,g, or c
  SITE (738): n equals a,t,g, or c
  SITE (739): n equals a,t,g, or c
  SITE (740): n equals a,t,g, or c
  SITE (741): n equals a,t,g, or c
  SITE (742): n equals a,t,g, or c
  SITE (743): n equals a,t,g, or c
  SITE (744): n equals a,t,g, or c
  SITE (745): n equals a,t,g, or c
  SITE (746): n equals a,t,g, or c
  SITE (747): n equals a,t,g, or c
  SITE (748): n equals a,t,g, or c
  SITE (749): n equals a,t,g, or c
  SITE (750): n equals a,t,g, or c
  SITE (751): n equals a,t,g, or c
  SITE (752): n equals a,t,g, or c
  SITE (753): n equals a,t,g, or c
  SITE (754): n equals a,t,g, or c
  SITE (755): n equals a,t,g, or c
  SITE (756): n equals a,t,g, or c
  SITE (757): n equals a,t,g, or c
  SITE (758): n equals a,t,g, or c
  SITE (759): n equals a,t,g, or c
  SITE (760): n equals a,t,g, or c
  SITE (761): n equals a,t,g, or c
  SITE (762): n equals a,t,g, or c
  SITE (763): n equals a,t,g, or c
  SITE (764): n equals a,t,g, or c
  SITE (765): n equals a,t,g, or c
  SITE (766): n equals a,t,g, or c
  SITE (767): n equals a,t,g, or c
  SITE (768): n equals a,t,g, or c
  SITE (769): n equals a,t,g, or c
  SITE (770): n equals a,t,g, or c
  SITE (771): n equals a,t,g, or c
  SITE (772): n equals a,t,g, or c
  SITE (773): n equals a,t,g, or c
  SITE (774): n equals a,t,g, or c
  SITE (775): n equals a,t,g, or c
  SITE (776): n equals a,t,g, or c
  SITE (777): n equals a,t,g, or c
  SITE (778): n equals a,t,g, or c
  SITE (779): n equals a,t,g, or c
  SITE (780): n equals a,t,g, or c
  SITE (781): n equals a,t,g, or c
  SITE (782): n equals a,t,g, or c
  SITE (783): n equals a,t,g, or c
  SITE (784): n equals a,t,g, or c
  SITE (785): n equals a,t,g, or c
  SITE (786): n equals a,t,g, or c
  SITE (787): n equals a,t,g, or c
  SITE (788): n equals a,t,g, or c
  SITE (789): n equals a,t,g, or c
  SITE (790): n equals a,t,g, or c
  SITE (791): n equals a,t,g, or c
  SITE (792): n equals a,t,g, or c
  SITE (793): n equals a,t,g, or c
  SITE (794): n equals a,t,g, or c
  SITE (795): n equals a,t,g, or c
  SITE (796): n equals a,t,g, or c
  SITE (797): n equals a,t,g, or c
  SITE (798): n equals a,t,g, or c
  SITE (799): n equals a,t,g, or c
  SITE (800): n equals a,t,g, or c
  SITE (801): n equals a,t,g, or c
  SITE (802): n equals a,t,g, or c
  SITE (803): n equals a,t,g, or c
  SITE (804): n equals a,t,g, or c
  SITE (805): n equals a,t,g, or c
  SITE (806): n equals a,t,g, or c
  SITE (807): n equals a,t,g, or c
  SITE (808): n equals a,t,g, or c
  SITE (809): n equals a,t,g, or c
  SITE (810): n equals a,t,g, or c
  SITE (811): n equals a,t,g, or c
  SITE (812): n equals a,t,g, or c
  SITE (813): n equals a,t,g, or c
  SITE (814): n equals a,t,g, or c
  SITE (815): n equals a,t,g, or c
  SITE (816): n equals a,t,g, or c
  SITE (817): n equals a,t,g, or c
  SITE (818): n equals a,t,g, or c
  SITE (819): n equals a,t,g, or c
  SITE (820): n equals a,t,g, or c
  SITE (821): n equals a,t,g, or c
  SITE (822): n equals a,t,g, or c
  SITE (823): n equals a,t,g, or c
  SITE (824): n equals a,t,g, or c
  SITE (825): n equals a,t,g, or c
  SITE (826): n equals a,t,g, or c
  SITE (827): n equals a,t,g, or c
  SITE (828): n equals a,t,g, or c
  SITE (829): n equals a,t,g, or c
  SITE (830): n equals a,t,g, or c
  SITE (831): n equals a,t,g, or c
  SITE (832): n equals a,t,g, or c
  SITE (833): n equals a,t,g, or c
  SITE (834): n equals a,t,g, or c
  SITE (835): n equals a,t,g, or c
  SITE (836): n equals a,t,g, or c
  SITE (837): n equals a,t,g, or c
  SITE (838): n equals a,t,g, or c
ttgtttgtttgtttttgttttgttttgtttttgaggtgnnnnnnnnnnnnnnnnnnnnnnnnnnnnnnnnnnnnnnnnnnnnnnnnnnnnnnnnnnnnnnnnnnnnnnnnnnnnnnnnnnnnnnnnnnnnnnnnnnnnnnnnnnnnnnnnnnnnnnnnnnnnnnnnnnnnnnnnnnnnnnnnnnnnnnnnnnnnnnnnnnnnnnnnnnnnnnnnnnnnnnnnnnnnnnnnnnnnnnnnnnnnnnnnnnnnnnnnnnnnnnnnnnnnnnnnnnnnnnnnnnnnnnnnnnnnnnnnnnnnnnnnnnnnnnnnnnnnnnnnnnnnnnnnnnnnnnnnnnnnnnnnnnnnnnnnnnnnnnnnnnnnnnnnnnnnnnnnnnnnnnnnnnnnnnnnnnnnnnnnnnnnnnnnnnnnnnnnnnnnnnnnnnnnnnnnnnnnnnnnnnnnnnnnnnnnnnnnnnnnnnnnnnnnnnnnnnnnnnnnnnnnnnnnnnnnnnnnnnnnnnnnnnnnnnnnnnnnnnnnnnnnnnnnnnnnnnnnnnnnnnnnnnnnnnnnnnnnnnnnnnnnnnnnnnnnnnnnnnnnnnnnnnnnnnnnnnnnnnnnnnnnnnnnnnnnnnnnnnnnnnnnnnnnnnnnnnnnnnnnnnnnnnnnnnnnnnnnnnnnnnnnnnnnnnnnnnnnnnnnnnnnnnnnnnnnnnnnnnnnnnnnnnnnnnnnnnnnnnnnnnnnnnnnnnnnnnnnnnnnnnnnnnnnnnnnnnnnnnnnnnnnnnnnnnnnnnnnnnnnnnnnnnnnnnnnnnnnnnnnnnnnnnnnnnnnnnnnnnnnnnnnnnnnnnnnnnnnnnnntaaaattaggtgggtgtggtggtcacatctgtagtcctagctactcaggaggctgaggcgggagggatcacttgagctcaggaagttgaggttacagtgaactgtgatcatcccactaaactctagcatggatgacagaacaagaccttgtctcagaaaacaaacaagtaacaa

SEQ ID NO: 7979 - DNA, 860 bp, Homo sapiens
cctgggaggcggacgttgcagtcagctgaggtggaatgactgcactctagcctgggcgacagagtgagactctgtctcaaaaaacaaaaacaaaaacaaaatttaaaaataaattgaagtagggtacaggattttaaagtcccattatcaacacattcaactcagaatagttaatgtaacctgaatttaattacctttgattttaatttaggaatgaattttttaaaatgcatataaccagctcagggtctgtgcttcatcatcaccctggctttttttttgtgctaatttttcctcttactacttttatgagtaccagaaaattatccaaagctaagagaagaaataaaacactgtttttgctccttattaataatttgcttctaagtttttgttagagagtaggtaaaaacgtttggcaaagtagattgctcatagagtttagctatccatgctttgtttttacctttagtttagttttatggcaggggaataggacttgttgaagggagtgggaaagaagggatgcaggtcttcataataaggaatgtcggccaggcgcagtatctcacacctgtaatcccagcactttgggaggccaaggcaggcagatcactaggtcaggagttcgagaccagcctggccagcatggtgaaactccatctctactaaaaatacaaaaaattagctgggcatggtggtgcgcacctgtaatcccagccacttaggaggctgaggcgggagaattgcttgaacccaggaggcagaggttgcagcgcgctgagattgtggcactgcactccatccagcctgggtgacagagcgagactctgtctcaaaagaaaaaaaaaagaaaagaa

SEQ ID NO: 7980 - DNA, 861 bp, Homo sapiens
cctgggaggcggacgttgcagtcagctgaggtggaatgactgcactctagcctgggcgacagagtgagactctgtctcaaaaaacaaaaacaaaaacaaaatttaaaaataaattgaagtagggtacaggattttaaagtcccattatcaacacattcaactcagaatagttaatgtaacctgaatttaattacctttgattttaatttaggaatgaattttttaaaatgcatataaccagctcagggtctgtgcttcatcatcaccctggctttttttttgtgctaatttttcctcttactacttttatgagtaccagaaaaattatccaaagctaagagaagaaataaaacactgtttttgctccttattaataatttgcttctaagtttttgttagagagtaggtaaaaacgtttggcaaagtagattgctcatagagtttagctatccatgctttgtttttacctttagtttagttttatggcaggggaataggacttgttgaagggagtgggaaagaagggatgcaggtcttcataataaggaatgtcggccaggcgcagtatctcacacctgtaatcccagcactttgggaggccaaggcaggcagatcactaggtcaggagttcgagaccagcctggccagcatggtgaaactccatctctactaaaaatacaaaaaattagctgggcatggtggtgcgcacctgtaatcccagccacttaggaggctgaggcgggagaattgcttgaacccaggaggcagaggttgcagcgcgctgagattgtggcactgcactccatccagcctgggtgacagagcgagactctgtctcaaaagaaaaaaaaaagaaaagaa

SEQ ID NO: 7981 - DNA, 275 bp, Homo sapiens
cacgcctgtaatcccagcactttgggaggccgaggagggtggatcaggaagtcaggagatcgagaccatcctggctagcacagtgaagccccgttctctactaaaaatacaaaaaaagttagcagggcatggtggcgggcgcctgtagtcccagctactcaggaggctgaggcaggagaatggcgtgaacccaggaggcggagcttgcagtgagccgagatcgcgccactgcactacagcctggatgacagagcaagagtctgtctcaacaacaa

SEQ ID NO: 7982 - DNA, 361 bp, Homo sapiens
aaatagtctatttaaaaagttaaaataacaaaagaataaaaattgacagtctttttgaggctatcagatcagcaaagaaatttcccctcagttttgagtagccaggtagtgggaaacaagctcatattctattatttgaattacaagttaacatttttagatggtacttctacaaaaataaaaacatgtaaatcccctgactcagcaattcccaatttggtattttattctactgaaatacttgtagaaaatgtgctatggaaacgaaattattcaccacagttctgttcatatgtaatagcaaataactaaaatcctaaatacccttaatatgagatatagttaacagactatagtgcag

SEQ ID NO: 7983 - DNA, 1901 bp, Homo sapiens
ttattttgttaatagtttcttttgctatgcagaagctcttaataagtttaatgagatcctgatatgttaggctttgtgtccccacccaaatctcatcttgaattataatctccataatcaccacatggagagaccaggtggaggtaattgaatctgggggtggtttcacccatgctgttcttgtgatagtgaatgagttctcacgagatctaatggttttatgaggggctcttcccagctttgcctggtacttctccttcctgccgctttgtgaaaaaggtgcattgcgtccctttcaccttcttctataattgtaagtttcctgaggccttcccagccatgctgaacttcaagtcaattaaacctttttctttataaattactcagtctctggtggttctttatagcagtgtgaaaatggactaatgaagttcccatttatgaatttttgcttttgttgcaattgcttttgacatcttagtcatgaaatccttgcctgttctaagtacaggacggtattgcctaggttgtcttccagggtttttctaattttgtgttttgcatttaagtgtttaatccatcttgagttgatttttgtatattgtgtaaggaaggggtccagtttcaatcttttgcatatggctagttagttatcccagtaccatttattgaaaagacagtcttttccccatcgctcgtttttgtcagttttattgatgatcagataatcatagctgtgtggctttatttctgggttctttattctgttctattggtttatgtccctgtttttgtgccagtaccatgctgttttggttaacatagccctgtagtatagtttgaggtcagatagcctgatgcttccagctttgttctttttcttaagattgccttggctatttggcctcttttttggttccacatgaattttaaaacagttgtttctagtttttgaagaatgtcattggtagtttgatagaaatagcatttaatctgtaaattgatttgtgcagtatggccttttaatgatattgattcttcctatccatgagcatgatatgttttccattttgtttgtatcctctctgatttctttgtgcagtgttttgtaattctcattgtagagatttttcacctccctggttagttgtattttaccctagatattttattctttttgtgaaaattgtgaatgggattgccttcctgatttgactgccagcttggttactgttggtttatagaaatgctagtgatttttgtacattgattttctttctaaaactttgctgaagttttttttattagcagaaggagctttggggctgagactatggggttttctagatatagaatcatgtcagcttcaaatagggataattttacttcctctcttcctatttggatgccctttatttctttctcttgcctgattactctggctgggatttcctatgttgaataggagtcatgagagagggcatcaaatctacacatatcaaatactaaccttgaatgtaagtgggctaaatgccccacttaaaaggtaaaggggggcaagctgaataaaaaagcaagactcaatggtatgctgtctttgagacctatctcacatgtgatgacacccataggctcaaaataaaggaatggaggaaaatctaccaagcatgtagaaaacagaaaaaagcaggggttgcatcctaatttcagaccaaacagacttcaaaccaacaaagttcaaaaaagacaaagaaggggccgggagtggtggctcacacctgtaatcccagcactttgggaggccaaggtgggtggattaccaggtcaggagatcgagaccatcctggccaacattgtgaaaccccatctctactaaaatccaaaaaaaaaaaaaaaaaaaa

SEQ ID NO: 7984 - DNA, 2524 bp, Homo sapiens
ttattttgttaatagtttcttttgctatgcagaagctcttaataagtttaatgagatcctgatatgtttaggctttgtatccccacccaaatctcatcttgaattataatctccataatcaccacatggagagaccaggtggaggtaattgaatctgggggtggtttcacccatgctgttcttgtgatagtgaatgagttctcacgagatctaatggttttatgaggggctcttcccagctttgcctggtacttctccttcctgccgccttgtgaaaaaggtgcattgcatccctttcaccttctcctataattgtaagtttcctgaggccttcccagccatgctgaacttcaagtcaattaaacctttttctttataaattactcagtctctggtggttctttatagcagtgtgaaaatggactaatgaagttcccatttatgaatttttgcttttgttgcaattgcttttgacatcttagtcatgaaatccttgcctgttctaagtccaggatggtattgcctaggttgtcttccagggtttttctaattttgtgttttgcatttaagtgtttaatccatcttgagttgatttttgtatattgtgtatggaaggggtccagtttcaatcttttgcatatggctagttagttatcccagtaccatttattgaaaagacagtcttttccccattgctcgtttttgtcagttttattgatgatcagataatcatagctgtgtggctttatttctgggttctctattctgttctattggtttatgtccctgtttttgtgccagcaccatgctgttttggttaacatagccctgtagtatagtttgaggtcagatagcctgatgcttccagctttgttctttttcttaagattgccttggctatttggcctcttttttggttccacatgaattttaaaacagttgtttctagttttgtgaagaatgtcattggtagtttgatagaaatagcatttaatctgtaaattgctttgtgcagtatggccttttaatgatattgcttcttcctatccatgagcatgatatgttttccattttgtttgtatcctctctgatttctttgtgcagtgttttgtaattctcattgtagagatttttcacctccctggttagttgtattttaccctagatattttattctttttgtgaaaattgtgaatgggattgccttcctgatttgactgccagcttggttactgttggtttatagaaatgctagtgatttttgtacattgattttctttctaaaactttgctgaagttttttttattagcagaaggagctttgcggctgagactatggggttttctagatatagaatcatgtcagcttcaaatagggataattttacttcctctcttcctatttggatgccctttatttctttctcttgcctgattactctggctgggatttcctatgttgaataggagtcatgagggagggcatcaaatctacacatatcaaatactaaccttgaatgtaagtgggctaaatgccccacttaaaaggtaaaggggggcaagctgaataaaaaagcaagactcaatggtatgctgtctttgagacctatctcacatgtgatgacacccataggctcaaaataaaggaatggaggaaaatctaccaagcatgtagaaaacagaaaaaagcaggggttgcatcctaatttcagaccaaacagacgtcaaacaaacaaagttcaaaaaagacaaagaaggggccgggagtggtggctcacacctgtaatcccagcactttgggaggccaaggtgggcggattacaaggtcaggagatcgagaccatcctggccaacattgtgaaaccccatctctactaaaatccaaaaaaaaaaaaaaaaaataagctgggcttggtggtgtgtgcctgtagtcccagctactcgggaggctgaggcaggagaatcacttgaacccgggaggcggagattgcagtgagctgagattatgccactgcactatagcctggcgacagagtgaggctccgtctcaaaaaaaaaaaaaaaaaaaaagacgaagggcattacataatgatgaagggttttactcaacaagaagaccttactaacctaaatatatatgcacccaacacaggaacacccagattcataaagtaagttcttagagtacaaagaggctcccacacaataatagtaggagactttaacacaccactgatagtcatagacagatcatcaaggtagaaaattaacaatgatattcaggatctgaacccaacattccaccgaatgagtctgatagacatctacagaactctccatccaaaaacaacagaatatacattcttctcatctccacatggcacatgctctaaaattgaccacataatgcctttcttttcagtggtccatatgtaagtcttttgaaagtggcagcatctctactgctcatgcttgttgcaaggaactctactgaatacaaggaactttactaatctctaatgct

SEQ ID NO: 7985 - DNA, 2527 bp, Homo sapiens
ttattttgtcaatagtttcttttgctatgcagaagctcttaataagtttaatgagatcctgatatgtttaggctttgtatccccacccaaatctcatcttgaattataatctccataatcaccacatggagagaccaggtggaggtaattgaatctgggggtggtttcacccatgctgttcttgtgatagtgaatgagttctcacgagatctaatggttttatgaggggctcttcccagctttgcctggtacttctccttcctgccgccttgtgaaaaaggtgcattgcatccctttcaccttctcctataattgtaagtttcctgaggccttcccagccatgctgaacttcaagtcaattaaacctttttctttataaattactcagtctctggtggttctttatagcagtgtgaaaatggactaatgaagttcccatttatgaatttttgcttttgttgcaattgcttttgacatcttagtcatgaaatccttgcctgttctaagtccaggatggtattgcctaggttgtcttccagggtttttctaattttgtgttttgcatttaagtgtttaatccatcttgagttgatttttgtatattgtgtatggaaggggtccagtttcaatcttttgcatatggctagttagttatcccagtaccatttattgaaaagacagtcttttccccattgctcgtttttgtcagttttattgatgatcagataatcatagctgtgtggctttatttctgggttctctattctgttctattggtttatgtccctgtttttgtgccagcaccatgctgttttggttaacatagccctgtagtatagtttgaggtcagatagcctgatgcttccagctttgttctttttcttaagattgccttggctatttggcctcttttttggttccacatgaattttaaaacagttgtttctagttttgtgaagaatgtcattggtagtttgatagaaatagcatttaatctgtaaattgctttgtgcagtatggccttttaatgatattgcttcttcctatccatgagcatgatatgttttccattttgtttgtatcctctctgatttctttgtgcagtgttttgtaattctcattgtagagatttttcacctccctggttagttgtattttaccctagatatttttattctttttgtgaaaattgtgaatgggattgccttcctgatttgactgccagcttggttactgttggtttatagaaatgctagtgatttttgtacattgattttctttctaaaactttgctgaagttttttttattagcagaaggagctttggggctgagactatggggttttctagatatagaatcatgtcagcttcaaatagggataattttacttcctctcttcctatttggatgccctttatttctttctcttgcctgattactctggctgggatttcctatgttgaataggagtcatgagagagggcatcaaatctacacatatcaaatactaaccttgaatgtaagtgggctaaatgccccacttaaaaggtaaaggggggcaagctgaataaaaaagcaagactcaatggtatgctgtctttgagacctatctcacatgtgatgacacccatcggctcaaaataaaggaatggaggaaaatctaccaagcatgtagaaaacagaaaaaagcaggggttgcatcctaatttcagaccaaacagacgtcaaacaaacaaagttcaaaaaagacaaagaaggggccgggagtggtggctcacacctgtaatcccagcactttgggaggccaaggtgggcggattacaaggtcaggagatcgagaccatcctggccaacattgtgaaaccccatctctactaaaatccaaaaaaaaaaaaaaaaaaaataagctgggcttggtggtgtgtgcctgtagtcccagctactcgggaggctgaggcaggagaatcacttgaacccgggaggcggagattgcagtgagctgagattatgccactgcactatagcctggcgacagagtgaggctccgtctcaaaaaaaaaaaaaaaaaaaaagacgaagggcattacataatgatgaagggttttactcaacaagaagaccttactaacctaaatatatatgcacccaacacaggaacccccagattcataaagtaagttcttagagtacaaagaggctcccacacaataatagtaggagactttaacacaccactgatagtcatagacagatcatcaaggtagaaaattaacaatgatattcaggatctgaacccaacattccaccgaatgagtctgatagacatctacagaactctccatccaaaaacaacagaatatacattcttctcatctccacatggcacatgctctaaaattgaccacataatgcctttcttttcagtggtccatatgtaagtcttttgaaagtggcagcatctctactgctcatgcttgttgcaaggaactctactgaatacaaggaactttactaatctctaatgct

SEQ ID NO: 7986 - DNA, 247 bp, Homo sapiens
tgaaattatatttcattgtggttttaatttgcatttctctaatgatcagtgatattgagtttgttttttttcacatgcttgttggctgcatgtatgtcttcttttaaaaagtgtctgttcatgtactttgcccacattttaatggggttgtttttctcttgtaaatttgtttaaattccttataggtgctggattttagacatttgtcagacgcatagtttgcaaatagtttctcccattctgtagg

SEQ ID NO: 7987 - DNA, 129 bp, Homo sapiens
tggtgtgtgcctgtagtcccagctactcgggaggctgaggcaggagaatcacttgaacccgggaggcggagattgcagtgagctgagattgtgccactgcactatagcctggcgacagagtgaggctcc

SEQ ID NO: 7988 - DNA, 401 bp, Homo sapiens
aatttgataaaaatatttccatgaaattttttgtgtagtgttctaaaacttgaaattagactacattagttgatagtattattagaatcttccaaatccttactaatttttatatgttcatctattgtttattttgagccgatgattaaaatcttcaactatgagtgaaagtctatttctctgtttagttctgtctgtttttacttcatgcattttgacactctgttatcagttgtataaacattgagaattataatgcattgctaatgagcttaaccttttatcattccatctctgatatttcagcttattttgaatcctactttctctggtattagccagctacatcagttttacttcctttcattttcaaccaattttatgactccatctcaaaaaaa

SEQ ID NO: 7989 - DNA, 248 bp, Homo sapiens
tgaaattatatttcattgtggttttaatttgcatttctctaatgatcagtgatattgagtttttttttttttcacatgcttgttggctacatgtacgtcttcttttgaaaagtgtctgttcatgtactttgcccacattttagtggggttgtttttctcttgtaaatttgtttaaattccttataggtgctggattttagacatttgtcagacgcatagtttgcaaatagtttctcccattctgtagg

SEQ ID NO: 7990 - DNA, 249 bp, Homo sapiens
tgaaattatatttcattgtggttttaatttgcatttctctaatgatcagtgatattgagttttttttttttttcacatgcttgttggctacatgtacgtcttcttttgaaaagtgtctgttcatgtactttgcccacattttagtggggttgtttttctcttgtaaatttgtttaaattccttataggtgctggattttagacatttgtcagacgcatagtttgcaaatagtttctcccattctgtagg

SEQ ID NO: 7991 - DNA, 434 bp, Homo sapiens
aatttgataaaaatattttcatgaaattttttgtgtagtgttctaaaacttgaaattagactacattagttgatagtattattagaatcttccaaatccttactaatttttatttgttcatctattgtttattttgagccgatgattaaaatcttcaactatgagtgaaagtctatttctctgtttagttctgtctgtttttacttcatgcattttgacactctgttatcagttgtataaaaacattgagaattataatgcattgctaatgagcttaaccttttatcattccatctctgatatttcagcttattttgaatcctactttctctggtattagccagctacatcagttttacttcctttcattttcaaccaattttatgactccatctcaaaaaaaaaatgcattcattatacagagcatatagttt

SEQ ID NO: 7992 - DNA, 2802 bp, Homo sapiens
tcagatgtggtggaagtcaggctggccaacaggaccggaggtctggaggtgctgctgaaccaggaggtgctgagcttcaccgagcagagctggatggacctgaaaggtgagcagtccagccacgcgaggctgcgggctgccctcacctcctccccattcctgcagggagactgaggggaagccctgggccttcatgcctctcccagtcctggctagaggcctgggtggtccgacctcaggccttcacacccaccgaggtgcccccgtcgtacccacctggtcaaaagccgagaggccgtgacggtgggacatgtcctccctacggaggatcccgggagccttctggaggggaactcaccctggtaacgttcaccgctggcctgcacagagccactcctgtgctcctgtcactccctcagtcctcaaaagccactgcaaggtctccagccctgcacggttaaggatgcccctggcaagtggtagctccacatctgaaccccttgcctcagggaactgagtcaatgaaaggattcctggttgggatgggtgaggacctgggaggggcctgtcagcactgagggttcagggaccctcgggacgtgcccaggcaggtgtggctgctgcagccaaggccagagggacccacacgtgcatctcaacatgggggattcactgcaggggctgcacctcaggtgccgctgggagttccaccgcaagcatggcaggggtggcggagggtcatggtcagcagaattggccccgggaacgccctcccttcccctgcaggtgccctcacccacagcccctgggtgccgaccaccctgtcctggggctgcgggaggggacaagatgctcacagcgggtgaccctaatgcatcccccttgagcccaggaatgttcctgtcggtggctgccggggacagggtctccatcatgctggcatcaggggccggcctggaggtcagcgtgcagggcccgttcctgagtgtgtccgtcctgctgcctgagaagttcctcacccacacccacggcctcctcgggacactcaacaacgaccccaccgacgacttcaccctgcacagcgggcgcgtcctgcccccaggcaccagtccccaggagctgttcctgtttggggccaactgtgagtgaccgtggagtatatggggcagacggggtgggggttactggaaacatggcacgggcagggcttggggaccaaagggagccatgcccagccaggccccggtcatgtatcttccagggaccgtgcacaatgcgtcctccctgctcacctacgattcctggttcctggtccacaacttcctgtaccaacccaagcacgaccccaccttcgagcccctcttccccagtgagaccaccctcaaccccagcctggcacaagaggcagccaaactatgtggggacgatcatttctgcaactttgatgtggcagccactgggagcctgagcacgggcactgccactcgggtggcccaccagctgcaccagcgtcgcatgcagagcctgcagccaggtgagggcgggcaggtgggggtgggcggggagctgggacaggaccccccggggtggccagatgtgtgtatgcatggcagctcaggcctgttgtctgcactctgtccccatcccagtggtgtcctgtggctggctggccccacctcccaacggacaaaaggagggcaacaggtacctggcgggttccaccatctacttccactgtgacaacggctacagcctggccggggcagagaccagcacctgccaggctgacggcacctggtcctcacccaccccgaagtgccagccaggtgaggacactctgctcatacacctgcctgcacctgtccccactcaccaccccagagagccccctcactgacactcgctccctcaccaggacgcagctacgcggtgctgttgggcatcatctttgggggcctcgcggtggtggcggcggttgcgctcgtctatgtgctgctgcgccgcaggaagggcaacacgtgagaccccccagcccctctcccaagaccccgagacagccggtgggaccaccgaggctacttctaactgcgtttctgttgcaggcacgtctggggtgcacagccctgatgggagcagcttggctgtgagcaccaggccaagactcctgagaacaggcagcccagtcctgcgactcccgcatccccaggaccagacacctgggacctggatacttgatacctgggcatttaaccccctactctgtcatctcagaccccaggcaggaggcccagtgttccaacacccaagccccgtgctagcagcgctccgtgctcttccccaaatactcacggctctaattccccaaacctgaaacttcataccctgggattctaatacctatgtcctgagccctgacactcccacacctgagcctcagattccaatagctcactccctagagcctgacgccggggcccctgacccctgagcctcagattccaatacctcactccccagagcctgatgccggggcccctgacccctgatctacggaggcctgctcccggaccgtgcgggcaccagtgcagtgctgccttggttcctggacccctgggcccatcctgggaccccagatggggtaaggagaggccccagaaccccaaagcagacagcgagacccccagcggcagaggcctccctcggcactccaggcttataatttcgaactcttctggaaggtcactcaggaacaccctccctgcctgtgcaaagagaaaacaagcgccttgtttccttccctgg

SEQ ID NO: 7993 - DNA, 4250 bp, Homo sapiens
catgaagccagccctcctgccctgggccctgctgctgctggcgacagccctcggcccgggccccggacccacagcaggtatgcctccctgcccttctgtgtccccgtctgtctgtccatctgtctgcagccaggcctgggctgacatccctctgggctcagcctctgtccatctgtcaggccatctgtggctgtgctaggggtgatgggaagaaattctgagggtccatgtggaggggcagcccatggggatgggaggtctgagccgggcccaccctaaacctgctggtagctaggagggaggcgggggagaccagcagaggcctccgcctgtgtccccagccctgacagggcgggatcacggagggggagccaggattgtgggtcctcatcagggtggggctgaatccaggaaagtctagggaaagccccgaactccagaaccaggacactggtcccaggctgccccccgtcccccaccccatttcccatcgaccctcttgccacttatctcacttgcaagcatctctcggcctcctcccccgacccctgtgcgccaccaaatccttggccagtacatatttattgttgcttttaagtgccaggcactgcacttggtgaagtggggccagcggggtggctcaggcccaggcctggccctcgactggcctcttttgatgggggatggggaagggccagggaagtgcaattccagcctgggtgcatgcacctgccccagtccctccctgcaacccttccttcatgccagcccctggaaatatggccttgcccaccggtcttatggcccataggagaagttttgggcccggcgcccacagccccttgtggtgtgcacccccacttccctttccccactgctgggacccctgcttgaaatgtccctcctctccccagaaaggaggggagcggccctggccttctgccctgagcacggagctctctttggggtctcaattgcagcccctgggagagcgagaagtgtcacgttcagaccctgcaccattccctaccaggcctcaaatgagactcttggcagccatatcccccaccccagtccaggcaagcaagaggggttcttctgcaggcttcagggcccccagaaggcgtgctgaccacagacaccctggggagccaagagaggtcgagggctccagctaccgtggcccactgaggacccctgcctgtgggatagaggacttggtggctgaagggcagtcatgcccaggggcttctcctgaccctgcagggctgagcggatgcagctttttgcctcttctcgctgcattctagcccgtcagtcagggcaacagccagatggtctgtgctaagattcatcccatccccacgggccctgtggctttctactgtgtccacctggtggcctgtgcagttcctggccagcgttctcctggggatgctgctgtctaatgggctgtgggagaaacagagacaggccctgcacatggggcagccagtccagtacccgccgggccaggccctcagcatcctctcctccagatgcccaagagagctgctccatgcgctgtggcgccctggacgggccatgttcctgccacccgacgtgctctggccttggcacctgctgcttggatttccgggacttctgcctggagatattgccctactcaggatccatgatgggcggcaaggactttgtggtgcggcacttcaagatgtccagccccacagacgccagtgtgatctgcaggttgggaggcccaggaggccgggcactggggccccacgcccccatccctgtgcatgctgagggctcagacccactgactggctgagtggagcccctcggacccaggacaggcaggagggcacagggacagctggctggttgggttccccagggaggttgggggcccagaccatcgagaggctcagcctgcaatgacccagcccctcccaccaccaccacgcccacaggtttaaggacagcatccagaccctcggccatgtggactcctccgggcaagtgcactgtgtgtcacctctgctctatgagagcggccgcatccccttcactgtgtcactggacaacggccactccttccctcgtgcgggcacctggctggctggtgagccctcctccctgcccacagcctgcccccacggggactttccccagcgctaatctatgcacaccgagacttggcctgtccgtgccctgcctctctggctgaaccagtcccttgggaggcctgcccgcctgcgagagttccttcagctcctttccactccctggcatccagaccgcggtcccagcccagagtgagtgggagctgcaggggtccctagagaggtgggccagtgcctatccactgagctccgccatgccagggcaggggagaagccaggtcgaggctagaggcgtgggcagtggagggagggcaggcccctgcctctgcggcctcagcgtccttttctgctgtgcgggccagagagaccatcacccagctgctgccatgcattggccctggaggctcccacagcccttgaagcctcagggcctcctccctgcttccctgggcccaggccctcactcacccctcacctcccctgcccagtgcaccccaacaaagtgtcaatgatggagaagagcgagttggtgaacgagacgcgttggcaatactacggcaccgccaacacctcaggcaacctcagcctgacctggcatgtcaagtcgctgcccacgcagaccatcaccatcgaactgtggggctacgaggagacaggtgaggccagctgagggctggggtggcatcagagctttgggcccccagagggggagaaagggggtcccagctgtgtgggaggaggaagggagtttccaggtggggttgaggagggaagggaattccaggcagagattgaggattcggatggagggaagtgcaggtcaggggggtcaggcaggtgggagggggcagctcatggggcctggctccaggggaggaggctcatgaggaacccctgcacggctggcatggccctgggcccagcttccagcagggacagggatcctggagtgtggcaggaggtgatggtcacccaagccggggtccctgctagaacagcccctcctaaggggaccgcctggcggtccatccacccatctgtcaggctgctgtaggtggcaaggcctggggccaggcctcgaaggaaccccagggctaaccaggcatcctctccctcaggaatgccctactcacaggagtggactgcaaagtggtcgtacctgtaccccctggccacacacatccccaactccggctctttcactttcaccccaaaacctgctcctcccagctaccagagatggcgagtgggtgcacttcggatcatcgacagcaaaaattacgcagggcagaagtaagaaggcatggatgtgcaggtgatggctggagggcctcgccgcccgaggcccatcatgcttgcctgggcagcccaggctgggggtggggagagtggggcgaccatggggtggtgtgggctggcccagctccagcatcatcacctccacagggacgtgcaggcgctctggaccaacgaccacgcactggcctggcacctgagcgatgacttccgagaggaccctgtggcctgggcacgaactcagtgccaggcctgggaggagctggaggatcagctgcccaacttcctggaggagctgccggactgcccctgcaccctgacccaggcccgggctgactccggccgcttcttcgtgagcctcccatcagggcccaggagaggggatgaggggttagcctccccactgaggacagcaccaggggaggcagacagaggtgtcctggagggtggggctggggtctcaggacccctgcagggttggcctcagggaggggatgacagaacccgaggccactgggtgacagccacctgctgctctgcagacggactacggctgtgacatggagcagggcagcgtgtgcacctaccaccccggggccgtgcactgtgtgcgttctgtgcaggccaggtgagcccccaggctggggccggtatggggattggggtcaggggtgggctcccaacagtggcctggccctgactcactggctcctgcagcctccggtacggctcaggtcagcagtgctgctacacagcggacgggacgcagctcctgacagctgactccagcggcggcagcactcccgaccgcggccatgactgggg

SEQ ID NO: 7994 - DNA, 734 bp, Homo sapiens
  SITE (648): n equals a,t,g, or c
  SITE (697): n equals a,t,g, or c
tagtccagttaaatctttggtttcagtagtgtctgaatagtacagtgagacgttaatttctgctcaagtggtaccacttaaaggcatgtattcttttagtatgtaaaatgaaatagtaccttgagtttaaatagaatgcatttaggcattgtagagatctgaaatagttttcttccactacattgttgaaatcaatgaagcaattagtttctcattcagaaatgtgcacactaatatttagttttgctttctcgtggataatattaagcacttactctgcagtttcctggaagttgtgtcaactgcagtgatactattcaggatggtgggaaatccccaaaaatatgtatgtgtgggcttgcttagattactatatttcatagttaatcttttgtctcttgcggtgctcatgatgtgtggggcacacggaaggcattgctgtagtcagtcattttggttttcttctatagccattttattattttagtgtattagttatgaagataatattatctatttgtaaattgctactttgtattttatgcatgctctgtaatttgatttttttttagttattgatttggattatattcacattctaataaacagttatagggggattatttcttatgctgtcagattacattnttcctttgagtgctttgggtgcagccgtggaatcctgatgtaaagcatnaggtcttgcatactgagtaacattgaaatggagcatc

SEQ ID NO: 7995 - DNA, 1077 bp, Homo sapiens
ttaaaggtggaagggccaaatttgaaagtgttaatttgtcttaaccccttcccagtaagtgaactccacccttatttttatctccaatatccaccagcaggcatggataattattttaccaatgctaatatttgagttttgcagtatattatagaatatagtccagttaaatctttggtttcagtatgtctgaagagtacagtgagaggttaatttctgctcaagtggtcccacttaaaggcatgtattcttttagtatgtaaaatgaaatagtaccttgagtttaaatagaatgcatttaggcattgtagagatctgaaatagttttcttccactacattgttgaaatcaatgaagcaattagtttctcattcagaaatgtgcacactaatatttagttttgctttctcgtggataatattaagcacttactctgcagtttcctggaagttgtgtcaactgcagtgatactattcaggatggtgggaaatccccaaaaatatgtatgtgtgggcttgcttagattactatatttcatagttaatcttttgtctcttgcggtgctcatgatgtgtggggcacacggaaggcattgctgtagtcagtcattttggttttcttctatagccattttattattttagtgtattagttatgaagataatattatctatttgtaaattgctactttgtattttatgcatgctctgtaatttgatttttttttagttattgatttggattatattcacattctaataaacagttatagggggattatttcttatgctgtcagattacatttttcctttgagtgctttgggtgcagccgtggaatcctgatgtaaaagcataggttcttgcattactgagtaaacattgaattgggagcatcagtgtgtgaattcagctttgattttagaactgcagttcaattatgctttccttggaaaaagtatgtccaaaaacattaggaaagtagtgtgtattttcatatataacagtgtcaccagacccaggaaaagaaaccatctctattttattgaaagttggtggtagatttttcacaaagtaagg

SEQ ID NO: 7996 - DNA, 4925 bp, Homo sapiens
gggcttggctccccgcggcacgggatttagcgttcgcgctccttcccttcccgtggtcgagccgagtgagtcccgagctagggcgcctggtgcggaggtgccggagtggcgctggggcgggcaggggcggtgccgtggttctgagaggccgcaggtcgggccccgcggcctcagtgacccgtagaggacgcgtcgagggcggctgcggggtgctgagcgcccgctttgtgttggccgaggcgcgggcagggcgagggtggcgtgaggcacgagcggaggcagcggggcgtgcaggtctacgggctgtcatccacgctcccgagcaacactgaggcagggaagccagatgggtaaaaagatctcgcagaggaagggagtttgggcaatgtcaggggatgagctgaattgtgctttttttttttcagaagagagaaaagtgcatttcatttagcaggaatgtattgattgaaagggtaaagctgtgagagctgtggtgtgaaggagcttctgttttggggaaggaaaggaataggcaggaggtgatatctcacagatgcgctggaacaagctcaacactcattcatttagtaggcactcggtaaatgctgacttactgattaggacaattgagacttagtattgtttgcggtttgctaatactgtgctgagcattttatacatattctcatttaacgcaatatagtcacttaaggagtagtgtcaatctcattttatggtctgtggaaaaactcaagtcacttacctgagacctctgcatgagtaagtggtggatccaaggttagaactcagtcctattcgagtccagagcccatgcgcctaatagcagcattacatgcctgccacatgcgtttaggagtgaaggcagagtacactaagaggtaccgcttgtgattcacaaagggcataagcagcaggggccagtcaaaggcaagccctgtctgaggactggaagattccctctggccaaggtgtgcctcagctggagactgtgaagacatcaatgagcttatgttcagctgccagtcagaaagtctgtccaacgaaggcttaaatgatgatgagacagggtttgttccagagtttgttgtgaaatgccagggctctagaacgtgtctccaacgttctcttggctttcctttgtggtcactccattccccttatttcctttcagatgcctcttggcaaacttcccttaacatcttggtgacgagaactgggccttgcggtcacctagagcggaaggaaaagggcgcatttcctcctgaactaaactaaggaatttgtttatgtgtagagggctgtggggaggtgacttgttgtgtatgctgaggccaattgggaaggcttttgtgggagtgacacatatcactgctaaaataaaaccagatttgtggttttagatgtcatctgtgtactgacagttttcagtatatacccagccagcccaacctcactcctgaattttcaacttgtatatccaaatgccctaattttccatttataaatctaataggtatcttaaacattactgtatacaagacaacttttacatttaatctttttgcagtcttactcttttgagtatatggaaatttcataatttcagttgctcaggccaaaaatcttggtgtctcgtcctacatgaaattcatctgcaaatcctattgatggtacctttgaaatgtatccataatctggctgctttttgtcacttctgccaccaccagtctggtccaggacattcatctctagctggattgttgctagaaccttctgactggtttcctgtttttgttccttacccccaccccatagtctattcaaagcaccctcaaagcagcagctgtagagaccacatctgaggtcatatgactcttcccagacattccaggcacttcccatccattcagaataaaacccattgccctaaggcttacaaggtacccaccccagagggtacccacctcttttaccctcccctagtctgtttgagcccctctggcttctttgcccgttcttgaacacaggtgtgcttgcatctcagagcctttgcacttgtgccctcctcctgcctgggatgtacctcactgataaccacatggtgcctaccctcactccatccagatctctgatttgttgtcactttatcggaggtgtcttccctggccatcctgtgtaaaatatctcttaccaccagtcgctgccctcgtgctgcgtcattaattttttgtatcctttgtcattacctgacaccacctgggcgttgtgtctgtgtgtcatgcatatgtgttaacttctccatttgctcattcgctgccttagcaccagagcctggtccgctgttctcagctgtttgccgtctgcgcaggacctcataggtgggcctgggaaacgcagtccattgtctctcctggccaagtgcactgccacagtcctggctttcacatggtggcctcaggatgctgtcatcccaggggcctcaggaaggcctctcttgagacatggagaggtatggcagaaaattagggaggggatatggtctcagagaccactggctacttagttcatccacctttcctggggtgttcaggcagctcataattgggtctctgctaccacaaaatgtctaggcttagaagtctcagagcacctatggggagcagaaggttggtcaggctccatcaccctcctctccctacagctctgcccacacctcaggacaagctcagagacctagtgatggctgtcatgcagctccttcttggtgggctccaagtgagtggtcctcatggagtctcttccatgtgacctcagccttttctcagcaggagtctgtctataaggagctggtcccagagggtggacagctccctgtctccaccgatgtcctcagttcctgagttcaagtccctgaaatgtacttctcactgttttactgtccctggaccaggtacagtagaggtcagagttggggcacaccaagatgagccaatatagtgtctgcctcaaagagttcacattagtggggaagacaggtacatgttcccagagggattttaccagtcctgagcctaatatcttctccctccaggtcctgacctgagggctgcatcaagatcttgtcattccacatcgtggtttcctttgaggatgtggctgtacccctctcccaggaggagtgggactgtctgatccctgctcagaggggcctctacaaggatgtgatgatggggacctatgggaacctactctcattaggtaagttccctccctggggctcagctcctgggcttcctgctccttaaccttgaggatcaagcttggggctcagaggctcctcaccccctgggcccaaagaccagacattttgaccatggtaccatgcaggtctggtttgcacagagagggggacaggtggtactgggaccctccttgatttttttttttaataggcaatgtctcactctgttgcccatcctggagtgcagtggtgagaccatagctcactgtaaccttgacgtctttggttgaagagatcctcctacctcagcctcccaagtacctgagactacaggcatgggccaccatgcctgtcttattttacttttttagagacagagcctctgtgttgcccaggttggtctcaaactcctagcctcaaggaatcctcccaccttggcctcccatgcctttccaaccctccctgatttatagaaggagaatattattcattgcacacctagtacctccctatcccctgaattaatctttctgcatcttgatgatcggtggtaggatacacagtttataaacgaacctgaggctaacaaatactgtcacttttcttaagtttacacagcctattggtggcagatctgggatatggatctgttcggtttcagagccctgctttcctttcactggaatgtgctcttcgctttagcccttttttttttttttttttggtttctgctagcctttatttgagaaaatttacacaaaaatccccaatgcaacatttacaagtgaatctgtataaatcccatatgcctctttcccaaactgaaaaatggctttatgacaggggtccatgacaatggtataaaaatacttacttaaactgcatcattctcatttatattatacagaccattttggataatatgctcaaaagtggaggaaagcacataacacccctgtttttaaagattatttgctcttgtatcagtcttttgtcaaaggcaaatacttttacttcttggataaaaccaaggtataatatcaattaacttttaaaccaaaagcacaaaatgtcctagttgatagttttggcatgagtaaagggaagggacatgagagaacatcagctcctacaaagcttaagtttagggtcacacttgggaacaaaagcatcaacaaaacaaaatattctcttctcctatcttcttgacattttgtcacatcagaagaacataactaacagagtagctttcattgctcctgaaaaggggaaaggcaccagtcagaaataggaaagaaaatcttgttaggttaatggtacatgataaaatttcacattaaaaagtttaatgatggaggatgggcgtattggcttacacatgtaatcccagcactttgggaggctgaggtcagtggatcacttgaggtcaggagttcaagaccatcccggccaacacggtgaaactccatctctaccaaaaatacaaaaaccagccaggtgtggtggcatgcacctgcactcccagccactctggaggccgaggcggaagaactacccgaacccaggaggtgaaggttgcagcaagctgagatagcaccattgcacttcagcctgggcatcgcagcaagactctgtcccaaaaaaaaaaaaaaaaaaaaaaaaa

SEQ ID NO: 7997 - DNA, 10920 bp, Homo sapiens
gggcttggctccccgcggcacgggatttagcgttcgcgctccttcccttcccgtggtcgagccgagtgagtcccgagctagggcgcctggtgcggaggtgccggagtggcgctggggcgggcaggggcggtgccgtggttctgagaggccgcaggtcgggccccgcggcctcagtgacccgtagaggacgcgtcgagggcggctgcggggtgctgagcgcccgctttgtgttggccgaggcgcgggcagggcgagggtggcgtgaggcacgagcggaggcagcggggcgtgcaggtctacgggctgtcatccacgctcccgagcaacactgaggcagggaagccagatgggtaaaaagatctcgcagaggaagggagtttgggcaatgtcaggggatgagctgaattgtgctttttttttttcagaagagagaaaagtgcatttcatttagcaggaatgtattgattgaaagggtaaagctgtgagagctgtggtgtgaaggagcttctgttttggggaaggaaaggaataggcaggaggtgatatctcacagatgcgctggaacaagctcaacactcattcatttagtaggcactcggtaaatgctgacttactgattaggacaattgagacttagtattgtttgcggtttgctaatactgtgctgagcattttatacatattctcatttaacgcaatatagtcacttaaggagtagtgtcaatctcattttatggtctgtggaaaaactcaagtcacttacctgagacctctgcatgagtaagtggtggatccaaggttagaactcagtcctattcgagtccagagcccatgcgcctaatagcagcattacatgcctgccacatgcgtttaggagtgaaggcagagtacactaagaggtaccgcttgtgattcacaaagggcataagcagcaggggccagtcaaaggcaagccctgtctgaggactggaagattccctctggccaaggtgtgcctcagctggagactgtgaagacatcaatgagcttatgttcagctgccagtcagaaagtctgtccaacgaaggcttaaatgatgatgagacagggtttgttccaaattttgttgtgaaatgccagggctctaaaacgtgtctccaacgttctcttggctttcctttgtggtcactccattccccttatttcctttcagatgcctcttggcaaacttcccttaacatcttggtgacaagaactgggccttgcggtcacctaaagcggaaggaaaagggcgcatttcctcctgaactaaactaaggaatttgtttatgtgtagagggctgtggggaggtgacttgttgtgtatgctgaggccaattgggaaggcttttgtgggagtgacacatatcactgctaaaataaaaccagatttgtggttttagatgtcatctgtgtactgacagttttcagtatatacccagccagcccaacctcactcctgaattttcaacttgtatatccaaatgccctaattttccatttataaatctaataggtatcttaaacattactgtatacaagacaacttttacatttaatctttttgcagtcttactcttttgagtatatggaaatttcataatttcagttgctcaggccaaaaatcttggtgtctcgtcctacatgaaattcatctgcaaatcctattgatggtacctttgaaatgtatccataatctggctgctttttgtcacttctgccaccaccagtctggtccaggacattcatctctagctggattgttgctagaaccttctgactggtttcctgtttttgttccttacccccaccccatagtctattcaaagcaccctcaaagcagcagctgtagagaccacatctgaggtcatatgactcttcccagacattccaggcacttcccatccattcagaataaaacccattgccctaaggcttacaaggtacccaccccagagggtacccacctcttttaccctcccctagtctgtttgagcccctctggcttctttgcccgttcttgaacacaggtgtgcttgcatctcagagcctttgcacttgtgccctcctcctgcctgggatgtacctcactgataaccacatggtgcctaccctcactccatccagatctctgatttgttgtcactttatcggaggtgtcttccctggccatcctgtgtaaaatatctcttaccaccagtcgctgccctcgtgctgcgtcattaattttttgtatcctttgtcattacctgacaccacctgggcgttgtgtctgtgtgtcatgcatatgtgttaacttctccatttgctcattcgctgccttagcaccagagcctggtccgctgttctcagctgtttgccgtctgcgcaggacctcataggtgggcctgggaaacgcagtccattgtctctcctggccaagtgcactgccacagtcctggctttcacatggtggcctcaggatgctgtcatcccaggggcctcaggaaggcctctcttgagacatggagaggtatggcagaaaattagggaggggatatggtctcagagaccactggctacttagttcatccacctttcctggggtgttcaggcagctcataattgggtctctgctaccacaaaatgtctaggcttagaagtctcagagcacctatggggagcagaaggttggtcaggctccatcaccctcctctccctacagctctgcccacacctcaggacaagctcagagacctagtgatggctgtcatgcagctccttcttggtgggctccaagtgagtggtcctcatggagtctcttccatgtgacctcagccttttctcagcaggagtctgtctataaggagctggtcccagagggtggacagctccctgtctccaccgatgtcctcagttcctgagttcaagtccctgaaatgtacttctcactgttttactgtccctggaccaggtacagtagaggtcagagttggggcacaccaagatgagccaatatagtgtctgcctcaaagagttcacattagtggggaagacaggtacatgttcccagagggattttaccagtcctgagcctaatatcttctccctccaggtcctgacctgagggctgcatcaagatcttgtcattccacatcgtggtttcctttgaggatgtggctgtacccctctcccaggaggagtgggactgtctgatccctgctcagaggggcctctacaaggatgtgatgatggggacctatgggaacctactctcattaggtaagttccctccctggggctcagctcctgggcttcctgctccttaaccttgaggatcaagcttggggctcagaggctcctcaccccctgggcccaaagaccagacattttgaccatggtaccatgcaggtctggtttgcacagagagggggacaggtggtactgggaccctccttgatttttttttttaataggcaatgtctcactctgttgcccatcctggagtgcagtggtgagaccatagctcactgtaaccttgacgtctttggttgaagagatcctcctacctcagcctcccaagtacctgagactacaggcatgggccaccatgcctgtcttattttacttttttagagacagagcctctgtgttgcccaggttggtctcaaactcctagcctcaaggaatcctcccaccttggcctcccatgcctttccaaccctccctgatttatagaaggagaatattattcattgcacacctagtacctccctatcccctgaattaatctttttgcatcttgatgatcggtggtaggatacacagtttataaacgaacctgaggctaacaaatactgtcactttttttaagtttacacagcctattggtggcagatttgggatatggatctgttcggtttcagagccctgctttcctttcaatggaatgtgcttttcgctttagcccttttttttttttttttttggtttctgctagcctttatttgagaaaatttacacaaaaatccccaatgcaacatttacaagtgaatctgtataaatcccatatgcctctttcccaaactgaaaaatggctttatgacaggggtccatgacaatggtataaaaatacttacttaaactgcatcattctcatttatattatacagaccattttggataatatgctcaaaagtggaggaaagcacataacacccctgtttttaaagattatttgctcttgtatcagtcttttgtccaaggcaaatacttttacttcttggataaaaccaaggtataatatcaattaacttttaaaccaaaagcacaaaatgtcctagttgatagttttggcatgagtaaagggaagggacatgagagaacatcagctcctacaaagcttaagtttagggtcacacttgggaacaaaagcatcaacaaaacaaaatattctcttctcctatcttcttgacattttgtcacatcagaagaacataactaacagagtagctttcattgctcctgaaaaggggaaaggcaccagtcagaaataggaaagaaaatcttgttaggttaatggtacatgatagaatttcacattaaaaagtttaatgatggaggatgggcgtagtggcttacacatgtaatcccagcactttgggaggctgaggtcagtggatcacttgaggtcaggagttcaagaccatcccggccaacacggtgaaactccatctctaccaaaaatacaaaaaccagccaggtgtggtggcatgcacctgcactcccagccactctggaggccgaggcggaagaactacccgaacccaggaggtgaaggttgcagcaagctgagatagcaccattgcacttcagcctgggcatcgcagcaagactctgtcccaaaaaaaaaaaaaaaaaaaaaaaaaagtttaagaatggaatccaagtagacttggatgtaccctctgtaacttagtatatgtaatactacatgtagactttctcaacatctgctgcctatggtaaggatctgcagccaggttctcagaagcagtacctaccaattcttaacagcaggtggcaatgttgtacaagttaacgacagaactacttttatgccacatgagaggaagatacaaggagtcaaaagggggaaaaaaacaggtttgggttcatagtagcaggaacatgaacagaatagcctgagattttaacaacataactcattccctcttccacctttgtactttatccaggtcaacacatcagggttctctaacaattccagtattctgcttctttactgtaaaatacatgtaattcttgccactgtgattaaataagccctgtgatagcagggttaaaaagagattacagaaaggataaactctacctactttcttgagagatgtgggaaagatttcaagtgacagcatttttcatagctgtttataaacatggtcatttatatccacattttctcttatttacattagttttggcccttaggcacctcatactcctacagtgattattggctttgctttcattggctttgtatttttaagtatttaccctcttaatggccctcctagatatctattttatacatcatatttcttaattatctagatggaacactgaaggacaggaattaagtaagtgactggccatgcaagaagagttgtaaattttacttatttttccttggtagaagttatgttaaaaattcaagcaaccacgtatctaacagaagagttttatctaggatgtataaaaaaactctgaaaactcaatagtaaaaagaacaaatgacctaaatagaaaatagacaaaagacatgagcagacatttcactgaagaggatgtgtagatggcaaattagcacacgaaaagatactcaacatcattagccattggaaaatgcaaattaaaaccacatgtggtatcattacacacatctatatgaatggttaagataaaaaatagtagtaataccaaacgctggtgaggatgtgaagaaactggatcagtcatacattgctgtatgaattgtatgagtggctgtatgtaaaaggtacagccactctggaaaaaagagtagggtagtttcttacaaagatatacgtgtttaccacacaacccagcaattgcccttttgggcatttatcccagaaaatgaaaatgtgtgttcacataaaaacctgtacatgaatgttcacagcagctttattagtaagggcaaaaaactgaaaacaactcttttgtcctttagtaggtgaatggttaagcaaactgtggtacatccataccatgggatacgactcaacaatcaaaaggaactgcccagacttcaccacgatgcaatatatgcatgtaagaaatctgcacttataccccctaaatatataaaacatttttaaaagaaaaaaaggaagaagatacatgcaacaacttggatggatttcaagggaattatgctgaatgaaaaaaagtcaacctcataagattacattctatatgattccattcatatgacattcttgaaatgacaaaattacaaagatggaagacagaacagtggtagccacaggttggggtgaggggataagaaagggatgtggctgtggctgtaaaagcgcagcacaagggatccatgtgatagaactgttctgtctcttgtgatggtggtcacatgaatctacacatgataatactgcatataattgtctaaaatgacattttcttcaagagttatctacagtttaaagctcacttttatgaagtgtcacatccatcaccattttaagagacataaaatcatgaaaagatatcaccagaagctacgtaaacatttcagctaagggtaaagagaaagttaagagtgttttcacaaggaaattgaaagaaggcaatccgaatgaagtcaacttggtcacacaaaaatcttggtaaaagaactagaatggaagcccaaactgctgagcaagtgggagaagaaaagaaaacttggttcaaacagatcacacaagggaacccaggacaaatgctgactttggcattatctaggtaacccttttttttgtcataggtgactctaataatagacctgttgttgcaaaaccagtcaaaatcctaccaaattaaaaagaagtccctcattgacttgttgggtgtaggtggtaccccatgtcctcgcacaccaaaagagatcatttctggcaagaaagctcctacatgccttgatggtgctgctggtaggatgccttaggccaggcccatcccagcgatgttctgctggctgtggtaaaaggtgggaggagaatatgccttattcattactcaatcaacttcttagccttgaagaagcatcacaggtagaagacctgccaggtggctagtccagtgaggcagaacattgaaaagatgctgaagtgtatgaaccaagtgtttgttgactcactggtatcaccatctcctcttctctcttcttcatgtaggcaaaatcattaacaatagattctgaaaggtcttctaggtgtcgcagcttcacctctaatggtttgagcttctcaacttttgcaatctctctgtaatttttcacctccactccatgcttcatgtctaggatcacaagttggtcaggtatctgccctgtttccttgctctcaaaacacacttcaaacatgtcataatcttcagtggtaaaggcaaatttccccttggttgtattctttttggagtagaaaatatggccagcagaatctgtgatcttgaggtggctgcacaggccaccagtgcccccagactggtcagagatctcgtatgtgccagtcactagtaggtccttgtggatctcctcatggaagcagttgtgagaattaatggacagatggaaggagatggcgaggaccaagctggggcccagcaggaacaaaagcagcaacgccgatggacaagggccatgccgggctggtgggccagacaaaccagacatggtgctggagactcattccccctttagcccttctgctggggatcaacacccactactatgagtcctctaccatgatgtgttcaggccccaacactgtcctatctatgctccccgtcctcctgaaaagctagttttgacctttcctcagcttaggcagaggcctgtgtctttctccacggttagagaccaggtggcagggaaggacacaaccagcacaaagactcagaccacaggtccatcctgccctctacctgggatgacttttcaggtcttgcttcctttctctggagcaggacttcaagcttccaaacctgatgtcatctccaggctggagcggggggacgaaccatagacccctcacatcctgagaactcaggggagctggagctggaggcacaagagagaaggtgagtctgcccccactctctgcttctgtggtaggtgctgcagcttcactcacgaatcccttctctacaagccccagacaaatctcttgttaccctcaggcctttgctttcctcctcctttttctatcttgtcctctttccttgctgttatttgcccctgttatctgcccataagtaggtttgtgttttatttaccctagaaaaatgctatttcagccacaaaaaatagttcaagtgtccttcccaggcagctggctcccagtcccttcacttctatgtcatccactccttaggctgtttgggaaaaatgctaattacatttttcctctgctctgacaccacaacaacaatcaacaaagacttcgtgaccaaatgtatggagggtttttcccatgttccaagcagctctaattcaattcaattctggtgctcttttggagatagcctcagatcccacaggctgagggctcagtctctgagactgtccactcaaggcactagttgtaagttcggggtttccaaacttgagaccaaaaggattcaagttggggttcccatgaccctcactttgggttctattaatttgctggagcatctcacagaactcagggaaacacttagatttacaagtttaggctgggcgcagtggctcatgcctgtaatcccagcaatttgggaggccgaggtgggcagatcacttgaggtcaggagttcgagaccaacgtggccaatatagtgaaaccccgtctctacaaaagatacaaaaattagccaggcatggtggtgtgcatctgtagtctcagttacttgggaggatgaggcatgagaatcacttgaacccaggaggcagaggttgcagtgagctgagatcatgccactgcactccagcctgggtggcagagtgagaccctgtctcagaaaagaaaaagaaagatttaccaatttattataaaggataaagatgaagaaatgtgtaagctgaggtatgggggaaggggtgcagagttttcatgcccttcctgggtgcatcaccctctaggatcctgtccacttagctatccagcagctctctgaaccctgccctcttaggtttgtatagaggctttattatgtaggtatgattgattaaaccattggccattggtgataaacttaacctttagctcctttcccctctcttgagtttggggcattggagctgagaatcccaaccctgtaatcgtgccttggcctttccagtgaccagcttcatcctaaagctgtcagtcaacataagtctatgaaaaggcagcactttggagattacaaggattttaggagttgtatgccaggttatggggatgaagaccaaatatgtatttcacactatcccacagggtttgctggccagctctgttttggctgctgggaaataccaattagagagacgttctcttctaagtctctcattcctgctgttactcactcagagcatcccaggctgattctcggtcttaaggaaacagatgagctagaaagggtttcttcctgtgtagtgggggacctgggcatgtaaacagtaagcagagcagagtcctagggctccgtgctaccacacagctaacattggtcatttgcgcttgatgcaggcctggcactgtgctgtcacaatgaatttatggaattcaccaatatctctgcacaatcagtgtccaggaaactgaggcacagagaggttaaattattggccccagatcacacagccagccagggagagagcaacgttgggtccctggcagattggtctcagccccatactcttatttattttctttaaagaaccagccttattgaggtgtaattaacatataatatgttaataagtatttaaagtatatgattttatatcttttgacatatgtatacacatgtgaaaccattgctacaatctagggcagacatatccatcacccccaaaagttttctcctccttcatcatctttcactccttcccacctttctcactccttcccacttctatactgaagcaattactgatctcctttctgtcactataaattatatatatatgtatatatatatatatatatatatatatatatattttttttttttttttgagacggcgtctcgccctgtcacccaggctggagtgcggtggcacgatctcggctcactgcaagctccgcctcccgggttaaggccattctcctgcctcagtctcctgtgtagctgggactacaggcacccacgaccacgcctggcttttttgtatttttaatagagacggggtttcaccgtgttagccaggatggtctctatctcctgacctcgtgatccgcccgcctcgacctcctgaagtgctgggattgcaggcatgaagcaccgcaccaggccttttatattcttttgaataaatcaaactttatgtaattttatttttcttctccattagctttttagttgtacattcctttttaagtgatgactctaatgattaaatatgtctcttcaact

SEQ ID NO: 7998 - DNA, 10909 bp, Homo sapiens
  SITE (4570): n equals a,t,g, or c
  SITE (4577): n equals a,t,g, or c
gggcttggctccccgcggcacgggatttagcgttcgcgctccttcccttcccgtggtcgagccgagtgagtcccgagctagggcgcctggtgcggaggtgccggagtggcgctggggcgggcaggggcggtgccgtggttctgagaggccgcaggtcgggccccgcggcctcagtgacccgtagaggacgcgtcgagggcggctgcggggtgctgagcgcccgctttgtgttggccgaggcgcgggcagggcgagggtggcgtgaggcacgagcggaggcagcggggcgtgcaggtctacgggctgtcatccacgctcccgagcaacactgaggcagggaagccagatgggtaaaaagatctcgcagaggaagggagtttgggcaatgtcaggggatgagctgaattgtgctttttttttttcagaagagagaaaagtgcatttcatttagcaggaatgtattgattgaaagggtaaagctgtgagagctgtggtgtgaaggagcttctgttttggggaaggaaaggaataggcaggaggtgatatctcacagatgcgctggaacaagctcaacactcattcatttagtaggcactcggtaaatgctgacttactgattaggacaattgagacttagtattgtttgcggtttgctaatactgtgctgagcattttatacatattctcatttaacgcaatatagtcacttaaggagtagtgtcaatctcattttatggtctgtggaaaaactcaagtcacttacctgagacctctgcatgagtaagtggtggatccaaggttagaactcagtcctattcgagtccagagcccatgcgcctaatagcagcattacatgcctgccacatgcgtttaggagtgaaggcagagtacactaagaggtaccgcttgtgattcacaaagggcataagcagcaggggccagtcaaaggcaagccctgtctgaggactggaagattccctctggccaaggtgtgcctcagctggagactgtgaagacatcaatgagcttatgttcagctgccagtcagaaagtctgtccaacgaaggcttaaatgatgatgagacagggtttgttccagagtttgttgtgaaatgccagggctctagaacgtgtctccaacgttctcttggctttcctttgtggtcactccattccccttatttcctttcagatgcctcttggcaaacttcccttaacatcttggtgacgagaactgggccttgcggtcacctagagcggaaggaaaagggcgcatttcctcctgaactaaactaaggaatttgtttatgtgtagagggctgtggggaggtgacttgttgtgtatgctgaggccaattgggaaggcttttgtgggagtgacacatatcactgctaaaataaaaccagatttgtggttttagatgtcatctgtgtactgacagttttcagtatatacccagccagcccaacctcactcctgaattttcaacttgtatatccaaatgccctaattttccatttataaatctaataggtatcttaaacattactgtatacaagacaacttttacatttaatctttttgcagtcttactcttttgagtatatggaaatttcataatttcagttgctcaggccaaaaatcttggtgtctcgtcctacatgaaattcatctgcaaatcctattgatggtacctttgaaatgtatccataatctggctgctttttgtcacttctgccaccaccagtctggtccaggacattcatctctagctggattgttgctagaaccttctgactggtttcctgtttttgttccttacccccaccccatagtctattcaaagcaccctcaaagcagcagctgtagagaccacatctgaggtcatatgactcttcccagacattccaggcacttcccatccattcagaataaaacccattgccctaaggcttacaaggtacccaccccagagggtacccacctcttttaccctcccctagtctgtttgagcccctctggcttctttgcccgttcttgaacacaggtgtgcttgcatctcagagcctttgcacttgtgccctcctcctgcctgggatgtacctcactgaataaccacatggtgcctaccctcactccatccagatctctgatttgttgtcactttatcggaggtgtcttccctggccatcctgtgtaaaatatctcttaccaccagtcgctgccctcgtgctgcgtcattaattttttgtatcctttgtcattacctgacaccacctgggcgttgtgtctgtgtgtcatgcatatgtgttaacttctccatttgctcattcgctgccttagcaccagagcctggtccgctgttctcagctgtttgccgtctgcgcaggacctcataggtgggcctgggaaacgcagtccattgtctctcctggccaagtgcactgccacagtcctggctttcacatggtggcctcaggatgctgtcatcccaggggcctcaggaaggcctctcttgagacatggagaggtatggcagaaaattagggaggggatatggtctcagagaccactggctacttagttcatccacctttcctggggtgttcaggcagctcataattgggtctctgctaccacaaaatgtctaggcttagaagtctcagagcacctatggggagcagaaggttggtcaggctccatcaccctcctctccctacagctctgcccacacctcaggacaagctcagagacctagtgatggctgtcatgcagctccttcttggtgggctccaagtgagtggtcctcatggagtctcttccatgtgacctcagccttttctcagcaggagtctgtctataaggagctggtcccagagggtggacagctccctgtctccaccgatgtcctcagttcctgagttcaagtccctgaaatgtacttctcactgttttactgtccctggaccaggtacagtagaggtcagagttggggcacaccaagatgagccaatatagtgtctgcctcaaagagttcacattagtggggaagacaggtacatgttcccagagggattttaccagtcctgagcctaatatcttctccctccaggtcctgacctgagggctgcatcaagatcttgtcattccacatcgtggtttcctttgaggatgtggctgtacccctctcccaggaggagtgggactgtctgatccctgctcagaggggcctctacaaggatgtgatgatggggacctatgggaacctactctcattaggtaagttccctccctggggctcagctcctgggcttcctgctccttaaccttgaggatcaagcttggggctcagaggctcctcaccccctgggcccaaagaccagacattttgaccatggtaccatgcaggtctggtttgcacagagagggggacaggtggtactgggaccctccttgatttttttttttaataggcaatgtctcactctgttgcccatcctggagtgcagtggtgagaccatagctcactgtaaccttgacgtctttggttgaagagatcctcctacctcagcctcccaagtacctgagactacaggcatgggccaccatgcctgtcttattttacttttttagagacagagcctctgtgttgcccaggttggtctcaaactcctagcctcaaggaatcctcccaccttggcctcccatgcctttccaaccctccctgatttatagaaggagaatattattcattgcacacctagtacctccctatcccctgaattaatctttctgcatcttgatgatcggtggtaggatacacagtttataaacgaacctgaggctaacaaatactgtcactttttttaagtttacacagcctattggtggcagatttgggatatggatctgttcggtttcagagccctgctttcctttcactggaatgtgcttttcgctttagcccttttttttttttttttttggtttctgctagcctttatttgagaaaatttacacaaaaatccccaatgcaacatttacaagtgaatctgtataaatcccatatgcctctttcccaaactgaaaaatggctttatgacaggggtccatgacaatggtataaaaatacttacttaaactgcatcattctcatttatattatacagaccattttggataatatgctcaaaagtggaggaaagcacataacacccctgtttttaaagattatttgctcttgtatcagtcttttgtcaaaggcaaatacttttacttcttggataaaaccaaggtataatatcaattaacttttaaaccaaaagcacaaaatgtcctagttgatagttttggcatgagtaaagggaagggacatgagagaacatcagctcctacaaagcttaagtttagggtcacacttgggaacaaaagcatcaacaaaacaaaaaattctcttctcctatcttcgtgacatttggtcacatcagaagaacataactaacagagtagctttcattgctcctgaaaaggggaaaggcaccagtcagaaatacgaaagaaaatcttgtnaggtaantggtacatgatcaatttcacattaaaaagtttaatgatggaggatgggcgtagtggcttacacatgtaatcccagcactttgggaggctgaggtcagtggatcacttgaggtcaggagttcaagaccatcccggccaacacggtgaaactccatctctaccaaaaatacaaaaaccagccaggtgtggtggcatgcacctgcactcccagccactctggaggccgaggcggaagaactacccgaacccaggaggtgaaggttgcagcaagctgagatagcaccattgcacttcagcctgggcatcgcagcaagactctgtcccaaaaaaaaaaaaaaaaaaaaaaaaaagtttaagaatggaatccaagtagacttggatgtaccctctgtaacttagtatatgtaatactacatgtagactttctcaacatctgctgcctatggtaaggatctgcagccaggttctcagaagcagtacctaccaattcttaacagcaggtggcaatgttgtacaagttaacgacagaactacttttatgccacatgagaggaagatacaaggagtcaaaagggggaaaaaaacaggtttgggttcatagtagcaggaacatgaacagaatagcctgagattttaacaacataactcattccctcttccacctttgtactttatccaggtcaacacatcagggttctctaacaattccagtattctgcttctttactgtaaaatacatgtaattcttgccactgtgattaaataagccctgtgatagcagggttaaaaagagattacagaaaggataaactctacctactttcttgagagatgtgggaaagatttcaagtgacagcatttttcatagctgtttataaacatggtcatttatatccacattttctcttatttacattagttttggcccttaggcacctcatactcctacagtgattattggctttgctttcattggctttgtatttttaagtatttaccctcttaatggccctcctagatatctattttatacatcatatttcttaattatctagatggaacactgaaggacaggaattaagtaagtgactggccatgcaagaagagttgtaaattttacttatttttccttggtagaagttatgttaaaaattcaagcaaccacgtatctaacagaagagttttatctaggatgtataaaaaaactctgaaaactcaatagtaaaaagaacaaatgacctaaatagaaaatagacaaaagacatgagcagacatttcactgaagaggatgtgtagatggcaaattagcacacgaaaagatactcaacatcattagccattggaaaatgcaaattaaaaccacatgtggtatcattacacacatctatatgaatggttaagataaaaaatagtagtaataccaaacgctggtgaggatgtgaagaaactggatcagtcatacattgctgtatgaattgtatgagtggctgtatgtaaaaggtacagccactctggaaaaaagagtagggtagtttcttacaaagatatacgtgtttaccacacaacccaacaattgcccttttgggcatttatcccagaaaatgaaaatgtgtgttcacataaaaacctgtacatgaatgttcacagcagctttattagtaagggcaaaaaactgaaaacaactcttttgtcctttagtaggtgaatggttaagcaaactgtggtacatccataccatgggatacgactcaacaatcaaaaggaactgcccagacttcaccacgatgcaatatatgcatgtaagaaatctgcacttataccccctaaatatataaaacatttttaaaagaaaaaaaggaagaagatacatgcaacaacttggatggatttcaagggaattatgctgaatgaaaaaaagtcaacctcataagattacattctatatgattccattcatatgacattcttgaaatgacaaaattacaaagatggaagacagaacagtggtagccacaggttggggtgaggggataagaaagggatgtggctgtggctgtaaaagcgcagcacaagggatccatgtgatagaactgttctgtctcttgtgatggtggtcacatgaatctacacatgataatactgcatataattgtctaaaatgacattttcttcaagagttatctacagtttaaagctcacttttatgaagtgtcacatccatcaccattttaagagacataaaatcatgaaaagatatcaccagaagctacgtaaacatttcagctaagggtaaagagaaagttaagagtgttttcacaaggaaattgaaagaaggcaatccgaatgaagtcaacttggtcacacaaaaatcttggtaaaagaactagaatggaagcccaaactgctgagcaagtgggagaagaaaagaaaacttggttcaaacagatcacacaagggaacccaggacaaatgctgactttggcattatctaggtaacccttttttttgtcataggtgactctaataatagacctgttgttgcaaaaccagtcaaaatcctaccaaattaaaaagaagtccctcattgacttgttgggtgtaggtggtaccccatgtcctcgcacaccaaaagagatcatttctggcaagaaagctcctacatgccttgatggtgctgctggtaggatgccttaggccaggcccatcccagcgatgttctgctggctgtggtaaaaggtgggaggagaatatgccttattcattactcaatcaacttcttagccttgaagaagcatcacaggtagaagacctgccaggtggctagtccagtgaggcagaacattgaaaagatgctgaagtgtaggacccaagtgtttgttgactcactggtatcaccatctcctcttctctcttcttcatgtaggcaaaatcattaacaatagattctgaaaggtcttctaggtgtcgcagcttcacctctaatggtttgagcttctcaacttttgcaatctctctgtaatttttcacctccactccatgcttcatgtctaggatcacaagttggtcaggtatctgccctgtttccttgctctcaaaacacacttcaaacatgtcataatcttcagtggtaaaggcaaatttccccttggttgtattctttttggagtagaaaatatggccagcagaatctgtgatcttgaggtggctgcacaggccaccagtgcccccagactggtcagagatctcgtatgtgccagtcactagtaggtccttgtggatctcctcatggaagcagttgtgagaattaatggacagatggaaggagatggcgaggaccaagctggggcccagcaggaacaaaagcagcaacgccgatggacaagggccatgccgggctggtgggccaaacaaaccagacatggtgctggagactcattccccctttagcccttctgctggggatcaacacccactactatgagtcctctaccatgatgtgttcaggccccaacactgtcctatctatgctccccgtcctcctgaaaagctagttttgacctttcctcagcttaggcagaggcctgtgtctttctccacagttagagaccaggtggcagggaaggacacaaccagcacaaagactcagaccacaggtccatcctgccctctacctgggatgacttttcaggtcttgcttcctttctctggagcaggacttcaagcttccaaacctgatgtcatctccaggctggagcggggggacgaaccatagacccctcacatcctgagaactcaggggagctggagctggaggcacaagagagaaggtgagtctgcccccactctctgcttctgtggtaggtgctgcagcttcactcacgaatcccttctctacaagccccagacaaatctcttgttaccctcaggcctttgctttcctcctcctttttctatcttgtcctctttccttgctgttatttgcccctgttatctgcccataagtaggtttgtgttttatttaccctagaaaaatgctatttcagccacaaaaaatagttcaagtgtccttccctggcagctggctcccagtcccttcacttctatgtcatccactccttaggctgtttgggaaaaatgctaattacatttttcctctgctctgacaccacaacaacaatcaacaaagacttcgtgaccaaatgtatggagggtttttcccatgttccaagcagctctaattcaattcaattctggtgctctcttggagatagcctcagatcccacaggctgagggctcagtctctgagactgtccactcaaggcactagttgtaagttcggggtttccaaacttgagaccaaaaggattcaagttggggttcccatgaccctcactttgggttctattaatttgctggagcatctcacagaactcagggaaacacttagatttacaagtttaggctgggcgcagtggctcatgcctgtaatcccagcaatttgggaggccgaggtgggcagatcacttgaggtcaggagttcgagaccaacgtggccaatatagtgaaaccccgtctctacaaaagatacaaaaattagccaggcatggtggtgtgcatctgtagtctcagttacttgggaggatgaggcatgagaatcacttgaacccaggaggcagaggttgcagtgagctgagatcatgccactgcactccagcctgggtggcagagtgagaccctgtctcagaaaagaaaaagaaagatttaccaatttattataaaggataaagatgaagaaatgtgtaagctgaggtatgggggaaggggtgcagagttttcatgcccttcctgggtgcatcaccctctaggatcctgtccaattagctatccagcagctatttgaaccctgccctcttaggtttgtatagaggctttattatgtaggtatgattgattaaaccattggccattggtgataaacttaacctttagctcctttcccctctcttgagtttggggcattggagctgagaatcccaaccctgtaatcgtgccttggcctttccagtgaccagcttcatcctaaagctgtcagtcaacataagtctatgaaaaggcagcactttggagattacaaggattttaggagttgtatgccaggttatggggatgaagaccaaatatgtatttcacactatcccacagggtttgctggccagctctgttttggctgctgggaaataccaattagagagacgttctcttctaagtctctcattcctgctgttactcactcagagcatcccaggctgattctcggtcttaaggaaacagatgagctagaaagggtttcttcctgtgtagtgggggacctgggcatgtaaacagtaagcagagcagagtcctagggctccgtgctaccacacagctaacattggtcatttgcgcttgatgcaggcctggcactgtgctgtcacaatgaatttatggaattcaccaatatctctgcacaatcagtgtccaggaaactgaggcacagagaggttaaattattggccccagatcacacagccagccagggagagagcaacgttgggtccctggcagattggtctcagccccatactcttatttattttctttaaagaaccagccttattgaggtgtaattaacatataatatgttaataagtatttaaagtatatgattttatatcttttgacatatgtatacacatgtgaaaccattgctacaatctagggcagacatatccatcacccccaaaagttttctcctccttcatcatctttcactccttcccacctttctcactccttcccacttctatactgaagcaattactgatctcctttctgtcactataaattatatatatatgtatatatatatatatatatatatatttttttttttttgagacggcgtctcgccctgtcacccaggctggagtgcagtggcacgatctcggctcactgcaagctccgcctcccgggttaaggccattctcctgcctcagtctcctgtgtagctgggactacaggcacccacgaccacgcctggcttttttgtatttttaatagagacggggtttcaccgtgttagccaggatggtctctatctcctgacctcgtgatccgcccgcctcgacctcctgaagtgctgggattgcaggcatgaagcaccgcaccaggccttttatattcttttgaataaatcaaactttatgtaattttatttttcttctccattagctttttagttgtacattcttttttaagtgatgactctaatgattaaatatgtctcttcaact

SEQ ID NO: 7999 - DNA, 568 bp, Homo sapiens
cagtcaacaggggaagtgagatgttgcaaaggccgctctcagaacggaccccactatccttaaaagaaaaggctagcttgtgccaatgggccagagtggaacaggcatcccatggagtatacctggaagattcctgggtcttctgcatgagttgcccctaatgcccacagtgtttctaaacgagaaggcaggtacgtggtacttggggcggccatctgtgttagctaactgcctttatccaaagttaaaataaacctcatgtctctatgacaagcaggtaattgcaacttggagccagccatctgctaaactcccacagagacaaggagggaagctatcttccttggcctttttatttcaaagaaatcactccaaggtccttaagaaaggtccttaagaaagaaattcctggtttataaaactggcaagaggcttatgcagctttttaaaaaatttacatacatttcaagagggcaaagaaagattttcctattacaaagttttctaaaagaaatggtcttagtaaaaggaaaggagtgtctcttcccttgggcaccatgaaaaatcc

SEQ ID NO: 8000 - DNA, 568 bp, Homo sapiens; identical to SEQ ID NO: 7999

SEQ ID NO: 8001 - DNA, 568 bp, Homo sapiens; identical to SEQ ID NO: 7999

SEQ ID NO: 8002 - DNA, 5235 bp, Homo sapiens
ttgcggccgctgcggcctccttgcccgggcttggggcgccgcgctggggaaagccgggggcccggtgagcccgcgggatgcgtcccctcggttccgccgggcggggctgaggcgaggaggccgggcctggggggagggggggccccggcctagagactcctccgggagcgcccggtccctaccgccgtgggtcccccactctgcccggacccccttttccgcccctggcgccgtgggcccctcactttgcctggactccttttcccgtccctgccgcccggaccccatctcttgcttggacccgctcccccatccttgctgcctggacccctatctccttccctggatccccctcacgtctgccgtgaaccccatctcttgcctggacccccatctgcttccctggattccccacccccaaccgtgaaatcccccatccctgccacctggaccctccgctccacctcctccgtgagccctcgttcttgctccctgagcccccccgcttctgctgtgacccccttctctgttgcctgaatcccccgttcctgcaagccgcaacccttcctccgccatgaaatcttgtccctgctgcctggacccctacttctgctgctgctgtgatcccctctcttgctggaaacgccacccctacctctgctgggaacctcctcttccctgctgcggggacgcccccctccgttgttgctaaattccacccccacccccaaacctccttttcatttctgtcaacagccaagccagtccttcccattgatgctgtgaacggtctgcagctgtccccgttctttcagggacatggcagccaaaagagcagtcgtttttccgctcttatttttgtgtgtgtgctgtggtcaactgttaactccccaaattggggagggttgtgagctttgattgtgtaaaatgcctctcctgccgaggtcggaggcaggtcttccgcacggagatgatttattcaggagccttttaaaactgatctagatagaacctttgggagggactgtgctgtattttatttatgaaaaaatgcaggcgcctccctggataccgagccccgtcgtttctgtttgtcagtctgctttttggcattgagcatctcaatgcaagattgtggaattaaaccatctacttgaggctaagtcgagctaacctttgcccctgagggctgtgtctgcgttaacatcgccagcaaacagttgtataaaccaccgtgcaaatttcgttccaggacacattggcgtgagacctgggagtacgttgtgccaaatcattgccacttgccacatgagtgtaaatgatggcggatgccaagtatgtcctctgccgatgggaaaagcgattatggcctgcgaaggtgacagccattattctgtaacttcaggacttagaaatgactttcgggtgacaagtaaaatcttgatcaggagatacctaggatttgcttcagtgaaataattgagccagaacacggttggcactgattctcgttccccatttaatggggttttggtctagtgcttccaaggttacacttccagaaatgtcttttttttttcacactaaaaaaaaaaaaagaatcagctgtaaaaaggcatgtaaggctgtaactcaaggaaagatctggcaagcagccctgtgatagtaaattatggtcgtgttcagggaatgctttccagcaattcagtagacagtgctcagctgcaatgcaaaagcccaggtccttgtctttgtctgccactggcctctcatgcctcagtttccccatctgtgaaacaatggggattggaccaaatatctgaaatcccatggttataggccttcaggattacctgctgcatttgtgctaaagtttgccactgtttctcactgtcagctgttgtaataacaaggattttcttttgttttaaatgtaggttttggcccgaaccgcgacttcaacaaaaaataagagaagaaaggaatattttctagctgtgcaaatcctctctctagaggaaaagttaagtgttgtgttgttttaatactgttttttcccgtgtagatttctgatacttcaatcccctactcccccaaaacagttgaagcccagcccactcttaatgggcttattcaccatttgtgtaattcattaatgctcataataacctcatgagaaagcaactagtttgattttatgtcagtttggaagctgaagatccaaacgaggcattctgtgagatctatggagagattggtacaaacactgaatacatgtaaattatactcagggtagaccctatttgtggttaaaatagggatatttccttttttttttttttttttgactgtttcttaatcagtgccatgccaggaaaatagggatgtttccttcccagagatctgtgtgtcttttttcagaaacgtctgtgacaggcccatcaattttgaaatatttggtttttgagcctgtcactctaaaccagcgtttaacgttcaaaaggcaaataactgatgaccaggcggcacattgttctgctccgtgagtgtctggcactgggaaaggtgtagattgtctagaatgacagcaattccgacgccccagtcagtcctgcgtgattgtggcgagggcgcgtctggcaccgggaaggtgtagatcatctagaatgacggcgattccgacgccccggtcagtcctgcgtgattggcgagggtgcatctgtcgtgagaattcccagttctgaagagagcaaggagactgatcccgcgtagtccaaggcattggctcccctgttgctcttccttgtggagctccccctgccccactccctcctgcctgcatcttcagagctgcctctgaagctcgcttggtccctagctcacactttccctgcggctgggaaggtaattgaatactcgagtttaaaaggaaagcacatccttttaaaccaaaacacacctgctgggctgtaaacagcttttagtgacattaccatctactctgaaaatctaacaaaggagtgatttgtgcagttgaaagtaggatttgcttcataaaagtcacaatttgaattcatttttgcttttaaatccagccaaccttttctgtcttaaaaggaaaaaaaaaaaaaaaccattcaccagggttcttgctgcctgtaacctcaggcagatgaattcctagttggctgtgacttttggtttaagtggaaggttgaggaggaaaatgaaaataattcttttgttatctaaaggaaaacatgtttgaaaatgtcttggcggcgttggctggtggtgtgtaacgtcgattttgtctctgcagaattaaggtgaaaagcactgaagttgagatcctagagaagtctcaaattgaagccattgcttcctcgttaggtaagagcgtatttttaagtggccactaggttttcataaaataagaggtcatttgggagaatgtgaaggctcagctttctgggtaaaaattcaccctgttcaccatgtttttcttcatacaagggaacgcgaatcccctgagctgaaggagaaggaaaaatggatccgctttcttaaacctttccagaatttgcccctagaaccactcctattcttgacgcccagaatggtcagtggtgagcatcaaggtcatctcgtacccccgtggcctccagtacacaagacgaggaaggactttgctgccataaggggggaggtcctcctttttcctttcctcttcctatagtaagatttgctgtggtactgtcgctgcctggccagtctggtctcagcccaaggtttgagaagcagttggttgtgtgtttaaaattccagagcagagcccaagggagagaacgggtggcctggcactggggttggtggcacccattgtttgaggcactgtcatggggggcacgaggcaggtcggaagtggagctctcggcttcccatccatccgggtgcgctttctcccaggccttcagtttagcacccacctcctttgcacactgtgggtgagaaaagctttgcctgagtccagccggggactggtcatgcacatacatgacaagtgaggagcactggtgactgcctgccccctagccacagttgtgcaaacccaaacctgccagccttccttctcaaagtggaactgtttatcccatttgcaaataattgtttctcttgtgaaaagatggaccggaattccttccaatgatgtttataaaatcaggtctattttcctgtgtcttccgaaaaacagctcttgtttaaagcaggatccatctctgcataacttaggccgggctgaccatcatcttggatggcgtcgtccttgttggcgcagattgtgttggggggctggttgtttgtgggcgcctttaatattcaaaggggagaatactgttctgattgaggcattatgcccgctgagttgtgatattacatccatcatcttgttcaaataaatagcgccgtatctatatgtcggaatgaataaataaaagtgctgcagcagggaggttgggctggaaaccagaggcccacgatgctctttgctggctttgaaatgcccttgcaaagaagtattgaaaatttaccagcccacaatgagtcttttaaatctccttttccttgctaccaccaacccctgcaccaaccaagaatacgttgccagcagagttctttatttagttggcattggtttttattgaccctgattgaatttgaaattgtaaggctgagagaggatttgcaaaacatttgaatacattttgctcacggtattgttttgtaacttggaggaatttatctttttagccaatcaggttaaggtcaataaatttggtttttaaaaaaatgaagcctcgaatcccggaatgaatagctgtcgttctgtagcctcgtctcctttttgggaaaatgtaggtgagaaatgttagtcctccccttcagtgatttaggtatgaaactagccgtcagaatgagacaagcgagcttctaaagcgatgccgtgaccgcagtgcctgtgcagtgaacgtaaccggcattgtgtatgttcggtccttgcagcctcacagaatgaggttcctgcggcacccctggaagaactggcctacagacggtcgcttcgcgtggctctggacgttctgagcgagggctcgatttggagtcaagaaagctctgcagggacaggtagagctgaccggtctctgcgagggaagcccatggagcatgtctcct

SEQ ID NO: 8003 - DNA, 6215 bp, Homo sapiens
agtgggtccagaatccaccacaaaaattggactcttgcaagtaagaggggaggaaactcagcgcagaaggctagcttgtgcctgaatggatcttccctttcagaggacgacacggagagagacatggggagcaaaggaggcagctgggcagccccgtccttgccctccggggtcagggaggacgatccctgtgccaacgctgagggacacgaccccggtctgccgttgggcagcctcactgcgcccccagcccctgagccctcggcctgctcagagcctggagaatgccctgcgaaaaagaggccgcgcctggatggcagccaaaggccgcctgccgtgcagctggagcccatggcagcaggggccgcaccatcccccgggccggggccagggcccagagagtctgtgaccccgcgcagcaccgccaggctgggcccgcctccctcccacgcctctgcggatgcaaccagatgtcttccttgcccggattcccagaagctggagaaaggtaaaagtttctcgtggaggaggagagcgcagagggtggagtcctgctcctccgcagccagactgggagccaggcacgtgggtgtttttgaccagattttaatgagatcgttgccaaaatagacttagagcagagacttcctcattcctttttgtctgtctccccactgggctataattgcttcaacttctaaatatttgtcttcttatttttgtttagaagggaagggagttgagtgagtggggagcccgtagaggggcggcgggccacgattgtctgcggcgcggctgggagcattgtggctgtgctgaggccgcagctgcggctgcaccccgaggattaactcttttaacggaagcagtaacgcattcctattaaattgggcagcaatctcaaaagtgattcactcactcaaaagactgactttttaaagaattcctgtgcagatatatttttgtgtggttgcaggcaagcactgtgacttttttccttttaacactgtagcatcctttattttttaaatgctagttcagaaatcttaattaccacatgatcaaatgtctggaaatctacttgctacaaacttaccgcgcagatatttcagtctgtactctgaacttctttcctgaggtcatcatctccttagcacgttggaagcggcagggaactgaggttgccacgctctgaagacaaagtgaccgcacccctaccctgttccatagtcagctcccgtcccggccccctccctgcgtatccgcacctctgtcctgttccatagtcagctcccgtcctggccccctccctgcgtatccgcacccctaccctgttctatagtcagctcctgtcctggccccctccctgcatatccactgattgcttcagatgtgaagggacagccaggccgggacaaaagggattcccacccagggtgcgcgcagcttctgtggccgaggtggctgctgcttacggcccgccttcccttcaccgcaggcctctctccctccctccttccctccttccctccttccctcttgcgtttttctttaaaatgtagtttattagaagcgcactctgtttgaatttggcagtgtggagttgtgtatagcatggaaccttttctttatgcatcgatggtcatgtgtcatgaaatgttttcttgggatgagtcatcaagacaatgcaatgaccatgaaagtctaatatcacattattggcagagtgccagtcttccgaagagtccatggggtctaattccatgcgttctatcctggaggaagacgaggaagacgaggagccaccaagagtccttttataccacggtaagaaatgatcagggggcgccggcagtcctaacggtgcgctcagaggcagcggcggcggggctccgagaccgggccccacattctccatgaaaggtctcctgcgagttcatttctctcccactgaaccgagacctggaagggaccttcagaagtgtcacgttttcagtcctctatcttaagaataacctacacaaagggacgagagactcctgggaagagacggcccagccctccctgttagagcattactcctgtcacttacctcaagcccttgtcctcctgtcccctcgcggggagtgagggatggcccagtgagccgaggggctgcgtcgccattgctcgggtgtggccacgtactgtctcgcggcttccgttggtgatggcgtttggggggctgtccagggaggcagggccttcagcccaagagtgaactgctcccgcgcccctcctgtaagtagctgcttgcactagaggaaaacctgcctttaggtgcccctgagcatctacgtggaagggactagaaatgagagacccaaagatctgagccagccgcgaacagaaagtcggcttcgcaaaccaagtcacaagaaccagccccacttgagactcgcccgtgaaccattcctcttaaccaagtcttgtttttcttttctttaaccttctagtttcagaataattatagattcacaggatgttgcaaaaatagtaaagggaggtgagggggcttctcacccgggcttccccactggcagcatccgtaaggcgcaggatgtccccggccaggaagctggtgcgtgtgcagcctcgggagcgccattccacgcacacttgcgtgccggtggccttgttatgtcgttctttttttgtctacactgtttgagtgcttttccatcattgaaagggcttcattacagtctcacattttcccttttttttgcctaatgctaatggtcagactttttaacagttttccacatgctcttctgatccttttcctctggggtgagcagtcaccactcaccaaaccctgccccacccattgggcacctgtctggatggtcccaggaccgcaggtgctgtggggcacccattggggacttccaggaaatcatttctgcaggatccgttcgcacacacgaagagcacagtgccctcgggaagggccctttccgaccacgctgccccactggggttgggtcaccgggacatacagaggctggtgctgcctggcttctcctgcctgcggtgggagctgggttttgctcccgtttggttttgttttctacctgtcaggctgggcgtctttctgagggttccctgaccggcctctgaattgattgtttgtccacgtgggcctggaagtttctcttaaagactaaatgcccctcactggggaaacgacgctgtgccatgttcacagcagacactcaccccagtgggcctccctttttctctggtcacgttggttacttcataggcctttaggttttgatctgtgtttatggaccacggcacttccttccttccacagtgcggtcagacacaggctttgtgtgtctaacgacagactgtttccagtagtttttctaatactttagttttaaaattttaaataattcacttgttttttggcattgaaaatatttcattcataaatagtttctagttatgatttaaataattttcccatttttgactgtagtttcccagaatcctctttagaatctcagtccttgtgtttgggtcttctccgcgtgccattacctcacctctgttttgtgccacacactctttaaaagtgtcttcccgcggggtttagagttaggaaagtcgcgcacacataggacagagccccagccgcccctcgtggcacccctcccatcccaagggtgcgtttgtcgcagctgggaacccagtgcagcaccccactcagctgctggtttcactgtctcatcattggtggttagactcaagtagtgtggggtatgtgaatctgcctttcagattctcctgatcttttaagcgaatgacacaaagtcaggttttaacaatatcgtgctaactgtgttttctcaggctgttacacctggtgcttgatatggatttgacttgtctattcttttttttttgtttttcttttttctttaattctagaaccacgttcgtttgaagtaggaatgctagtctggcataaacataaaaaataccccttctggccagcagtggtaagaacagcttcctccgtcttctcagatgtagttacttaaatttcatgaatttttattccatccatctttagttcttgataatttgatcaggataaatgttttcattgttttgtttttcctgggaaaagttggtgggtttttagaaaagacttcaggagatgcctgtacctaaattaaggcacaatggtgttaagttgataggccacattttcaccaagcaggcttagaaagacctactcgaaaaaaatatttgcggccgggtgcagtggttcatgcctgtaatcccagcactttgggaggccgaagtgggtggatcacctgaggtcgggagttcgagaccagcctggccaacatggtgaaaccctgactctactaaaaatacaaaaaattagccgggcgtggtggcgtgcgcctgtaatcccagctactcgggaggctgaggcaggagaatggcgtgaacccgagaggtagaggttgcagtgagccaagactgtgccattgtactccagcctgggtgacagagtgagactccgtctccgggggaaagaaaaaggaaaaaaaagaattgtgatttgctcattttaaatattgtgcatttcaccccatgagagctcattaatttggattttgtggtggggttggttgcatgtgtacaaacaggaattcgaaatcctgtccaagttcccggtgtgggtgatgagttcaagccggggcagattctctgcttctgtctctgcaggcctggaagttgcaggtcattggtttgggtgctgtcctggccttcgcctctccttcatatcttacccctttttccctttatcctcctaagacacaaacgccaaaaggcgttggccctgcagtaatccagagacgcctttgttgctctaatgactgacctcactcgagtcacccaggctccttgcatgtgactgattgtggttccgggaaaccggggattgaatctgtgtggtgttcgctggggaggttcaacacgtttatggcctagctgggctccttgtgtcgcctactggccggcggagatggaggccgggcttctggaccctccgccctcccttggcactggtttcctctcccgcaccttggtagtctttcccttgttttcatcagtttctggggtccctgctgggttaacaggtcactgatgtgacaggttcctggggcataagagcaggcagcctccctgagagcgcagggcggaagggccatcggaggcgctggtcgccactgctcctcactgccttctcacggtggccccgggaggccaggactggggaggctgtggggaggtggcagcgccctgtagtccctgcccctccccgtgtggcctgggcttgttcccgagcctttctgcacttcctccactcacccagagcattaggaggacaaacctgccctgctgagccgctggagaatctcaggacgcttatttaaagaggcagctggcagcggtagctgtggttctttttattcaaaaacccaaacaaaactggctgattccgctcagatgggaaaacgttcaagtgatgcgtgtggcagagcatggggccgtttctcagcgcctccttgcgggagacttcgctggggtcacccccagagctggggtcagcgcctgttagatgtatcatgtgatgtcacaaaaaaatatttaaaatccacgatctcttttgttttgacgttttattttcttggatttgtgaacaggtcaaaagcgtcaggcagagagataagaaagcaagtgtgctatacatcgaaggacacatgaacccgaaaatgaaagggtaacccgctgttcttggtttctgtgaatgggcctgaggggccaggccggccgctctcagagtcagagcgggcgtggggatggagggacagaggggaggccccggcaggagtccaggcccgggcagggctagtgaggtctcactggaggtgtgcccttcttgtggcctctcactccctgggatgggtgagtcagacagaggctgggtgtgaagggtctggtcaaacaccccagttttcacaacttgatttgctggctttgaaaggcagcccaaccagacactcactggggccctgtttcccacaaaccagcaaaatgtccacgcaggtgtgcagacagcatccctgcgtccacctgag

SEQ ID NO: 8004 - DNA, 2115 bp, Homo sapiens
tttttcaagcaaggctttccattccattcatttatttattcatcccggagtgctgggattaaaggcaagagccaccactcctggcgcaaggattccgtgtatatatatagaaatacatgtgtacagtgaaaggaaataaaaatggacaagaaggaagtcgagacccctgcagccgttattttttgggcaatagggaattcggtggttcttttggcctttggttttctgggttttctgagctagatttaaccatgctgaaaggctcttgatacacgaagttgccaggcctcaggattctcagagttaaaaccagcattgaatgggaatgtttgaaaacctcactgcagagccaagcctcccatgtgcaatttgcattttccctgtggaagcctgcggttccctgtaggaagccgcctcccttctccttgaagtctcctaggtctcagtttctgcatccacccaatggggatgacagtgaggcggtcagaagtcgcagctggggccaagcggggaggcagccagtggcgcgggctctgcaaggaaatcagtcgcgggccggcgcgaacacggagccctttcagacgctcgggcagcactagatggtcgggcggtcggttatctcagttggtgagcgcgtggtgctgataccgccatggtcgcgggcttgatccccgcaccggccctagtcccagttttttgttggtttgtttctttgttttctccccatgaactgtttctgcaactctttttcaaaatgcgcctttcaggttctgtaagccccatgcgggcaggagcgacttgcgggatctcttggactcggcccagaggttgtcgaggacagcctggcagggaggagcgggagaaacccggccagcgctggggcggtggctcctccccggagtccccgcggctggggcaaagcggaaggcagccagaggcgcgcgggcttggcgaggaatcgctcgtggacgggcgcgaacgtggagcccttttatacgctccaggggcactgtgccgtcgggcggccggttagctcagttggtaagagcgtggtgctgataacaccaaggtcgcgggctcgactcccgcaccggccacggcgttagcttttttttttttttttccccgccgccaccccgccatgaactctttctacaacagtttgtgaaaaatgcgcctttcgggtactgtgagcggcgtgcgggtaggagcgaactgcaggatctcttggtctccccgcccagaggttgtcgagggcagcctgctggggagagcgggaggtaccaggcatgcgctggggcggtggctccgcacccgagtccctgcaccctccgccacctgcaggccactcaggatatccaaagcgatccacatctccggccctcagcccccacccctgccgcccccgcgcttcctgaggctgtggctcccctggaggaatcgcccagtgaagacgggtgctcccagatgtcaccgcctcgtgttcccttggccgccttgcggggaagtcttagggttgaaaatccaggtctgcaatgaatgcattccacagatggtgtgtagggctactgcatgcccagcaccgttctaggcggggagcaaaacggtaagtgagacacaaatcccaagccacgtggagaaagtgaccagccagtagatgcctgccatgtttttagagaggcgttctggttgtggaagcctctggaaaccttctcttgctcttcccccccaccccccgtttcttttcagagacatcttaggcttcacatttcttcctcttggttctgcattttgcagccagagcaagtggatgagtttctcgctggtggttcaagtttctggggtggtcaggtgtgctccgttgaacgaagccagttgtgtagggtcagtgccattttctgtcacgatccagcaggggctccacctgcttttgaaaactctccagtggaaacatctactaactctgacctaaatcagtagctgctcaaaatctacagactactggcttaaaaccttggtaagtgcccagggtgtagtgaaagttctcaataaacgccggctggtggcgctgctgctactataagcaacgttaggagagcctgggtcggctgacac

SEQ ID NO: 8005 - DNA, 2708 bp, Homo sapiens
tttttcaagcaaggctttccattccattcatttatttattcatcccggagtgctgggattaaaggcaagagccaccactcctggcgcaaggattccgtgtatatatatagaaatacatgtgtacagtgaaaggaaataaaaatggacaagaaggaagtcgagacccctgcagccgttattttttgggcaatagggaattcggtggttcttttggcctttggttttctgggttttctgagctagatttaaccatgctgaaaggctcttgatacacgaagttgccaggcctcaggattctcagagttaaaaccagcattgaatgggaatgtttgaaaacctcactgcagagccaagcctcccatgtgcaatttgcattttccctgtggaagcctgcggttccctgtaggaagccgtctcccttctccttgaagtctcctaggtctcagtttctgcatccacccaatggggatgacagtgaggcggtcagaagtcgcagctggggccaagcggggaggcagccagtggcgcgggctctgcaagaaaatcagtcgcgggccggcgcgaacacggagccctttcagacgctcgggcagcactagatggtcgggcggtcggttatctcagttggtgagcgcgtggtgctgataccgccatggtcgcaggcttgatccccgcaccggccctagtcccagttttttgttggtttgtttctttgttttctccccatgaactgtttctgcaactctttttcaaaatgcgcctttcaggttctgtaagccccatgcgggcaggagcgacttgcgggatctcttggactcggcccagaggttgtcgaggacagcctggcagggaggagcgggagaaacccggccagcgctggggcggtggctcctccccggagtccccgcggctggggcaaagcggaaggcagccagaggcgcgcgggcttggcgaggaatcgctcgtggacgggcgcgaacgtggagcccttttatacgctccaggggcactgtgccgtcaggcggccggttagctcagttggtaagagcgtggtgctgataacaccaaggtcgcgggctcgactcccgcaccggccacggcgttagctttttttttttttttcccgccgccaccccgccatgaactctttctacaacagtttgtgaaaaatgcgcctttcgggtactgtgagcggcgtgcgggtaggagcgaactgcaggatctcttggtctccccgcccagaggttgtcgagggcagcctgctggggagagcgggaggtaccaggcatgcgctggggcggtggctccgcacccgagtccctgcaccctccgccacctgcaggccactcaggatatccaaagcgatccacatctccggccctcagcccccacccctgccgcccccgcgcttcctgaggctgtggctcccctggaggaatcacccagtgaagacgggtgctcccagatgtcaccgcctcgtgttcccttggccgccttgcggggaagtcttagggttgaaaatccaggtctgcaatgaatgcattccacagatggtgtgtagggctactgcatgcccagcaccgttctaggcggggagcaaagcggtaagtgagacacaaatcccaagccacgtggagaaagtgaccagccagtagatgcctgccatgtttttagagaggcgttctggttgtggaagcctctggaaaccttctcttgctcttcccccccaccccccgtttcttttcagagacatcttaggcttcacatttcttcctcttggttctgcattttgcagccagagcaagtggatgagtttctcgctggtggttcaagtttctggggtggtcaggtgtgctccgttgaacgaagccagttgtgtagggtcagtgccattttctgtcacgatccagcaggggctccacctgcttttgaaaactctccagtggaaacatctactaactctgacctaaatcagtagctgctcaaaatctacagactactggcttaaaaccttggtaagtgcccagggtgtagtgaaagttctcaataaacgccggctggtggcgctgctgctactataagcaacgttaggagagcctgggtcggctgacacctgcaatagaaacctgtacgcaacaagttggatgtcacatcttgcagtagtcgtgccgggttagatgcagggacagagcacggaggagtcggtggaggctgctgccctcaagtttcctgaacttgaaggggtttagaatgtgccacggtggcgtgaaaattattttgagcagaaggcatttgaattcctgaaatttcttgtctgctgaaaagcagagcttcccaaaagatctcaaaagaactcagttgtcataaatcccttcttgggaaggaactaggaaagattgacttgggccaggcgcagtggttcacgcctgtaattccagcactttgggaggcctaggcaagtggatcatctgagcccaggagttggagaccagcccgggcaacatggtgagatcctctctctattaaaaaaaaaaaaaaaaaaaagaaacgaaaattagctgggcatggtagcgcatgcctgtagtccgagctactccagaggctgaggtggaaggatcacctgagcccgggaagtcgaggttgtagcgagctgagatggcgccactgcactccagcctgggcaacagagtgagaccctgtctaaaaac

SEQ ID NO: 8006 - DNA, 335 bp, Homo sapiens
cgctgtgacattgttgggtatcttttcagcaataccccactcccggtaccaatttactatattagtctgtttttatgccactgatacagacatacccaagactgggaagaaaaggagctttaatttgactgacagttccacaggctgaggaagtctcgtaattatggcggagggcgaaaggcacttcttccatggtggcagcaagagaaaatgaggaggaagcaaaagcagaaaccctgataaacccattagatctcatgagacttattcactatcaccagaatagcacaggaaagaccggccaccatgattcaggtacttcccctgggtccctc

SEQ ID NO: 8007 - DNA, 335 bp, Homo sapiens; identical to SEQ ID NO: 8006

SEQ ID NO: 8008 - DNA, 7255 bp, Homo sapiens
aaaaaaattactcattccagcgctggggcagagaaaatacaagatgagcttagaacatcttgtgccagaaagtaaaaaagtgctgacagagtaatggagacaaatcaaaaacacaacaagtcagcttggaatgtctaccactggcctaatcttggggaattggagcatcagaatcatgagctttccttctcccttatttattggttttatttctccatgtagaccaaagaagagaataagaaaataatcatctggcaaccatcatagtaataattgttcaaacacaagtcatccatgaaatgctaaatctagtgggttctgaggagtaaccagatatttacagagcctcaaagtatctccatacaaaatatggttgaactacaaaaacaaaatagtagcattagcatggacaaacctggcaggtactccttaagtctcctaagtaataaaaactgtaaactgcaaataagccttcgatgacctttactaacctttactaaagtatcaatgatgacttggttgtttaaacagctgatatttgggcaatttgagtatgtcaaactaaataatacttgttttcatttgcaagatccacttaaaacttaaggaggctaaaaaacatcatttaaaataccctataaattatcatcgtacatatgatacaaaaatatcctacttcagtaaatattgtaatgttatatattttatgagaaacaattaaaatgtgtaaatagcccagtaataaagttttataatcttttaaatcatacaatttttccttaaaactttatggctaaatattctcttcattagatgtggcttaccagtggattctagagaagaaaatagatgggagcaagtgtccaacacagcaacagctagaaagaaaaataaagaattatgtcctttacctaaagcacttcagttaactaaatgtgagtttaaaaactaaagagttgtgaactttatcagagtttataagtatgagaaatatgtatgtacatttacaatacaaaattactatttaataatttacacatggcattaattctaattgtgtttaaatatcagagctttttcattcttcattcatgtaatcaacagccatgtgccaaggtactagaaccagcactgtaattacaagaggaagatggtgtggtccacctctcaacagtcatatgctataacctaaaaaaacagacaggcaggtaatgtccatatagagtcatagataccatgacaggtatacagcagggcactactggaacacacagaagggacacctacccacttttatgtcaacatcatgggctttctgatggaggagatatcataggttgatacctgaaggacaaggaaaagcttgccagatagagggaagaggcaaaggcaaagagcctgagatgaggaagagccctgcagagttccactccatcaagtttgggctacagcaaagggtagagtgaagtaagtggtgagagacaaggctgagtaacttgacaagaattacattgacatgggtgtttttatttcatggtgaaaaatctggaatgtttcctgagaacaagtgtaagccaatgacacagtaaatgacaggagatttaaaatgtcacctgtcaagtgactgcttatgaagggttattgctcaactaagcatttctgaatgagtctaaggtctgttggccttcaatttctaccaaaaccctgagaacttgatgatgcctgtgttttctgagaatcgtttcagtgtgctggctgacagttccatgaggatggcaaaacttaagaaagtgtagagccagtgaaaaagagatgcacagacttcttgggaattttttaagctacagaacatgatgaatttatggtgcataagtacagtcttctctgtgaaagtttttgttttcacatctttcattagatgtgtgtaagaaaaaaaatacttgacgtagtatctactaacccaagaatgaaaaggaatgccatttgctatttacactttatttctaaaataaacctaaatttaattaataaattttggcaacatacttctctttgtttctctaattatttgttccacacagtccagctccatctaaaataagtaaaaataataataatgtttaagttaaacaagaaacattatcatgaaaataatgtatcatttacaaaatgtggcctttagtatttttagtgactagacataacttgaagtttgcttaaatagaaaaataatcacataaataaagtaaaatttctacttattttaagtttagataacagaggatgtatatgtgtaatgctgtttagagtaatcggacaaaaatacagttaatattgatctattgcatatacatgattttagaaaggtagtgttttattagtacaaaggttaaacaatggccaggcatggtggctcatacctgtaatcccagcacttggggaggccaaagcaggcagatcacaaggtcaggagatcgtgaccatcctggcctacatggggaaaccccatctctactaaaaatacaaaaattagctgggcgtggtgatgcgaacctgtagtcccagctacttgggaggctaaggcaggagaattgcttgaagccaggaaatggaggttgcagtgagccaagactgcaccactgcactccagcctggtgacggtgagaccttgtctcaaaaaaaaaaaaaaaaagattaagtaattaaagccatcttttgcaatgaatgcattgctttgaaattcttagaaaactctgccctttataaaagtttaatccattttttacttcaataaattttatcttaaaaagaaatttctattctctacttatagtaaacttttctttcttttttttttttttttttagtttatattctaaattaaggtggtacctctgtaggattcttccaaaggcatattgagggatgccgaggtttgcagtacagttgagcccatcacacaggtagtgagcgtaggacccagtaagtagtttttcaaccctggcccactctgtccctccctgctcttatttcctagtgtctattattcccatgtttatgacaatgtgcacccaatgtgtagcttccacatgagtgaaaacatgagatacttggtttctgtttctgcattggtttgcttaggagagtggattccagctgtatccatgttgctgcaaatgatgtcactttgttctttttatggctgcttagtattccatggtatatatggaattttccaatctaccttggattttcaatctaccttggatgcacctggattgactccatgtctttgctattgtgaatagtgctgcaatgaacatacatgtgcatgcatctttttgttacaatgatttattgtcctttcagtataaccctagtatagtaatggggttgctgcatccaatggtcattcttagttcttaatttccaaactgctgtccatagtagcagaattaatttgcattgccacaaacggtgtgtgttcccttttctccacagcctccccaacatcttttatttatttatttatttattttactttttaacaaaagtcattctgactggtgtgaaatggtatctcactgatgttttgtttggcatttttctgattagcaatggtaagcatttgttaatgtttgttggccacttacatgtgttattttgagaagagtctgttcatgtcctttgcccatttttaatggtgttatttattttttgcttgttgatttgtttaggtctcttatagattctggataataggataatatgcatttgctatacccatagtttgtgaatattttcttccattctttaggctgtctgtttaatcccgtgatagtttctcgtgctgtgcagctctttagctaaattagatcacacttgtcaatttttgttattcttgcaattgcttttgaggacttagccataaattgacaaatatgatgtctagaagagtatttcctaggttttcttccaggatttttatagccagaagatgtactcttatgtaagaaaagcacaagcctttttttttttttttttttttttgagacggagtctccatcacccaggctatagtgcagtggtatgatcttggcttactgcaacctctgtctcctgggttcaagtgattctcctgcctcagcctcctgagtatctgagattacacatgcctgccaacatgccttgctaatttttgtatttttactagagacaggtttcatcatgttgaccaggctgatctcaaactcctgacctcaggtgattcacctgccttggcctccccaaattttgggattacaagtgtgagccaccacgcctggccaagcacaaagcttttaacataaaaatggaaatgaacattttagtgtttggtttaattcataaaatgcaattattttggattctcctaaataataaacatccatatgtggtaaagtgtttggatgccaatcattcagttgtgattatgggtgggaagagttgagatggtgcaaataaacttttttctaattttttattttcaagacggagtctttccctgttacccaggctggagtgcagtggtgcaatctcagctcctgcaacctctgtctcccaggttcaagcaattctctgcctcagccttcctagtagctgggattacaggtgcccgccaccacacctggcttttttttttttttttttttgtacttttagtagagacggggtttcaccatcttggccaggctggtcttgaacttctgacctcgtgacattcctgcctcggcctcccaaagtgctgggattacaggcatgagccaccgcacctgcctggtgcaaagaaactttaaaagtgacaagggccgggtgcggtggctcatcctgtaatcccagcactttgagaggctgaggcaggcagatcacaaggtcaggagttcaagaagagcctggccaatatggtgaaaccctgtctctactaaaaatacaaaccttagctgggtgtaatggtgggtgcttgtagtctcagctacttgggaggctgaggcaggagaatcacttgaacccgggaggtggaggttgcagtgagtggagatggcaccacaacactccagcctgggtgacagagtgagacactgcctcaaaaaaaagaaagaaaaatgtggtatgaaccacagccaaactacaatcaattagagagtaagccaaagtatctcaaagtatatcatcagttataaggcaataacatgcaatttctaaaacctaacttaaatgcagcttttaaagacattttaaacatgtcagtttagtcacatttattgaataaagttagcaaatggatatctctcaaaaatgagagctccagggaattaaaaaatgtaaagttcccatttcctttctgtgttaacacagctaattatgatctttacttaacatgcataagtcaacagaacaactcagtatttcaccaaattaaaaacaagaattacgctagagaaatgaaaccctaaagagaaacggtcatataacgaacctcagtcaagtagttctggcagttatttgaggtctgagggtttgaagtaggaattcttacgggcatttggggaatatattttctgttgagtcctatactagtaagattttcaacacaaggtgactctgggcctcgccttgtaggaagagtgctgagaaaatatttcacccgctctttctccataaggagcttggtgctgatcattgctattttcttattagatctataaagatagcaaagacaaatgcttagtatttcatttttccttaaatgattcttaatgacttgtagtttttaaaaacttgccctgagagtaaaccaaattacccactaaacagtgttttcacactgaagatgtgtgagagcatacctattgtaaggaattatacttttaaaatcactctaaagaagcacctgtgtttctaaggtgatttatactgaagaagcagctcaaacaaagtagacagggaagagaaatggctaccagtgatgtatggctcaacgggtaaaacttgctgccttctaaaatggctctacctgtaagattctgaagattccacttgaaatacttgtatttaaagggtaacaacatgggaaaaggaatatgttgatttgcttgattataagaaccacttcactagaaataattatatcaaaacatcatgttgtgctccttaatgtaggttaagaaaactaaaatgaacaaaaaaaatctaggaatacttgtgtttagtaaaccagtttcaggtttcacccttgtacatttcaccaattatctaggaccaattaaacatttggtaatgaggaataattcagagcaacaactcctaggggagaactagattgtttggttgttgatcaaaaagaactaaagcatctctgaaggcaattagcccccagcactgtgaccaaggcactggaggtggggcttgttctttttgccttccacacaccccttcagactgaacaaggtgttattttttaaccgctttgtgaattacacttctttaaattcctgtgataattattccctatttcataaggatgcctttctataacatcttgaatatgttacacaggtagtctttcttgaggcaccctctagtcataatactaaagatcacaattaaaaacgattgtgcccagagtagcagtaccacttgacactttgggtttaggtcgtgatctactgaaaaataaactcattaatattactatttagggaaattctgacaagtaatttaaaacaagatcactttattaattataaagcttcaaaaatacttagtaaaaaaacttacagattaactacaagagacttttcaggagaaaaaagccatacaaaagcaaaaaaaaaaaaaaaatgagaggagagacagaaactatccttgaataacattttaaaggtaagattacttactaacattattttccaaaattacattgtcaaattagcattgacttcctactaatatcctgaagccatctcactaaaaattatgctttcaaaacaaattattgagctgaattcattttctataagtgtatgtttggacttacttcgttaatttttttgacatggaattgttagctttcaatgctactgcaaaggcttccttgtattcttctaatttggttgtaacctcttcataagtagttttcattttggagaatttacattccacatctttaagtgtgagttccttcttatttagtgaagccgtattacccttgtttaac

SEQ ID NO: 8009 - DNA, 7255 bp, Homo sapiens
aaaaaaattactcattccagcgctggggcagagaaaatacaagatgagcttagaacatcttgtgccagaaagtaaaaaagtgctgacagagtaatggagacaaatcaaaaacacaacaagtcagcttggaatgtctaccactggcctaatcttggggaattggagcatcagaatcatgagctttccttctcccttatttattggttttatttctccatgtagaacaaagaagagaataagaaaataatcatctggcaaccatcatagtaataattgttcaaacacaagtcatccatgaaatgctaaatctagtgggttctgaggagtaaccagatatttacagagcctcaaagtatctccatacaaaatatggttgaactacaaaaacaaaatagtagcattagcatggacaaacctggcaggtactccttaagtctcctaagtaataaaaactgtaaactgcaaataagccttcgatgacctttactaacctttactaaagtatcaatgatgacttggttgtttaaacagctgatatttgggcaatttgagtatgtcaaactaaataatacttgttttcatttgcaagatccacttaaaacttaaggaggctaaaaaacatcatttaaaataccctataaattatcatcgtacatatgatacaaaaatatcctacttcagtaaatattgtaatgttatatattttataagaaacaattaaaatgtgtaaatagcccagtaataaagttttataatcttttaaatcatacaatttttccttaaaactttatggctaaatattctcttcattagatgtggcttaccagtggattctagagaagaaaatagatgggagcaagtgtccaacacagcaacagctagaaagaaaaataaagaattatgtcctttacctaaagcacttcagttaactaaatgtgagtttaaaaactaaagagttgtgaactttatcagagtttataagtatgagaaatatgtatgtacatttacaatacaaaattactatttaataatttacacatggcattaattctaattgtgtttaaatatcagagctttttcattcttcattcatgtaatcaacagccatgtgccaaggtactagaaccagcactggaattacaagaggaagatggtgtggtccacctctcaacagtcatatgctataacctaaaaaaacagacaggcaggtaatgtccatatagagtcatagataccatgacaggtatacaacagggcactactggaacacacagaagggacacctacccacttttatgtcaacatcatgggctttctgatggaggagatatcataggttgatacctgaaggacaaggaaaagcttgccagatagagggaagaggcaaaggcaaagagcctgagatgaggaagagccctgcagagttccactccatcaagtttgggctacagcaaagggtagagtgcagtaagtggtgagagacaaggctgagtaacttgacaagaattacattgacatgggtgtttttatttcatggtgaaaaatctggaatgtttcctgagaacaagtgtaagccaatgacacagtaaatgacaggagatttaaaatgtcacctgtcaagtgactgcttatgaagggttattgctcaactaagcatttctgaatgagtctaaggtctgttggccttcaatttctaccaaaaccctgagaacttgatgatgcctgtgttttctgagaatcgtttcagtgtgctggctgacagttccatgaggatggcaaaacttaagaaagtgtagagccagtgaaaaagagatgcacagacttcttgggaattttttaagctacagaacatgatgaatttatggtgcataagtacagtcttctctgtgaaagtttttgttttcacatctttcattagatgtgtgtaagaaaaaaaatacttgacgtagtatctactaacccaagaatgaaaaggaatgccatttgctatttacactttatttctaaaataaacctaaatttaattaataaattttggcaacatacttctctttgtttctctaattatttgttccacacagtccagctccatctaaaataagtaaaaataataataatgtttaagttaaacaagaaacattatcatgaaaataatgtatcatttacaaaatgtggcctttagtatttttagtgactagacataacttgaagtttgcttaaatagaaaaataatcacataaataaagtaaaatttctacttattttaagtttagataacagaggatgtatatgtgtaatgctgtttagagtaatcggacaaaaatacagttaatattgatctattgcatatacatgattttagaaaggtagtgttttattagtacaaaggttaaacaatggccaggcatggtggctcatacctgtaatcccagcacttggggaggccaaagcaggcagatcacaaggtcaggagatcgtgaccatcctggcctacatggggaaaccccatctctactaaaaatacaaaaattagctgggcgtggtgatgcgaacctgtagtcccagctacttgggaggctaaggcaggagaattgcttgaagccaggaaatggaggttgcagtgagccaagactgcaccactgcactccagcctggtgacggtgagaccttgtctcaaaaaaaaaaaaaaaagattaagtaattaaagccatcttttgcaatgaatgcattgctttgaaattcttagaaaactctgccctttataaaagtttaatccattttttacttcaataaattttatcttaaaaagaaatttctattctctacttatagtaaacttttctttctttttttttttttttttagtttatattctaaattaaggtggtacctctgtaggattcttccaaaggcatattgagggatgccgaggtttgcagtacagttgagcccatcacacaggtagtgagcgtaggacccagtaagtagtttttcaaccctggcccactctgtccctccctgctcttatttcctagtgtctattattcccatgtttatgacaatgtgcacccaatgtgtagcttccacatgagtgaaaacatgagatacttggtttctgtttctgcattggtttgcttaggagagtggattccagctgtatccatgttgctgcaaatgatgtcactttgttctttttatggctgcttagtattccatggtatatatggaattttccaatctaccttggattttcaatctaccttggatgcacctggattgactccatgtctttgctattgtgaatagtgctgcaatgaacatacatgtgcatgcatctttttgttacaatgatttattgtcctttcagtataaccctagtatagtaatggggttgctgcatccaatggtcattcttagttcttaatttccaaactgctgtccatagtagcagaattaatttgcattgccacaaacggtgtgtgttcccttttctccacagcctccccaacatcttttatttatttatttatttattttactttttaacaaaagtcattctgactggtgtgaaatggtatctcactgatgttttgtttggcatttttctgattagcaatggtaagcatttgttaatgtttgttggccacttacatgtgttattttgagaagagtctgttcatgtcctttgcccatttttaatggtgttatttattttttgcttgttgatttgtttaggtctcttatagattctggataataggataatatgcatttgctatacccatagtttgtgaatattttcttccattctttaggctgtctgtttaatcccgtgatagtttctcgtgctgtgcagctctttagctaaattagatcacacttgtcaatttttgttattcttgcaattgcttttgaggacttagccataaattgacaaatatgatgtctagaagagtatttcctaggttttcttccaggatttttatagccagaagatgtactcttatgtaagaaaagcacaagccttttttttttttttttttttttttgagacggagtctccatcacccaggctatagtgcagtggtatgatcttggcttactgcaacctctgtctcctgggttcaagtgattctcctgcctcagcctcctgagtatctgagattacacatgcctgccaacatgccttgctaatttttgtatttttactagagacaggtttcatcatgttgaccaggctgatctcaaactcctgacctcaggtgattcacctgccttggcctccccaaattttgggattacaagtgtgagccaccacgcctggccaagcacaaagcttttaacataaaaatggaaatgaacattttagtgtttggtttaattcataaaatgcaattattttggattctcctaaataataaacatccatatgtggtaaagtgtttggatgccaatcattcagttgtgattatgggtgggaagagttgagatggtgcaaataaacttttttctaattttttattttcaagacggagtctttccctgttacccaggctggagtgcagtggtgcaatctcagctcctgcaacctctgtctcccaggttcaagcaattctctgcctcagccttcctagtagctgggattacaggtgcccgccaccacacctggcttttttttttttttttttttgtacttttagtagagacggggtttcaccatcttggccaggctggtcttgaacttctgacctcgtgacattcctgcctcggcctcccaaagtgctgggattacaggcatgagccaccgcacctgcctggtgcaaagaaactttaaaagtgacaagggccgggtgcggtggctcatcctgtaatcccagcactttgagaggctgaggcaggcagatcacaaggtcaggagttcaagaagagcctggccaatatggtgaaaccctgtctctactaaaaatacaaaccttagctgggtgtaatggtgggtgcttgtagtctcagctacttgggaggctgaggcaggagaatcacttgaacccgggaggtggaggttgcagtgagtggagatggcaccacaacactccagcctgggtgacagagtgagacactgcctcaaaaaaaagaaagaaaaatgtggtatgaaccacagccaaactacaatcaattagagagtaagccaaagtatctcaaagtatatcatcagttataaggcaataacatgcaatttctaaaacctaacttaaatgcagcttttaaagacattttaaacatgtcagtttagtcacatttattgaataaagttagcaaatggatatctctcaaaaatgagagctccagggaattaaaaaatgtaaagttcccatttcctttctgtgttaacacagctaattatgatctttacttaacatgcataagtcaacagaacaactcagtatttcaccaaattaaaaacaagaattacgctagagaaatgaaaccctaaagagaaacggtcatataacgaacctcagtcaagtagttctggcagttatttgaggtctgagggtttgaagtaggaattcttacgggcatttggggaatatattttctgttgagtcctatactagtaagattttcaacacaaggtgactctgggcctcgccttgtaggaagagtgctgagaaaatatttcacccgctctttctccataaggagcttggtgctgatcattgctattttcttattagatctataaagatagcaaagacaaatgcttagtatttcatttttccttaaatgattcttaatgacttgtagtttttaaaaacttgccctgagagtaaaccaaattacccactaaacagtgttttcacactgaagatgtgtgagagcatacctattgtaaggaattatacttttaaaatcactctaaagaagcacctgtgtttctaaggtgatttatactgaagaagcagctcaaacaaagtagacagggaagagaaatggctaccagtgatgtatggctcaacgggtaaaacttgctgccttctaaaatggctctacctgtaagattctgaagattccacttgaaatacttgtatttaaagggtaacaacatgggaaaaggaatatgttgatttgcttgattataagaaccacttcactagaaataattatatcaaaacatcatgttgtgctccttaatgtaggttaagaaaactaaaatgaacaaaaaaaatctaggaatacttgtgtttagtaaaccagtttcaggtttcacccttgtacatttcaccaattatctaggaccaattaaacatttggtaatgaggaataattcagagcaacaactcctaggggagaactagattgtttggttgttgatcaaaaagaactaaagcatctctgaaggcaattagcccccagcactgtgaccaaggcactggaggtggggcttgttctttttgccttccacacaccccttcagactgaacaaggtgttattttttaaccgctttgtgaattacacttctttaaattcctgtgataattattccctatttcataaggatgcctttctataacatcttgaatatgttacacaggtagtctttcttgaggcaccctctagtcataatactaaagatcacaattaaagacgattgtgcccagagtagcagtaccacttgacactttgggtttaggtcgtgatctactgaaaaataaacccattaatattactatttagggaaattctgacaagtaatttaaaacaagatcactttattaattataaagcttcaaaaatacttagtaaaaaaacttacagattaactacaagagacttttcaggagaaaaaagccatacaaaagcaaaaaaaaaaaaaaaaatgagaggagagacagaaactatccttgaataacattttaaaggtaagattacttactaacattattttccaaaattacattgtcaaattagcattgacttcctactaatatcctgaagccatctcactaaaaattatgctttcaaaacaaattaatgagctgaattcattttctataagtgtatgtttggacttacttcgttaatttttttgacatggaattgttagctttcaatgctactgcaaaggcttccttgtattcttctaatttggttgtaacctcttcataagtagttttcattttggagaatttacattccacatctttaagtgtgagttccttcttatttagtgaagccgtattacccttgtttaac

SEQ ID NO: 8010 - DNA, 2352 bp, Homo sapiens
catctaccctattcctgagtgtcagagtgtgaggaagggagggacatttggcaaatgagacaccctgtgctgttgggtctcccagggcccttcccatacagccccgatctaaagacacaacacaaaggctacaggaagactaatccagaacctctgagtctcagacagggaccacctgaggactctccccagacagccagaaggccctttgctagtttcttggtacctcagtggatgtggcagcagttcttctgttggggaccagtgagtacacgctggggagggctcacctgtgcttcctcattggctccacttctgcttctaaaaaaaattactcattccagagctggggcagagaaaatacaagatgagcttagaaaatcttctgccagaaagtaaaaaagtgctgacagagtaatggagacaaatcaaagagacataaagtcaggttggaatgtctactactggcctaatcttggggaattggagcatcagaatcatgagctttccttctcccttatttattggttttatttctccatgtagaacaaagaagagaataagaaaataatcatctggcaaccatcaaagtaataattgttcaaacacaagtcatccatgaaatgctaaatctagtgggttctgaggagttaccagatatttacagagcctcaaagtatctccatacaaaatacggttgaactacaaaaagaaaatcataacattagtatggacaaacctggcaggtactccttaagtctcctaagtaataaaaactgtaaaatgcaaataagcctttgatgacctttactaacctttactaaagtatcgatgacgtggttgtttaaacagctgacatttgggcaatttgagtatgtcaaactcaataatactggttttcatttgcaagatccacttaaaacttaaggaggttaaaaaacatcatttaaaataccctataaattatcttcatacatatgatacaaaaatatcctacttcagtaaatgttgtaatgttatatattttgtgagaaacaattaaaacgtgtaaatagcctggtaataaagttttataatcctttaaatcatacaatttttccttaagactttatggttaaatattctctttgttagatatggcttaccagtggattctagagaagaaagtagatgggagcaagtgtccaacacagcaacagctggaaagaaaaataaagaattatgttctttacctaaaacacttcagttaactaagtgtgcgtttaaaaactaaagagttgagaactttatcagatttaataagaatgagaaatatgtatgtacatttacaatacaaaattactatttaataaattacacatggcattaattctaattgtgtttaaataccagagctttttcattcttcattcatgtaatcaacagccacatgctaaggtactagaaccagcactggaattgcaagatgaagatggcatggtccacctctcaacaatcatatgctataaactaaaaaaacagacaggaaggcaatgtccatatagagtcatagatactatgataggtatagagcagagcactactggaacacacagaagtgacatctacccacttttatgtcaatatcatgggctttctggtggaggagataacatagattgatacctgaaggacaaggaaaagtttcccagatagagggaagaggcgaaggcaaagagcctgaggtgaggaagagccctgcagagtccactccatccagtttggtgctaaagcaaagggcagagtgcagtaactggtgagagacaaggctgagtaacttgatgagaattactttgacatgggagtttttatttcatggtgaaaaatatggaacttttcctgagaacaagtgtaagccactgacacagtaaatgacaggagatttaaaaggccacctgtcaagtgactgcttatgaagggttattgctcagctaagtatttctgaatgagtcttaggtctgttggccttcaatctctaccaaaacctttgttttttgatgatgcctttgttttctgagaatcgtttcagtgtgctggctgacagttccatgaagatggcgaaacttaagaaagtgtagagccagtgaaaaagagatgcccagacttcttaggaattgtttaagctatggaacatgatgaatttatggtgcataagtacagtcttctctgtgaaagtttttgttttcacatctttcatttgaagtgtgtaagaaaaaaatgcttgatgtagtatctactaacccaagaatgaaaaggaatgtcatttgctatttacactttatttctaaaataaacctgaatttaattaataaa

SEQ ID NO: 8011 - DNA, 2353 bp, Homo sapiens
catctaccctattcctgagtgtcagagtgtgaggaagggagggacatttggcaaatgagacaccctgtgctgttgggtctcccagggcccttcccatacagccccgatctaaagacacaacacaaaggctacaggaagactaatccagaacctctgagtctcagacagggaccacctgaggactctccccagacagccagaaggccctttgctagtttcttggtacctcagtggatgtggcagcagttcttctgttggggaccagtgagtacacgctggggagggctcacctgtgcttcctcattggctccacttctgcttctaaaaaaaattactcattccagagctggggcagagaaaatacaagatgagcttagaaaatcttctgccagaaagtaaaaaagtgctgacagagtaatggagacaaatcaaagagacataaagtcaggttggaatgtctactactggcctaatcttggggaattggagcatcagaatcatgagctttccttctcccttatttattggttttatttctccatgtagaacaaagaagagaataagaaaataatcatctggcaaccatcaaagtaataattgttcaaacacaagtcatccatgaaatgctaaatctagtgggttctgaggagttaccagatatttacagagcctcaaagtatctccatacaaaatacggttgaactacaaaaagaaaatcataacattagtatggacaaacctggcaggtactccttaagtctcctaagtaataaaaactgtaaaatgcaaataagcctttgatgacctttactaacctttactaaagtatcgatgacgtggttgtttaaacagctgacatttgggcaatttgagtatgtcaaactcaataatactggttttcatttgcaagatccacttaaaacttaaggaggttaaaaaacatcatttaaaataccctataaattatcttcatacatatgatacaaaaatatcctacttcagtaaatgttgtaatgttatatattttgtgagaaacaattaaaacgtgtaaatagcctggtaataaagttttataatcctttaaatcatacaatttttccttaagactttatggttaaatattctctttgttagatatggcttaccagtggattctagagaagaaagtagatgggagcaagtgtccaacacagcaacagctggaaagaaaaataaagaattatgttctttacctaaaacacttcagttaactaagtgtgcgtttaaaaactaaagagttgagaactttatcagatttaataagaatgagaaatatgtatgtacatttacaatacaaaattactatttaataaattacacatggcattaattctaattgtgtttaaataccagagctttttcattcttcattcatgtaatcaacagccacatgctaaggtactagaaccagcactggaattgcaagatgaagatggcatggtccacctctcaacaatcatatgctataaactaaaaaaacagacaggaaggcaatgtccatatagagtcatagatactatgataggtatagagcagagcactactggaacacacagaagtgacatctacccacttttatgtcaatatcatgggctttctggtggaggagataacatagattgatacctgaaggacaaggaaaagtttcccagatagagggaagaggcgaaggcaaagagcctgaggtgaggaagagccctgcagagttccactccatccagtttggtgctaaagcaaagggcagagtgcagtaactggtgagagacaaggctgagtaacttgatgagaattactttgacatgggagtttttatttcatggtgaaaaatatggaacttttcctgagaacaagtgtaagccactgacacagtaaatgacaggagatttaaaaggccacctgtcaagtgactgcttatgaagggttattgctcagctaagtatttctgaatgagtcttaggtctgttggccttcaatctctaccaaaacctttgttttttgatgatgcctttgttttctgagaatcgtttcagtgtgctggctgacagttccatgaagatggcgaaacttaagaaagtgtagagccagtgaaaaagagatgcccagacttcttaggaattgtttaagctatggaacatgatgaatttatggtgcataagtacagtcttctctgtgaaagtttttgttttcacatctttcatttgaagtgtgtaagaaaaaaatgcttgatgtagtatctactaacccaagaatgaaaaggaatgtcatttgctatttacactttatttctaaaataaacctgaatttaattaataaa

SEQ ID NO: 8012 - DNA, 373 bp, Homo sapiens
tatgccaactggtcttaatcatcaaatgactccatagtaagaatcattactctgaaagattgattttgttataataatggaaatttaaatatttaaaagaaaaaacagatgccatttttttttctaaaactctacaaagcaaattgctacaagagaggcagaggaaacacaatatacacatatccaaaatataatttgcagtgaaataaaggaaagcacattacagataaacttacctgatttaaaaaactaacctgtaaatggatttcttctaatttttctactgccgtcattgccctttcatctagctccgatttatattcttgtagtttactaagttctaccatattgtcttccatatgtgtcttaagat

SEQ ID NO: 8013 - DNA, 373 bp, Homo sapiens; identical to SEQ ID NO: 8012

SEQ ID NO: 8014 - DNA, 1455 bp, Homo sapiens
ttgtctcaatatacgaaaatcaataaatgtaatccagcatataaacagagccaaagaccaaaaccacatgattatctcaatagatgcagaaaaagccattgacaaaattcaacaacgcttcatgctaaaaactctcaataaattaggtattgatgggacatatttcaaaataataagagctatctatgacaaacccacagccaatatcatactgaatgggcaaaaactggaagcattccctttgaaaactggcacaagacagggatgccctctctcaccactcctattcaacatggtgttggaagttctggccagggcaattaggcaggagaaggaaataaagggtatgcaattaggaaaagaggaagtcaaattgtccctgtttgcagatgacacaattgtatatctagaaaaccccattgtctcagcccaaaatctccttaagctgataagcaacttcagcaaagtgtcaggatacaaaatcaatgtacaaaaatcacaagcattcttatacaccaacaacagacaaacagagagccaaatcatgagtgaactgccattcacaatttcttcaaagagaataaaatacctaggaatccaacttacaagggatgtgaaggacctcttcaaggataactacaaaccactgctcaaggaaataaaagaggatacaaacaaatggaagaacattccatgctcatgggtaggaagaatcaatatcgtgaaaatggccatactgcccaaggtaatttacagattcaatgccaaccccatcaagctaccaatgactttcttcacagaattggaaaaaacgactctaaagttcatatggaaccaaaaaagagcccatatcgccaagtcaatcctaagccaaaagaacaaagctggaggcatcacactacctgacttcaaactatactacaagtctacagtaaccaaaacagcatggtactggtaccaaaacagagatatagatcaatggaacagaactgagccctcagaaataaagccgcatatctacaactatctgatctttgacaaacctgcgaaaaacaagcaatggggaaatgattccctatttaataaatggtgctgggaaaactggctagccatatgtagaaagctgaaactggatcccttccttacaccttatacaaaaatcaattcaagatggattaaagacttaaacgtaagacctaaaaccataaaaaaatctagaagaaaccctaggcaatatcattcaggacagagccatgggcagagacttcatcactagaacacaaaaagcaatggcaacaaaagccaaaattgacaaatgggatctaactaaactaaacagtatctgcagtgcaaaagaaactattatcagagtgaacaggcaacccacagaatgggagaaaattgttgcaatctatccatctgacaaagggctaatatgcagaatctacaaagaac

SEQ ID NO: 8015 - DNA, 2351 bp, Homo sapiens
ttgtctcaatatacgaaaatcaataaatgtaatccagcatataaacagagccaaagaccaaaaccacatgattatctcaatagatgcagaaaaagccattgacaaaattcaacaacgcttcatgctaaaaactctcaataaattaggtattgatgggacatatttcaaaataataagagctatctatgacaaacccacagccaatatcatactgaatgggcaaaaactggaagcattccctttgaaaactggcacaagacagggatgccctctctcaccactcctattcaacatggtgttggaagttctggccagggcaattaggcaggagaaggaaataaagggtatgcaattaggaaaagaggaagtcaaattgtccctgtttgcagatgacacaattgtatatctagaaaaccccattgtctcagcccaaaatctccttaagctgataagcaacttcagcaaagtgtcaggatacaaaatcaatgtacaaaaatcacaagcattcttatacaccaacaacagacaaacagagagccaaatcatgagtgaactgccattcacaatttcttcaaagagaataaaatacctaggaatccaacttacaagggatgtgaaggacctcttcaaggataactacaaaccactgctcaaggaaataaaagaggatacaaacaaatggaagaacattccatgctcatgggtaggaagaatcaatatcgtgaaaatggccatactgcccaaggtaatttacagattcaatgccatccccatcaagctaccaatgcctttcttcacagaattggaaaaaacgactttaaagttcatatggaaccaaaaaagagcccatatcgccaagtcaatcctaagccaaaagaacaaagctggaggcatcacactacctgacttcaaactatactacaagtctacagtaaccaaaacagcatggtactggtaccaaaacagagatatagatcaatggaacagaactgagccctcagaaataaagccgcatatctacaactatctgatctttgacaaacctgcgaaaaacaagcaatggggaaatgattccctatttaataaatggtgctgggaaaactggctagccatatgtagaaagctgaaactggatcccttccttacaccttatacaaaaatcaattcaagatggattaaagacttaaacgttagacctaaaaccataaaaaccctagaagcaaccctaggcattaccattcaggacataggcatgggcaaggacttcatgtcatgtcgaaaacaccaaaagcaatggcaacaaaagccaaaattgacaaatgggatctaattaaactaaagagcttctgcacagcaaaagaaactaccatcagagtgaataggcaacctacaaaatgggagaaaattttcacaacctactcatctgacaaagggctaatatccagaatctacaatgaactcaaacaaatttacaagaaaaaaacaaacaaccccatcaaaaagtgggcaaaggacatgaacagacacttctcaaaagaagacatttatgcagccaaaaaacacatgaaaaaatgctcatcatcactggccatcagagaaatgcaaatcaaaaccacaatgagataccatctcacactagttagaatggctatcattaaaaagtcaggaaacaacaggtgctggagaggatgtggagaaataggaacacttttacactgttgatgggactgtaaactagttcaaccattgtggaagtcagtgtggcgattcctcagggatctagaactggaaataccatttgacccagccatcccattactgggtatatacccgaaggactataaatcatgctgctataaagacacatgcacacgtatgtttattgtggcactattcacaatagcaaagacttggaaccaacccaaatgtccaacaatgatagactggattaagaaaatgtggcacatatacaccatggaatactatgcagccataaaaaatgatgagttcatgtcctttatagggacatggatgaaattggaaatcatcattctcagtaaactatcacaaggacaaaaaaccaaacaccgcatgttctcactcataggtgggaattgaacaatgagaacacatggacaaaggaaggggaacatcacactctggggactgttgtggggtggggggaggggggagggatggcattgggagatatacctaatgctagatgacgagttagtgggtgcagtgcaccatcaagtcacatatatacatatgtaactaacctgcacattgtgcacatgtaccctaaaacttaaagtataataataaaaaaaagattaagtaattaaaac

SEQ ID NO: 8016 - DNA, 35959 bp, Homo sapiens
gggtgaacgtgggctgcggccctgcagaggagagggtccttctcaccgggctgcatgcggttgccgacatctactgcgagaactgcaagaccacgctcgggtggaaatacgtgagtgccacaaggggatgctcgtgccacaaggggatgtggcactaagttgccactgagccacacctccccgtgcagtgtggcccatggtaccagtcacagcactttcagaaaccccagttcctcagccgaggtgggaagtccagactccagtgaggcatggtctcaccactgccctccagcctgggtgacagtgataccccaacccaaaacaaaaaacaaaaacaccatgttttcaagccctgtttcttcctaagccaggctctctgcacccagcccgccctcggcccgctgagcagagcctggtgtgggaggaggccgaggaggctgcagggggctgcgggaggctgtgcccactgtcagggacaagtctagaagacctcagcgccagacctgctggagtcagagacagagagctgccccatgagctctttaccccaaatccctctttctcagggaccttgaattgaaggttgcaatcgccacctcctctccagccttcacctctagctcccttctctctccaccacatggctgatctggcctcctcaggccctgcaccttcctgccccgcttccctcctctacgctgccctgaagtctctcttccaggctccactctctctgaccttcgtggccgagtcctcccctcccccaggccacctgagattccatggttttgaccccctggccatctgccttctgttggatgctcccatgccttccccagttgttgttgttgtttttttgtttgttttttgagatggtctcaaactcctgacctcaagtgatccacccacctcagcctcccaaagtgctgggattacaggcgtgagccaccgcgcccggcctgcctgcctttgttgaaggaggctttcccattctggctctggtgttcttcgggtccaggccacctgctctgcctctttcctgaattcctgatcatctctggtctcccagattcctcatgagttttggaaggccacagttcacaccatggaaacgggctccacaagactagcacgcatccctagcccttcccctggtcagtcagccccatacccatctgtgggccccacttccagaaacccgtgccttccctgcatggccaccacactgcattcccctctatggctgcacccgcttcctgctggcacagtccttcctgtgtctgccacacctggggctgccgcttgggtaggcaggatccatcttggtcatctgtgtccctagcaccaggccacacactcagcaaaacaaaatgatgaggatgtgtctgtgggagagatgttaactcctccccatgaaggaccttctccagatatcctgttttttgttgttgttttttgagacagggtcttggtcgatctcagctcattgcagctttgaccttctgggctgaagcagtcctcccacctcaacctcccaagtacctgggactacaggcacaccacacccagctaagtttttgatttttgtagaagaaaatcactgtgttgcgtaggcttgtctcaaactcctggactcaagtcatcctccttccttggcctcccaaagtgctggaatgacaggtgtgcaccactgcgcccagcctccagatgtctttgacctgtttatgtcactctccctgtatttgccttcacgctagttatgcacggaattcctggagtgtagtcttttgcatctcttcaagcctcttaaattgtcccacatgtagtaaatgttcagtaaacagatctgcattcacactgtcctacaagtaatcccagcactttgggagcctgaggtggaaggatcacttgagtcctggaggtcaaggctgcagtgagctatgaccagaccattgcattccagcctgagtgacagagtgagaccttatctcaaaacaaacaaacaaatgaaaaaccttttagtatatgcgctgccgaagcgagcacatgaaaaacctttaacaacaaatgcaaagtaaacctacactgcctcaatggactcacctggaacagaccctcccagcgccggatgagtgcaccgctcagggaacatctgggtatatagttcatagtatagacttgggggggttttttgccaaaagagtgatgaaattgaaaagtgaaaccttctgtcctgaaacctttgtctcttctttttcaaggagcatgcctttgagagcagtcagaaatataaggaaggaaaattcatcattgagcttgctcatatgatcaaagacaatggctgggagtaatgtgcgaactttcccttctccttcgaatgctgttttgtgaaagaaactgtgaatgtaatggaaacgtaggagcatctggtgacagcctttcttgccctctgacctcaaaggctagctgcgcatagctcttgacactcccggccatctctgtgggtaaggtgtccctcggatctgtcctcttcgtgtacacagttgtttctgaaaattttcaatgagctttttctaacttctcaagttctagagaaagaattaaccaactgatgacttacctgcctagttaatatcttcctttcacctttgtcttcaatatagttgggctctgcttttttaaggttcagttgaaaaccaaactggggccgggtgcggtggctcacgcctgtaatcccagcactttgggaggccaagatgggtggatcacctgaggtcaggagttctagatcagcctggccaacatggtgaaaccccatctctactaaaaatacgaaaattagccgggcatggtggcgagtgcctgtaatcttagctactcaggaggctaaggcaggagaatcacttgaacctgggacacggaggttgcagtgagctaagatcatgccatcgcactccagcctgggggacaaaagtgagacatcgtctcaaaaaaaaaaaaaaaaagctgggtatggtggcgcatgcctttaatcccagctactcgggaggctgaggcacgagaatcacttgaacccaggaggcggaggttgcagtgagccaagatcgcgccactgcactccagcctggcaatagggcgagactccgtctcaatttaaaacaaaagagaaccagactgagtctctgaagaccacagggacagggtctctttagatagcaagtctcaccattcccttttttagagaaaaggtattgtagcccaccctccaccccgctgtttttcttaaatttgcagaacttcaaattggctattcctcttgcaaatgaacccttaaagtacagtgttatttaagaatcttccagaggcagtcaacagacttatacactaagggcatttttggtttttagcttgttcaaaaacagaggccagcacagatgacattttagatacactctaaattgagaatggtgtctagtggaacatgtttatttaagccagtagattccttatctagaaagcaggtgagctagcccttagagaaggctgtcccggggcccgcagaggtgcccttactgaggtgacagcctcacagggtctggtaccaggggttgtgccctcagcagtgacagcagcttaggtgtcaggcagttgctgagtggctggtccatgtctatagagtaacacactggaccgaggaaaagtcagatttcattttctaccctggatgtacttgaagaaaaagaattatttttgcatatgaaagaggccagaacccacaggaaaaacttcaaaacttgacatttgccagaatgtttaaaatttgttcagaaaaggttaaagcaacaagtttagcctttgtgcatgaagacgcctggcctgctagacgcgttgcccgtccctgcgtggtgctgtcccatgtcacttgaactgatagaggggcctgtgcaatctcctaaggcctgtgtttctgccatatattttattataaattacaatccactcatccacctgccctccaccaggagtgggcaccccataagggtttaggccactttgcagaggatggaggtcaaaaaccactcccagataagtttggttttcaacatttagtaacttgtctcagggcagagggcaggcagggggaccgaggggcagcagataggagagcactgagcccggatagttctcagcctggcaagtggctctgaagctgccttcagacaaggctagtctaggggcaagagtgcgagctggctgacaataagaacgtggccacctgcccagcttcacacctcccccgacttcagcccttcctaaacccagacctgcggtccaggcaggcactgggctgtgcccactcgagctcactgcccacacacagcatgcctttgggtgccatctctttgcccaagcctggaagccttggcaggtgggaaatgccgctgccctggtgggcatggcactgagatgcatccactcagcaggagtgacagaggcagaagttcctttaaagcacatcttccacttaggaaaggaaggaaatctttgtactgtcttggaagcctccacatccggctatggccctgcaagctgctttatccctgcgctagtctcccccgagggtttaggctggcccagcacatcctgtcctcctgagctcgcgtgcagccacccagagcgcaggggtcactgcacgctgcagggctcttgctgccatggtctcaagcctgaagaggctccgcccacaagctggcccatgaagttagcaatgcctgtggcttcagtcaattgtcttgagactgtgaagaggctgaaagacaccttcccgggtggaagaaggagttcactgaaaacttatcttaaactgacccttccctttgagtgagtcttcattcctctcccatgtgggaacccagcctccgatgccccggggactaggggaaacagttggaggttcgtgccgtccccagcctgccacgggtgcgaggacagccaagtcctgagtgactcaagatgcttcacttacatggaagaaacttctaaaactctaccgagtggtttttgtatatactaaagttctatttagagcttttctgttttgggcaagttcgctgctccttctatttgggcactttggtttttgtactgtcttttgtgacggcattgattgaacattttttactagtagtcttatgacttttgtattttttttttttttgtaatttataccaacaacacttttatcactttttttttgttgggcttctgcaaaatacaagctcatttttaaaccaaatgaacagaccatgagctggcttcaggggaagtgctattcacaggaccatatccaccaccctcttaaattcctaaacaatatcatctaggacttctatttaagttatttaaaataaatcttccttgagagccttgggaggtgatgtcagggttataaatggcacagtgcatttgctgtaggaatgtggtttggcattgttttatacacacagtattttttataccttaatgcttattcttgatggcatctgtcagatattagaattgaaaataagaatcttcccaaaatcctttaatttacctgatgccctcatcaggtcgttaaaaattcaaatggttttaatagctaaaaaactacaaattaagctctaaaacaaacaaactacagaaatgtaaaccttcatttgccaaaggtccttggtggcctgtcccctgccctgggagcagatggccctgaagcccttccctcactgtgcaggccaccgggtgaggctggacggtcacccatggtggcttcactgcaaggagcaggactgccgagctcaagcacggggccttcagcttcccctgtcctctggccacaccgccagcccttggtccttatctgtgtgaggtttacaaataaagcttctgatgtcaaatgtttaaatcgtgccctcagtggacgaggccatgtcctgatgcagaaggctgagcccaggctctctgtggcgccgctgagagcagagggctgtcttggggtcttcgagctctggagccaaggatggcctggtcctacttctctgcccccaccaatgggggacttgaatgtggccagagaatacagtcagtcagggccagccagggtgtctgtcagggtgggcacagggtcctctccaaacctgcttctcactccctggtcaggccttcatccccaccacccgcacctgtaccctggacgctggctcagaggcctacaggtgtgtggacacctgggcagtcactgtgtcctactgtgcccctcctctgcaggcccagcttggtgtctgagcctcttacaagccagttactgccagggctgcaccaggccttgcggaggacagtgcctggcgggagggatggagggcgtcaaaagtcactctagagcccaggggcccgaccaatggtcacagacagggatgacaggctgcagagggatgggctggagaagagaaggagccagccatggcgcagttcttgttcttagcatgatgaagggccacagattggtgtgcagcagggtgacgaggggcagacatacctctagtggtcatcaggcagcctgtggcagtggatggggtgaggcagagatgcagatgaggcgccacccagcatccagggagacaaagggctcaggcctgcagcttcagcatcagtgattgatgagaaaaggaagggcagaggtacagcctgcaagttgctgacaggttcaagatttggggcaacaaaaatgagaaaaccaagaacaaggcctaagttagggcttagtgtgaagaactagaagtggggggtggcctgagggcaacagggagcccaagaggcaagtgtcaggcaaggagagtccatgacatgagaacactgaccactggcctgggctgaagacgaagaaaaagccagccaggggcacatttaacagaaaaatgggggttgagggaggggtctttctttaagggctgctgatgcagccggcccaaggccatcagagtcagtgactgacaggaggagcagagtcttggagcccagtggccgggcctgagagcagcaaggccacttcagcaggagggcggggagagggacatccacttgttctcacagcaggagacactggcctcaacccagtgtgggtcccctcaagattctcacaggggcacagagacgccaggcaggcttgagatgaagcccaggtggttcacagccagagcaggtgagcagggccctgagagctcaggcagggcacggcaggaaactcaatgctgccgtccaacaccagccttcagaagcccctgaagttttgtcaaaacagaccgagaagcccaccctgcagaggcttaggctcagtaagtctggggtctgaaaacttgtcccaggtaatggcgttggtcaggggaccacactggttgtataaataggctgtccctgagaagatgacagaagtaggggtaagaaaaccagacatatacagctggatgtagtggtgcacggctgtagtcccagctacttgcgaggctgaggcaggaggattgcttgagcccaggaggtcgaggctgcagtgagccatgatcacaccactgcactggagcctgggcaacagagcaagaccctgtcttaaagaggaaaccacaatctggagacacagtccttcctcactaacctggcctgcctactagaggagaggcctgaggcaccagcctgggtgtagggcaggccttgtgcttgaaggtcccagcagtgggctctggctgggccaggtcctggaaacagggccaaggcccttggcaacaggttaagggatgggaaggctgtgggctcccaggggccaggaaaggggatgcaggcagcaggcaagcaatttattggctggcagcagagggcaggctagaaaggctggaaatggagatgtggacatgggcccccagccctgcaaccccaccaaggtccacagcggccaacctgctgctaccaggagctgaagtccccaaaaccccgactgggcttcttcttggacatggggacagtggcactggttgagggctcttcctctgctgctcgcttcctgggaagagaagaagccgctgggagcccacaccctccctcagcccctcctgacttgtctgtgtctccatacagccctcccggtgtaggcccaacccctcccacctgctgctcccacatccccctgaatttgatctcttccacccacagaggccccggccaggccttcagaggcagtccctcggctgcagaggccacacagcacaagcccacggccgggaccagtgcccatagcttgcttgcccctctgggtctgaccctcagacctcagtcagccctaggaaacaccatgggaaacagggaggccagccccgaggcactcacgtggctgctgggttgatgtacttgcccacgccctggcggaaggtctgggggccctggctccctgcctggggctggctgctcttcactttggtctccggggctaccttgagctgtgtcttccgctcctgcgcaatctgtggcacaacagggcgctggctaaccggcagcacctcgggcaggacagatgctaggcttggggtggaaaagtgcactagcccagaccctcctaggtggtggcatcgtgccccctcacctgggcatcggcctcctcataggggtccacgaacactgtagtggcatcaatgcggatctcctcctagcagcaaagggggctcagtgcacggcaggtcctccccctgcctgcctggcccccagccgccacgccccacctccctgggcacagaccttagggcggtcagttttggggtcactctccacattctccatggctgtcagtacgtcaaagcccccaacaaccctgcagcagggagacagaggtgggtctgcgtgtgctcaaggagggcacccccacggctgagccccaaggcacgtgggaagaggggttgagagccccgaggctggcctggtggtccttgggcagcagccaggaaggcgatgagagggagtggcaagggcggggtcggctgaccatggccctgggcatatccagctgggtttttttctgtttttgttttttttttggtttcccccacccacaggaaaaataggagtcacaaaacgtggcttgtgctctccccgctggtttggtaaacagagttccacttggccagaaccacatcacctgcgtccaccctgtttcgtgctgcttccacacagctgggtgggcgtcagagaccacgtggcccacaacgctggaaagacccctggactagagggtgaagggagctgggtgtggccaggcttgcgagtggcgcgccactgggtctgagacagggcagtgtccaggccacatgggcgagtttcctcctctcctgagcccggtgggtctagagagccagacttccctggcacatggagcaccctccatcgcagctctgcatagcctcaacccccagcagtgatggccagcatggcacatgactcaggtccacgaaaaaggcagtgaggaggcctcaggtggggaaggaacccacctagcccactgaccccccaggcttcacacagccgcttcccttaccgtccaaagatggtatgcttcttgtccaggtaggcacaggagcgaaacgtgatgaagctggggaggagggctggatggttagggagagcatggcaccttctgcacctggcctgcctaagagcacaccaggagctgcccaccctctacagccagctctgggaacctgcagcttccacggacgcatgtgtgcacgtggttccctgcgctgcccaccagggcaggtcattagcccccaaggctgcccaggggaccccggaactccagctgtccccaggtcttcctgctgccccggctgctgcccactgcctgtcaggtggtccctgtgcccagaaccaggttggccatgcagctctgtgggaggtggctgggacgaggggacacctggaaaaccagagccagccccatgtcatcaagggacctgttgaaggactgaggagaaaggaggcaacaaagccagaacaggagtcaagggattaagaaacgtgggtaacataaataaacatggactaagaaaatgctcaggtcgtccaggcacagtggctcacgcctgtaatcccagcactttgggaggccaaggcaggtagatcacttgaggccaggagttggagaccagcctggccaacatggtaaaaccctgtccctattaaaaatacaaaaattagctgggcgtggtggcgtgtgcctgtagtcccaactacttaggaggccaaggcaggagaatcgctttaacctgggaggcagaggttgcagtaagctgagatcacaccactgcactccagcctgggcgacagagtctgtctcaagaaaaaagaaaaagaaaaaaggaaatggggtggaattaaaacagccaacagcactgccatgagacgaggagagagtttctgccagcctggtctgggaggaaggtagagactacctcataactttggacttttttttttttttttgagatggaatcttgctctgtcccccaggctggagtgcagtggcgcgatctcggttcactgcaagctccgcctcccaggttcatgtcatagtcctgcctcagcctcctgagtagctgggactacaggcgcccgccatcacgcccagctaatttttttgcatttttagtagagacggggtttcactgtgttagccaggatggtctcaatctcttgaccttgtgatccacctgccttggcctcccaaagtgctgggattacaggcgtgagccactgcacctggccaactttggactttaaatagatgtccttcttaaccttagaccagaagtaaaacatctaatttccaaaccagcagaaagagaagagaagcaaatgaaaataaatataaaaaatggtaactagaaagcaacaagatcatagaacgcaacagaccacctgaagaattaagtccacatttaagattgtcaggattggccgggcacagtggctcacgcctgtaatcccagcactttgggaggccaaggtgggcggatcacgaggtcaggagatcgagaccatcctcgctaacacggtgaaaccccatctctactaaaaatacaaaaaattagccaggcgtgtggcgggcgcctgtagtcccagctactagggaggctgaggcaggagaatggcatgaacctgggaggcggagcttgcagtgagccgagatcgcgccgctgcactccagcctgggggacggagcgagactccgtctcaaagaaaaaaaaaaaaaagactgtcaggatgaaggagaacacgacagaccccagctgtgagccttcaaaaagccctcagagggcagagccagagaggctgaaaagaaaacgatggaagacatggggtgggtcccggcgctggcgacacggagcactccccagggtggtgcaggcaggcacagcccacaacccggctggtgagacacaggacttaacctccactgcatcaaacatgcaccccccagccacgcagggacacgctcctgagcccaccaagtctgaccacacccgaggccaccagacaagtgtccgcagatgtgacatctgcaacggtgcagacctgagctctgacctgcaagcagttccctctcttgctgatttctaacacagtgaaggaaactagaagcagaattaaactcagataagaggaaagtaaaagaaccatcctgaggcaagctcctcctagaaaatctttttttttttttggagacggagtctcgctctgtcacccaggctggagggctggagtgcagtggcgcgatctcggctcaatgcaagctctgcctcctgggttcacgccattctcctgcctcagcctcctgagtagctgggactacaggcgcctgccaccatgcccggctagttttctgtatttttagtagagatggggtttcaccgtgttagcgaggatggtctcgatctcctgacctcgtgatccgcctgcctcggcctcccaaagtgctgggattataggcatgagccaccgcgcctggcctcctcctggaaaatctttaattacaagaatcacaaaagggaaaacaaagctgtaacaaattaaagtctaatgatctttgaatacagtaaaataggcaaacctttggcaacagttgtccaagaaagcacaaaatactactagaaataagaaaagaaggccgagtgtggtggctcatgcctgtaatctcagcactttgggaggctgaggtgggtggatcacctgaggtcaggagttggagaccagcctggccaacatggtgaaaccctgtctctactaaaagtacaaaaaattatcctggtgtggtggtgggcgtctgtaatcccaggagaaccgcttgaacccaggaggcagaggttgcagtgagccgagatcccgccattgcactccggcctgggtgacaagagtgaaactccatctcaaaaaaaaaaaaaaaaaaaaaaagagaaggtggcaactgatctgtcagcagtttcacaggctggttaagccaaagagaaataaaaaataataaaatgattccctgccctggcccctgccaaacaacaaaaacaaaccacgcacccaacctacttgaaaataaccaacagtcctaggcaatccttggctgagaagaaattgaaagggaagctaccaacaaccagcaagcagtgaagagggaacgtgcaccctcaaaatgacagacgtggctatcagaaacacacatggattaaagtgaggaaggaggaaaagcaccatgaagaagcaaagacagaaactgaaaacaattacaaacccttcaaagtgaagtgaaaacagacaaacccttcaaagaccactaagggactgaggaatggaaagtgtgattaggcatgagaaaaaaaggtcagcacagcgaggccaagagaataccagccttcatggaaacaagtgcccgttaaccctgaaatgaaagccccaaggaagtggcacgaatagctgccagctgcctttgcccagctgttaagcacagctgactcgtttgatttttttttttttttccagacagggtctcactgctgcccaggatagagtgcagtggcgcgatcctagctcactgcagctttgacttcccaggctcagattatccccccacctcaccctcccaagcagctgggactacaggcgcacgccaccatgccccgctaattttttttattttttgtagagatcgggttttgccatgttgcccaggctgctctcgaattcctgggctcaggcaatccacctacctcagcctcccaaagtgctgggattacaggtgtgagccaccacgcctggccatccctgtgattttaaccattccaggccacaaagccacagccagccctgctcgtaacatgcaggggccacacctgtcacagcaaaacctgctggagccagtccacacaaccgagaccacgtgtgacagtgagctggcagaaggccacggcgaagccacgacaggccagggttcaccccagaatgccacggagacacccatccactctggccttgtagtggccacatccacaaatcccgggaggaccagaaaaaggacagaatcatcatagtagatgctaacaaagaaacctctaaaaagtcagccaccctcctaaaaacagcccaacaacaaatgttctgagaaggcaaaacagcgatttctgtggagcacagcaagatgcccacatcctcctcccccatcaggcccacggtgacgtgacggtgacgtgactgatgtgcacaccagggaagcagagagcagaccagcttttggtgataagcgtgactatctagaaaacccaaaaaaatcttaaaaacttttgaattataagataatttgttaaagtggctagatataaaatgaacggtagtttttctctacatgagcaatgatccccaaaagttgggaaaaaaaaagtccatttacaaaagtatcataaactataaaaaatccttaagaggttgctttatcccggaagtcacaggacccatgtgaagaaaacgattgaaagactgaaacataacatcaggccactgtctggggatggaaagggcacctctgttcttccacaatacaggcatccggcccctgtgcgcatggccctgctggccccccatcccctgcctcctgccaccagactgcacactgctccccacatgcaccagggccagacctcctgtgtctctccaggcgcctctccctgtgcagcctgtgccctgcacaacccctcccacacgctgacctcccccagcactgcctggccacaggcacccacacgaatgcctggtccctgtcaagaagcccttctggacctccagtaattcccgacttctggtctctcgaggacacacccggtgcgggcagctctccctgctgactcactctggggacccccttttgaacgcaggtgcacatgcttggcctaggtgtgccgtacaccgtctgggtatgattcagaaccagcacacccttcagagagggccaagaggaagaacccgcagagagtgccggctcacctcccaggccaccccagcaagcccagctgactcacaattgagacctgttgctgttgggcccggagttggccatgctgaggatgccgcggcccgtgtgcgagaggttgggccggaactcgtctttgaagggcttcccccagtatgactccccacctggaagagaaaggcccatgggagcaggaaagcctgggccccagccgaggcagaactagaaacctcagagtcccgaggggcatcagggccttgctgagcccagcctggggcaggggcacttgatagggaggctcccagccccacgccaccaactcctgggtcccttggagcccccacgcctccaaacaggcaggctgctgcccactcaccccagccccgcctggggcctgccccgggacagggattaaagagtcaaggccaccatcatcatcactcaagctatgggaatacagaggttgggggatctggacccaagcagctgccaggctgaggggcttggagaggctgcaggagggagggctggcctcagtctgaggcagaccccaggggcccagggaagagaccacacactcttgcctcctctaccatgcaggcctcacagccacctggaaatgagaaaactgagggccaggcctgagggggcacagcactgatggctgccagtcgttccaccctggtctagcagattccatgtctgagctgtgcacaacccctgcccagctaccccctcatgccccacagagcagccaaagtgcccagagaggggcccagcaccagtacctacccgtgcctgtgcctgtggggtcgcccccttggatctgtgaaaacaaaagccagtgagcaagtcacactctgagacccaaggcccaccgcctgcctgactgaaggacacccctcctgccagatggctccacacaggggctgggctcttggtgataatgaggggccctcccagccacctccctttgtgaacccagttctggatgggctggggcctcaagggtcagtctatgggttccccaacagaggatcaccaactggactcatcctggccaccgtgggatgggccagggccctgggatggggcagggacaagcccacccagcccccgatgtcccaccaagctcatctgtgcagccagtgactctcgtcactcaccacaaagttccggatggatctgtggaagatggtgccatcgtaataatgcttcttgcaaagcctgatgaagttttcgcaggtttttggtgtctgcaacatagccccaatacttgtatgaagcagagagctgccaaaggcagctcaccacagccacaggaggcttttttttttttttttttttttgaggtggagtcttgctgttgcccaggctggagtgctgtggcgcgatcttggctcactgcaacctccgcctcctaggttcaagacattctcctgcctcagcctcccgagtagccaggactacaggcatgcgccaccatgcctggctaatttttgtagttttagtagagacgggtttccccatgttggccaggctggtctttaacatgtagcagagtcagctgcccagccacactgggcaaggatggacccacaacattaagcaacaggacccgtgcagccgcacggcccagagtacagcgcatgggagaagtgtgggcagagcagcaggtgcggcttggccccttctctgagacactggcacctgtgcgcaggccatgctgccaacgcggccccctaggaaggacacagggcactgctgcgggtcccgcctagtgacaggctgaatttcctacaacaagcacataccagtggcagccctatatttaagacatggctgtcagatgacccagagatgaccttggggcatggggagtggctggcctccacacccaccaggtcgcagtgcagctccaggttgaggtcgcccttgttggtgtgcagccgcacgtagcccttcttcttcacaaactggtagcgcagcacatcctcgtcgatggcagctacaagccaaggtcccagctcagcccctgccctcaccctggggcagccccaccatgccaggcagcaccgacctcagacacacaggcggggactaggctccagctctggggagagcaggggagctggaggccgagggtctgcttaggccacgcacaggctcaccccagcctcatggggctggcaggggttcagcagctaagagggggaggactaggggctcaggtgacagtgggagcccctgacagaccaataaagtgggagtcggggagcacacccaccccctgccacttttgggtcacatggcaggtggctacagaggccaaggtggctacctgcttcatgtgtggtctccgggaccatcgcggtggaggtgaaggaagcgctgaccttccctgtggaatagtgggcctgccaaggaaaccagggtggcacctcagcagtgccatgggaggcagttgggtggggatgtgtcgcttgcctagaagccaaccacacgccacccctgccccccaggccctgcttggtgcctctcctccaggagggcctccccaaccagcaggaggaagaagccaaggctaggccaagccagggtcccctggcctccactggatcccgactcttatgatatcaggtgaaaccctggagataaaataccacacaggactggccacctcagggttaggagtgtatggctgacttctcatttatttttattttaatttttttatgagacaaggtcttgctctgtacccaggctggagtgcagtggtgtgtgatcctggtgcactgcagcctccaactcctgggctcaagtgaccctccgacctcagcctcctgagtagctgggatgacaggcgcatgccaccacgcctggctgattttttgtagagataaggtctcactatgttgtctaacctagtcttgatctcctggcctcaagcaatcctcctgcctcagcctcccaaaatgctgggattacaggtgtgagccaccacgcctggcctcatttctttttaaaagtttcaaactttctacactaaacacattacatatttaatcaggggtcggggaaaagccccaataaatgttattttttatcatagaggaagaaaaaggggtttctcccatcagaagaaaatacaagccaggcacagtggctcacacctgtaattccagcactttcggaggccaaggcaggaggctctcacttgaagccaggaattcaagaccagcttagacaacatagcaagatcctgtttccaaaagaaaaaaaaaagtaatatatcaaagtgctaagggcagtgtgttagacggagtgacacactggacaacaagctttctttttcaaattttccagaatttgaataattctttaagaaggagaacttcagagctacctgcccatgtctctgccctccccctagctccagatccccatgctctgcctgacaggaggaagaagcaaacacgacagccccagacaggtggcaccgtgcagtcccaggcatgccatccacctcagcaccgcagcagaccatgaaacgccccaactctccctggcatggctttgggccccagtgcacatcgggccctgccctcccagccaccacagaaccacatgtgcccgctcaacgtgcctgccctggctactgagctcaggctgggaccacagcacaaggcagaccttctgtggcagggatctcccctacatgcccccacacaccccttggttcttcaacgaccagtgtggacatcagcccctccccttctgccttctcagattctatctgcctcagggcagccccagggctgtgcactcagagccatcaggggcaccacagctctgggggatcctggctgcctccctgccgtgtatcccaggcccccatgagcccctttcccaggaccactccaagaggccatgagatgggcaggaagacggggcttgggcttggccgagtgccctccgccactcacagcattcagcttgtccactttcttcttctccggggccttcatggtggctgccagaatctcgtcccctttgaactccttgtagagctcctgcagggtctctcgggtctcggcatttgtatttttcagataataagacgggtcctgtttggccttctcttcatctacaaaacagtagcatggccctgagccgccgagcccccagtagcctccccacacacgtgctggggacacagatctagaatagcccagggccgtccagccatggcgcaggcaccgtgccactgccagccacagaatgccacagtgccccgctacaggcctgaaggtctccccaggcagttcacaagggtctcaggatggacttcaggttgatttgcatattttatatttatctgtatattctaatctttttagagtatacgctttgctttttttttctttttttttttttttttttttgtggagatggagtctcgctctatcgtccaggctggagtgcagtggtgcaatctcggctcactgcaagttctgcctcccaggttcacgccattctcctgcctcagcctcctgagtagctgggactacaggcgcccgccaccacgcccggctaatttttttgtgtttttagtaaagacggggtttcaccatgttagccaggatggtctcaatcttgtaacctcgtgatccgcctgcctcagcctcccaaagtgctgggattacaggcgtgacccaccgcgcccagccttttgagacagggtctagctctgtcgccccagctagaaagcagttgcaagatctcagctcactgtagcctccacctcctgggctcaatcgattctcctgcctcagccccccaagtagctggggctacaggcgcaccaactacacccagctaatttttctattttttgtagagacagggtgtccccatgttgcccaggctggtctcgaactcttgagctcaagcaatccgcctgccttggcctcccaaagtgctggggttacaggcataagccaccacacccagttgctttgcttctgtaattttaaaggttatttttatttaaaataatagaagtgtttgggggtctttccagatgtgaaatcacccattcttgccgactcaggagggtgcctgctgcctactgggccttggacagcagcccaccctgtggagaggggccggcatccctgtgcagagagcacagacacggcccagccccaaccctgacctcaggctctcctgactcaaatcttccccagttcacgtgctcagcctacctaaaacccgttcaaacaatgctcacaaagtgcccaggccactgctctgcagcacaaggccgagtgacctctgaacatgagtcctgctggctcctccaaggctgcaggacagccaccagaggccagggaaacaggaggaccccatcaccccaccacctgcccactgacagcaccggccagtctgcagggagcaggggaacctgagcaggtgtgctggcagggcagcaagtctatcccgcccattgtttctgaggctgcagttggctcagattctctgaacactagttcagaaaatgcagggcctgtctgggctgggaccccctgacctccaggaaagcgggggctttacccagggagcactgtcccaatttcatccaaaagccccctcgcctagcccagcccctaggtgtacatacctgggtctattattttcatgttattcttcacatgatagaagttagagacattgaacttgtccaaattggtggggtcctgtggcaaaaagagaatgcccagcagagtgaacccagcctacggccaaatggcagccacatgcagcaaaggacggccagctgtcagaggtgtggaagaggccagggctacactgaggttgggggagtcaagcagggcatgagggaggaggtggtctgccccaggcagggcagcaaacaggggcaggggcagggacggggacgcagcctcgctagctgctggctgagctgtgaccttcctccaggcatatggctaacgagcattcattgctgttagggagctgtcggaccggaacgtgggcagccgtgggccgacctctggttagaatgggacaagccacagaggtgattgactcagcaggccacgctccagccagcacctgcttttctaagtcagtgtttttcattaattcacttggggttctctgacacctgcagggaccctgtgccagatacagggtctttgcagagctcatgccagctcctgccctcgaggcgctgaagcagagccaggcctgcagagtggctattcagatgcctcaggtggctttgaggacagatatgaggggccctgacgtgggggtaggggatcggggaggagatgtaagagctagactgaggaggcagccctgtagaggcctgggctggctgcaggtgctgaaggcagctggggcaggcgggcaggggacactcacctggagggtgatgatgtcctgccgggagaagggctcgtcggtcagcaggtcccggaagttcttggccttgatatttagctgttccactgcctatagccaggaggaagtggttttacgatgcctgccccaagccttggcacaggggactgcaagcagggaggcctggagctggccccgaccatggcacgatttgagaggcatgaggaatgagagagacagcagtgtacaccccactggctgaaagcagtggctcccacagaggcggagctggctgggcctcagacgatgagccagttcaccctcacagcaaccttcctgcaggaagctcttgtctgcacattgatcagcaaaaagactcagcgagtcacccacccactcgctgcaggctttgccaagctcctcccatgcacaggtatggtgccaggcccccgtgggcaggggctgtgcacacaagatgcctgcactcctgcggtgcggtctagcagagccctcactccactaacgaggactgaccatgccagtttgtgcaggcttctggcaagaagtggctcccaaggcccctggagcagcgctggccacctacaccccacaaacgtccaggtgcaggattgacaacggcgcaaaggtcggctttcccgccatgtggggcctgccccgcctcacccaagaggaggacccatgtgtgaacacggctgtctcccctctccctacacccactccctgccagaactcctccaggggacagctccctcctgggggcaagtgactccatccagatccggggcgagcactcccctcacagccctagaggcctgtcctcaaaacatgggtgccttcccagcacctgggctttgctgaagacgcagaaggacctcttggggtttaagggtccctgctgggcagccaggactgcctggattccgaaggatgcacctcccccaaccctttttttgacctgcctgaaaatggggaggctgcactgccagagctttgctagatgaccatgcctgtggctgtgactgtaaaccccacgaggacaggccgtacacgtagcacacagcccagccagtgtatactaggaacacacagcagagatctccccaccgctgtctccacgccccggagcgaggacacacctcataggcgtagacgttgccggtcgtcctcacagccacgatgtgggtgttgttggtgaacacggtaaacagcactgggcagtggtacttccctagagagaaggcacacacagggaggccagtcacctctgtgggctgtgaacatcccagtgaggaccgcagagggccagggcaggacagaactccaaagtcagcgatgggaggaggtggaaccccatgtcagctgccagagcagggaaccatggggacagctgctcaccccctcaagcccttccacaccgttaggaaactcctattcatcctgcaagacccaatcccggcatcgtcttcctcagatcctccagcccacccctgggtgatcaccatgctagcctcctcctcctactgaagttggccctcggcaggaaacaacccatgttccagccctgacagctctacctcctctcacccacatcctccgccagccccctggtcagctcttccttcagaaccgcccatccccttgcctgcctactgtctttttttgttttgctctgtttttttttttttttttttttttgagatggagtctcgctctgtcacccaggctggagtgcagtggcacaatctcggctcactgcaagctccgcctcccaggttcacgccattctcctgcctcagcctcctgagtagctgggactacaggtgcctgccatcatgcccggctaatttttctgtatttttagtagagatggggtttcaccatgttagccaggatggtctcgatctcctgacctaatgatctgcccacctcggcctcccaaagtgctgggattacaggtgtgagccactgcacccggccttgttttactctgttttgagatggagtcttgctctgtcacccaggctgaggtgcagtagcgtgatctcagctcactgcaacctccatctcctgggttccagcgattctgctgcctccgcctccggagtagctgagactacaggcatgcgtgcgtcaccatgtacgactaatttttgtatttttagtagagacagtgtttcaccaccttggccagactggtcccgaactcctgacctcaagtcatctgcctgcctcagcctctcaaagtgctggcattacaggcatgagccactgcacctggccttggttactgtctctctgcctgtaagtccccacccagtggccaggggccctgtcaaagtgcccacttctggggataaaaaagtaagtgcagtagggggactcagaaacatcaaccacatgtatttgtggggactttttctttttttttttttttgagacagagtcttgccctgttgcccaggctgcagtgcagtggcatgatctcctcggctcactgcaagctccgcctcccgggttcacgccattctcctgcctcagcctcctgagtagctgggacctacaggcgcctgccaccatgcccggctaattttttgtatttttttagtagagacggggtttcaccgtgttagccaggatggtctcgatctcctgatctcgtgatccgcccaccttggcctcccaaagtgctgggattacaggcgtgagccaccgcacctggccttgtggggactttttcttaaaaaaaatcctgatttgaggccaagttagagcctcaaattagttagagcctcaagttagaggtggctcacacctctagtcccagtgctttgggaggccaaggtgggaggattgcttgaggtcaggagtttgagaccagcctaggcgataggctgagaccccgtttttttgttttgttttgttttttgagacagggtctagctctatcacccaggctggaatgcagtggcgcaatcacagctcacgcagtctcaacttcccaagctccaataatcctcccacctcagcctcccaagtagctgggactacaggtgtgctcaaccacactggctaatttttaggtttcattttgtagagacaaggtttcattatgttgcccaggctggtcttgaactcctgggctcaagcaatcctcccaccttggcctcccaaagtgctgagattgcaggcataaaccatggtgcccagctgtttttttttggtgaggggatgctgacgcgggaggatcacttgagcccaggacttcaagaccagcctgggtgacatagggaaacctcatctctacaaaaataaaaattaaaaaagtagttggggctgggcgcggtggctcacacctgtaatcccagcactttcggaggcagaggcgggaggatcacctgaggtcgggagtttgagaccagcctgaccaacatggagaaaccccgtctctactaaaaatacaaaattagccaggtgtggtggcacatgcctgtaatcccagccactcgggaggctgagccaggagaatcgcttgaacccaagaggcggaggttgcagtgagccgagatcacgccattgcactccagcctggggaacaagagcgaaactccatctcaaaaaaaaaaaaaaaaaaattggctgggcatggtagtacatgcctgtggtcccatctacttgggagactgaggtggaaggagcacttggtcctggaaggtcgaagcaacagtgcgctctgatcatgccactacactccagcctgggcaacagggcaagaccatgtctcaaaaacaaacaaacaaacaaaaatccttctgatgtgaaaactattttttaaattggggcttcagcatcatgcaagggggtactggtgggagcaaagacagaactgcacagatgggagacagcaggggctggagttggtgatgggcacaagggaggcgtatcacacctcctcactccactttcacgcacggggaattccaattaacaaagaaacaggcggggcgcagtggctcacgcctgtaatcccagcactttgggaggctgaggcaggtggatcacttgagcccaggagttcgagaccagcctggccaacatggtgaaaccccgtctctacaaaaaacacaaaaactagctgggtgcagtggtggtgcctgtagtcccagctacttgggaggctgaggtgggaggatctcttgagcccaggaggcagaggttgcagtgagctgagactgtgccactgcattccagcctgggtgacagagacctcatttcaaaagaaaaaaggaaacacaacaaaagaagctgactgccaggtcaaagttttaaaagaaaaaaaaaggctggacctcattcctccctcagtggctctcatcttggagcggaagcccaagtcctcctgtggctcccaggccccacaggactgctctgcacaccatccccacccctgacctctgtcaccacatcccctgcttccaccgctagcacacgctgttccagccacattggactcccagctgggcacagacacccttgagcgtgcgcccacctcagggtctttgcactggctgtgccatcagcctggccctgcactcccccgatgcccacacggctctccctccctgcagcgggtcagggcggccctctcccctccccctgctgtgctctccacacacaagcagcctctggcacaccctgctgagctgctctctggtgttctcccccaccagaatgcatgctcctctcattcaggagagacacagcctgttgtgctctctgcacatggcaggcactcaataaatatttgctgtccctccctctccctctcccgctcccgctccccagggtctccctctgatgccgagccaaagctggactgtactgctgccatctcggctcactgcaacctccctgcgtgattctcctgcctcagcctgccgagtgcctgggattgcaggcgcgcgccgccacgcctgactggttttcgtattttttgggtggagacggggtttcgctgtgttggccaggctggtctccagctcctaaccgcgagtgacctgccagcctcggcctcccgaggtgccgggattgcagacggagtctcgttcactcagtgctcaatgttgcccaggctggagtgcagtggcgtgatctcggctagctacaacctccacctcccagccgcctgccttggcctcccaaagtgccgagattgcagcctctgcccggccgccaccctgtctgggatgtgaggagcgtctctgcccagccacccatcgtctgggatgtgaggagcgcctctgcctggctgcaaccccatctgggaggtgaagagtgtctctgcccggccgccccgtctgagaagtgaggagcccctccgcccggcagccgccccgtctgagaagcgaggagcccctctgcccggcagccgccctgtctaggaaatgaggagcgtctccgcctggcagccgccccgtccgggagggaggtggggggcagcccccgcccggccagccgccccgtccaagagggaggtggggggcagcccccgcctggccgccgccccgtccgggaggtaggggcgcctctgcccggccgccccttctgggaagtgaggagcccctctgcccggctgccaccccatctgggaggtgtacccaacagctcattgagaacaggccatgatgacaatggtggttttgtcgaatagaaaagggggaaatgtggggaaaagatacagaaatcagattgttgctgtgtctgtgtagaaacaagtagacataggagactccattttgttctgtactaagaaaaattcttctgccttgggatgctgttgatctatgaccttacccccaaccctgtgctctctgaaacatgtgcggtgttcactcagggttaaatggattaagggcggtgcaagatgtgctttgttaaacagatgcttgaaggcagcatgctcgttaagagtcatcaccactccctaatctcaagtacccagggacacaaacactgcagaaggccgcagggtcctctgcctaggaaaaccagagacctctgttcacttgtttatctgctgatcttccctccactattgtcctatgaccctgccaaattcccctctgcgagaaacacccaacaatgatcaataaaaaaaaaaagaggtttggagaaataaaaaataaacaataacacacacacacacacacacacacacacacacacacacacaataaataaataaatatttgctgaatgagagacacacacacacacacacacacacacacacacacactgctgatcacaggaggggaggcagcccaccctcggccaccagggtggagcgccgtgtcctccaccgacgtcaatgacgtgctgaggttcacccattcattcacctgcgaatgctgcaccgactggggaccgggctctgggctcagacaagcggggcaaaagggccttggcctcaggtgctacagcatctccctggaatgcatgcacccagtaagcaaggacaacccctaagccatagcatctccacaggcaaaagacctgggctagaacctagcacaagatcaccacctgggcaggggtgggctgcacaactcatccgggcctctggccacaagaacagcggaaggtgtgtaatgggcatgaagcaggagccgcagcactgggctgggctctatgagctgtggcaaagaaaagcctagcccaagagctactggacaaatccctccagaccacccacatcccctactcagctgccgccttggttcccagcatgagcaacttctgcctccaacaacaaacagaccacagcctcagccagagggggcccatgccctgcagatccaactgtgcccacaaaggccactagcagcttacaatggcctgatcgcctttgtgggaagttcccaacaccacaggttctgcccccaacctcccccaccttaaaactacccagacctttgagaagaaatcttgtgacaccttttttttttgagacagagtctcgctctgttgccaggctggagtgcagtggcaccatcttggctcactgcaacctctgcctcctgggttcaagtgattctcctgcctcagcctcccgagtagctgggactacaggcgcccgccaccatgcccggctaatttttgtatttttagtagaaacggggttttaccatgttggccaggatggtctcaatctcttgacctcgtgaaccatccgcctcggcctcccaaactgctgggtttacaggtgtgagccaccatgcccagccctgtgacactttttgcggaattaaaagcaggtgtctagcttggtcagaaagcaatgactgattccgtatgaaaactggtgagagctgggcccttgggtctgcaggtcaagcccagaattggctgtgatagttccactcaccctcactgttcttggaaaagttcagcttgatcagggacctcccgtccagcttctggaagaagcacagttaataattaatgataatgaataagtaactgatgcacagagatgctagggtcagagacaggcaggaaaagtctctgactaggccaaccctgtgcagctctggacaaaagggaaggccccaagaccctgcaaggacctcacgggggctgcaggatggcgtcgggcagttgtgtttatgtggcacccccaccacgctctgagaagagccgtcacgggtgaccccgagcaggaggaccaggccacagggtggtgtgtgttatacttctgcagggtttggacgtctttatggtgagcacagattacttctaaaattaaaaagtgaacatatttcttcagctagagtggtgggacacacagagtccctctctgtcaccaggctggagtgcagcggcaacatctcagctcactgcaacctcccactccctagttcaagtgattctcctgcctcagcctcccgagtagctaggactacagacacacgccaccacaccaggctaatctcctgacctcatgatctgcccacctgagcctcccaaagtgctctgtcatatgaatatttaagaaaaacaaaacattaaaagtggggagaaagtaagaaatacaccccaatgctaagaatggttgtgttgggaagatgggactctatttttctgtttctggatgttttttcttttttcttatttcccctaccccaggtggcaggtaatgttttcagtttctgtggtgtgtctgcagtacagctcttccacagcaaactttcccataaaacaaagtctggacaaccggaggtgggaactgctgggggcggggctgtggggagaccctggaagggaggcagagctatgtgctgctggggagcacctcactcagggccacaatccagcagctgctgccacctggtgtgggctgggcccagctatgcctacccaggcccaggggagacacagcgggagcctcctggggctgggccctaagctggcagcaggtccttaagctgccctccccgtcctccgtgggccctgcctgctgctggccaacccaactgaccgcatctgctcctctaaccaccttcgttccttcctttgtcattcaactacccccacctccctacatcactacaggtgtggaggagaccaccagagggccagcagggtccctattcagacacaggacctgagcagagagactccccaacacaacaggctcctcctgagcccccaaaagtcacatgggccagccagcccttggcccaggaactctcctcagaggtttggctagcaaggctctgctgacacccataggtctggccaagcaagcacacagcaaggtcccttccagagcaggccaagggagaggcgcaggcacaggataaagacgtgtagggcgctcctgcagactcaccccaacatgatgcctggaacaaagaaatggccacacctccctgatgtaagccctaacagcgtggctaactgccagatcagactttgtgggtgtgggggccagcacaatcgacaagtttgggaaccccaaagagtacctgtgaagcaaaacacccaaagtagcaaaatgcatcccagctgcaaccaaatgacagaatccactgggacagcaggggccatgagggcagccgtggacaggaaaaccccacctacccccaccttgccaccaggctgctccctgaggccgacacccagccacacagggcacaggcaggcagcagggacctctgctgagaagagcaacagagaatgacttcccagactggggcacggaccttgggggaagcccctgggatccaatgtggctcccagcagcagacatcacagaaacagtcttcaagtgacaaagaccaaggaagaagagtgccctccctaaggaggtgaggccacaagccccctacccaagcatttgaaagagaaaagccacgggctttagtcgctggtccaagaacactcaaaaaccagccccctggccaagttccccttgtactagagagcagggaagccttggaggagcaccaactccatctacaaagagtccccagaaccctgcagcccccagaacaccacaagggccagaagagctgagacagatgggctgccagcttctcctgctggcccggtagggagggtcatattgtccagggagctccctcccagcggctccagcacagggagcccaccggagtcccgaccctccgtctcgcacagtttgagctcttgccccaggccataggaaagaggtggaggaatacatgcaagtaattccaacaggaagggcaaggtcactggtaaaatacactagatctccctcggaaccaggctgcataatgtccccacaaaactgatgctcactgggaacctgtgaatgtggcctgacttggatataatcaaaggtttatatagggtctttgcagatagaatcaagttaagacgaggtcacagctatggcccaagaaaagacatgcacatatatacacgtgcacaggccggaagcatttctggaaaagaatgggtgtggggagaggaggggaagactgtccctcctcactgggccccatgaacggttctctcccatgttcctgtgttcatgaaaaccaccagaacaaaaggagaagtgagaggatagcattcactagcatcactgaaactcctgcacagccacctacctctccattgctggggttggtcccgtacttcttaagccatggaacaatgttcctgaagggaagacagaacagaaagcatcaccagggtgcttaggcgccacctggtaacaacactgtggtcttgcagggctgcttccaggttagaggcctgtgaaggggtcttgcttcactttaggagaggaagagctcctcatcttgtctcaggaagttgggggatatttgtggatacataggtttcaaaatatgttcagagttattactgtagttatgtataaacaacaaaaactacaggtgaaaatgagtaagtaaatggtttgggttttttttctttgagacaaggtttcgccttgacactcaggctggagtgcagtgtttcagtcatggctcactgcagcctccaacccctgggctcaagcgatcctcccacctcagcttccaagtagctgggactacaggtgcacaccaccatggctggctaatttttgcacttttttgtagacacaggttctcaccatgttgcccaggctggtctcaaactcctgggttcaagagatcctcctgcctcagcctcccaaagtgctgggactacagacataagccaccactccgtcataaatgttgatacatctgtataattaaatactaagctagcatcaaaaactatactttcaagccaggcatggtgatggtgtgtgcctgaaatcgcagctactcaggaggctgaggtggaaggactgcttcagcgcaggagttcaagaccagcctgggcaacatagtgagaccctgtctcaaataaaaaaaaaaagaaaagaacaaagaaaaactatactttcagagaattctgaatcacacggggaaaaaagctctcatcacaaccaagtgaataaatagatccacagagtgttacctgtcaacacttcacagtgttcacagtgttatctcaatcatgttactacaaataagttcacaaaaaattagcatatttacagtggttatcttggatagtgggactgtggtaaaattttctttttctaaaataaggctgaaatttcctaaaaattcattttcaggccaggtgcagtggctcatgcctgcacttggaggggtagggggtggtctaccccattccaggcagtgacagcagtacctgacaactagagctgcctgcccaagggtcacagcagcattgctgccatgtccccaaggccccagctgttacttctgtgtgcccaagagccctacccaagggtaccaagggtccccttccttaatgggtgttgagaatctcacatttgttagatcaaaattcaaggaaaaactcacagtaagtcaaagacgatgccatcgggagtgcagactgggtagacaaagggctgcagagagagactgaaaaaggacagtcattcctggtgagttgccacgcaccctggtcaggatgtgggctggctgagactggcatggtgacctcctgaaatgctgtcccagggagccctctctgggcagcctggccacctccctctctcaccaaccttctcctccaactacaatagtgtttgtgccacccctggtgaaggtctagagcaggatccaacaccaaggcaagctcctaacatcatgacgaggactctgcatcttctcccaacatgaactgaagggccacatcttcaaggcacacttttacgcataaccccacatccacaaggggcagattcactatcagacaggatcagagaacaattacaagggaaaggtaaactcgcaaaactcttacctgcagtggtcaaaaggtaaacgacgaaaatttgtttgtgggagatctgtttaaaaatgaaataaaaaacagaaatcttactctgtaaagtatttcatctatgtgcacctgctagcaattcagttacagcttatgaaaaagttcatgcaaatttttaagtacagcaattgctgtggattaaaaaccttttaacagataaaccaaaacacttggggtacatcaaaaaagaacttactgggaaaagtgcatactttttacttccattaaaattatgacagtgctcttgttattgtagtcttgatagttttgacagctgaaaatattatcattctttttattccttataaacttgatagagaaaaaacatttaaatgtacatgtaattttgtattttatttacttatttattttttacttagctcccagcatcggggaatattttaaattacattttacaaaaatcaccactaagatgaagcaggttcttctatcttgagtatatttctctttcatgaactgtgtcctcagcccattcgtctaccatagtttccgtgttcttgttgtctatttttacagctcactgtatcctgaagacacagttccttaataccactcccccaacggggaacagaaagactgcatgccttacctggcttcttgccaccataaaagtgagtgtattcagcacaggtaatgtacctgaagaagagaggaagataatgctaccaccaccacctttataaagaggacaaagtctttggaagtgagtaatctttgcttactcagcaaatgcttactaaatacctactatggggcgggcacggtggctaacgcctgtaatcccaacactttgggagcccgaggcaggcgaatcactagaggtcagaagtttaagacaagcctggccaacatggtgaaaccacgtctctactaaaaatacaaaaattagctgggcatgatggtgggtgcctgtaatcccagctactcgggaggcagaggtaggtcgatcactcgacgtcaggagttcgagaccggcctgaccaacatagtgaaaacctgtctctactaaaaatacaaaaattagcatgggcatggtggcaggcacctataatcccagctactggggaggctgaggtgggagaattgcttgaatgtgggaagtagaggttgcagtgagccaagacggcaccattgcactccagcctgggcgacagagcaagactccatctcaaaaaaaaaaaaaaaaaaaaatttgagatgtctttcagtcctccagtggagatattaagtaagccactaattacacaagactggggaaagcagcttatagatgactgggaaattatatcacccacagagaatgtttatggaaaagaaacgtatgagatctgagagaagggaggagggtccagaaaggagactgggaaaagaaagaccgctgaagtcgatggaaaacaaagagcatgtgaaatcccagataccaaagaagggcttcagaaggagggagtggtcaacagtgggacatactgttgagaagcccaacaaaatgaggactgaggctgcccagacgcggtggctcacgcctgtaatcccaggactttgggaggccgaggcaggtggatcacctgaggtcaggagttcgagaccagcctgaccaacatggagaaaccccttctctactaaaaatacaaaattagctgggcatggtggcgtatgcctgtaatcccagctactcgggaggctgaggcaggaaaatctcttgaagccgggaagcggaggttgcggtgagccaagatctcaccattgcactctagcttgggcaacaagagcgaaactgcgtctcaaaaaaaaaaaaaaaaaatgaggactgaggattgaatactagatttagcaacaagaagtcgctgggaacctgaaaagagaggccgctgaagtcgagagaaaacaaagagcaggtgaaatcccagataccaaaggagggcttcagaaagagggagtggtcaacggtgtgacatactgttgagaagcccaacagttctggggcagttctggggtcgaaattctgacttgagtggtttcaagagactcagaaaacagcatgaagccactagtctctcacttgttcttaagagaaacaacacggcggcagcgggaggggaacgtgggacgtggggcacggggcacgggtggatttttaaattttatttattatttttgagacagcgtctcgctctgtcgcccaggctggagtgcagtgacacgatctcggctcaccgcaacctccgcctcccgggttcaagcgattctcctgcctcagcctcccaaatagctaggattacaggcgctcgtcaccacgccccgctaatttttgtatttttagtagagacggggtttcaccgtattagccaggctggtcttgaactcctgacctcaggtgatccgcccgcctcggcctcccaaagtgctgtgattacaggtgagccactgcgcccgacctggtttgctttaaattagaaggctctgcagcacgtttgcaggctgataggcatgaaccagaacacagcgagacgtgaagtacggaagaggtagagactactcattcaagggcgaaactcgcgagcagacgggggacggtccgggcagaaccagagtaaggaaaaccgggctgcgctcgagcccgcagctgacgtcatcggagccgcggccccgggagagcgcggcggcccgagggtcattaccctgactggagacagggcggcagcttccgggaggaagtgacctttgggctgtgctctggggagtagctgagagggaaggcgagcggcgcgcagtgcgggacaggcggttcactgaggcagagtggagcgccgctcccgactgcggctcaacttacattttgtccttttggtgctgtcgcttccccatggcggagcggcggcggcgactagcgagcacgaaaaaacaacggctgacaactcagaccatggagccgcagcc

SEQ ID NO: 8017 - DNA, 295 bp, Homo sapiens
ctggagtgcagtggcgcaatcttggctcactgtagcctccacctcccgggtttaagtgattctcctattttagccacccaagtagctggggttactggtgcccgccaccacacccagctaacttttgtatttttagtagagacagggtttcaccatgttggccaggctggtctcaaactcctgacctcaggtgatctgcccacctcagccttccaaagcgctgggattacaggcgtgagccgccatactcagccatgctgtgacttttaaaacatttcagtgggaaaatatggac

SEQ ID NO: 8018 - DNA, 271 bp, Homo sapiens
ttttttttttctttttttttgacatggagttttgctcttgttgcccaggctggagtgcaatggtgtgatcttggctcactgcaacctccgcctcccaggttcaagcgattctcctgcctcagtctcccaggtagctgggattattacaggcatgcgccaccacgcctggctaattttgtatttttagtagagaaggggtttctccatgttggtcaggctggtctcgaactcccgacctcaggtgatcctcccgcctcagccctcccaaagt

SEQ ID NO: 8019 - DNA, 3484 bp, Homo sapiens
  SITE (406): n equals a,t,g, or c
  SITE (2386): n equals a,t,g, or c
cagggagatgtggtgctgcagagtgaccacgtgattgagacgctgaccaagacagccctcagtgccaaccgcgtgaacagcatcaacatcaaccagggcaggtgaggcgcgggcggcccccggggacagggcgggggtggcgagggggctgtgtgggcacccagggacagggtgggaaaccaccttagggttggggatctgcctccatggaaaaaccctcacccaccccgttcccccagcatcacgtttgcagggggccccggcagggatggcaccattgacttcacacccggctcggagctgctcatcaccaaggccaagaacgggcacctggctgtggtgagtggggcctgctttcccgcttatggcctggctgtgatagccaagccttccttggctgtgcttngcagagcccaggcacctcaccatgggccttcatccagaggccatcataccacctcttccatcccttggcccacccatgagggccagagagagcccctcagtgcagaaagttgtaaaggtggcagcacggtggctcatgcctataatcccagcactttgggaggctgaggcgggtggatcaccagaggccaggagtttgaaaccagcctggccaacatggcaaaacccatctactaaaaaaatgcaaaaggctgggtgcagtggctcacacctttaatcccagcactttgggaggccgaggtgtgtggatcacccgagatcaggagttcgagaccagcctggccaacatcgtgaaaccccatctctactaataacacaaaaattagccgggcgtggtggtgcacgcctgtaataccagctactagtgggggctgaggcgggagaattgcttgaacccaggaggtggagattgcagtgagctgatatcatgccactgcactccaggcctggggaacagagtgagatgtcatctcaaaaaaaaaaaaaaaggccaggcacagtggctcacgcctgtaatcccagcactttgggaggcgaaggcaagtggatcacctgaggttgggagttcgaaaccagcctgaccaactggagaaaccccatctctactaaaatacaaaattagccgagtgtggtggcgcatgcctgtaatcccagctacttgggaggctgaggcaggagaatcgcttaaacccgggaggtggaggttgcggtgagccgagattgcgccattacactctaccctgggcaacaagagcaaaattccatctcagaatttgtatacaaaaaagttagcctggtgtggtggcgtatgcctgtagtcccagttgctcagaagcctgagatgagaggattgcttgagcccaggaggttgaggctgcaatgagacccaagatctcaccactgcactccagcctgggtgacaaaatgagaccctgtctcaaaaaaaaaaaaaaaaaaaaaaaggcagcacggcaatgcagggaagatacataggctgattgggggtgccaggagggaggacaggctcacaggctcacgctggccagggcggtgggcattcctatgggagtcaggtctgagtctccaggatggagaccactaggcccccaccactcctgcctgcatcgaacccatgaatctgagcgctggggctgggtgcggcggctcacgcctgtaatcccaactcttagggaagcagaggtgggaggacagcttgagcccaggagtccaagaccagcctggacaatatagcgagaccccattctccataaaaaggaaaaaacaaggacgaaaagaaaagtctgagtaccggggcccccgtctgctcccctcaccacttggccgtctctctccgcccccacaggtcgccccacggctgaattctcggtgataaaggcgcccactggaccctcccaacgcccaatgctttgcttttctcctcctccccttcccagttaccaaagactcgaacttccagacagggacccagggacaccccgaagcccacctgcaatctcccacctcctgcccatccctctcttgagggagcagcaggggccaggagctaccccaggagtgggccaggccgggccacagcaataggaaagccagggccagagcgagccatgccagccctactgccgatgccaaatatttgagagaagggaacttttgctgaggttttctctgaggtttttttgatgctttataggaaactattttttaaaaaaagccatttcccacccaaggacacagtggatgtgttttccctgactccagcagggcaaggaatgtagccgagaggttgtgtgggctgggctctggtgccctcttccctggccaggacacctctcctcctgattcccttggcaccttgtctttctgtctgtttacctgtctccctgcctgcccatctgcatcnttttgcagcccactctgacttccatctgggggctgagaccacccttgcctgcccccttctttctgccttaagaatgtccttttaggctgggcatggtggctcacgcctgtaaccccagcactttgggaggcggagacgggcagataacctgaggtcaggatttcgagaccaacctgacctacatggagaaactccgcctctagtaaaaatacaaaattagccgggcatggtggtgcacgcctctaatcccagctactcgggaggctgaggcaggagaatcacttgaacccgggaagtggaggttgcagtgagccaagagtacaccactgcactccagcctgggcaacagagcgagactccgtcttaaaaaaaaaaaaaaagaacgcccttttactgtcctcatcatcccagtttgaggcagtgctggagtggggaaggccgtcttagaccatagaggttggaagacgctgagagatcatccagcccagccccttgatgttacagagcagaagacagatgcccaaacaggagaaggcacttgcccacggtcatacggcaggttgccacaaaaccaagatggcagcccttcctcagcgtgcctcactgccactcccagagccagggagccccataaaacccacatcatgtcttaagagtatatctggctccttgaccagcaatcggccctgggagccaccaggtgggaaaagcgcctctgccagagtccaggccttgggatgacagacagcttgcccgcacactcgggccccactcaaggatgtagggccttttctggcccctgacccctccctggcatgggagcgtggggacggggctggccttgggaggagcggcaggggcatcacctccttctgctgcttctccctgctcctaccctcaagggcctgggggctgcccagctgcctctatgcccttctgggggtctcagcccactgctgacacttctgcaatccagagaaacactaaataaagcaatacgtgtttgccaatgtggtctccttatgaatattaggaaacgaagagggccccggaaggcaaccaagggcctcgtgttgcaggtttttctcgagacagtct

SEQ ID NO: 8020 - DNA, 105 bp, Homo sapiens
ccagcactttgggagactgaggcaggcggatcacttgaggtcaggagtttgagaccagcctggccaacatggtgaaaccccgtctctactaaaaaatacaaaaat

SEQ ID NO: 8021 - DNA, 331 bp, Homo sapiens
ccaggctggagtgtagtggtgtgatcttggctcactgcgacctccacctcccaggttcaagtgattctcctgcctcaacctcctgagtagctgggactacatcatgcgccaccacgcctggctaatttttgtatttttagtagagattgggtttcaccgtgttggccaggctggtctcgaactcctgaccttgggtgatgcctcccacctcggcctcccaaagtgctggggtgacaggcatgagccaccgtgcccggacacctctcgttcaaattctgttgcaagtgacaaacccagtccaaactggcttgggccaaaaaaaggatattta

SEQ ID NO: 8022 - DNA, 790 bp, Homo sapiens
ggagccataattgcaatgagaaggggagctgtggctggctctgactgccctgcttcccacattttcttttaacgagtgtccccacgtccccaccgcccctcccccccgacactcagatcccttcagttcccactggctgccattttcccttgctctgcagcctccaactccactccacttaagagaacagactggagactgctggaggccctgaagtgatttattgcttagcaggaacttcactaaacttcccaagttgattttttttagttttgaaaatcaaacaaagttcaaaaagtaaacatcacaggttgacatcccagcccaaagctgaggaaaaatgtctcttgttacattttttggcacataatagaatttatgagcattttcagtgttttgatttttttccccagtcactgttattccttaccctccagagttaggtgtggagagattatgttggcctgtttccatggtgacactgaagaaaagtaattttttaaaggaggtttctactgtgttatttcacatgcatgaaacatcaacatctatgctgtgtggctattacccctaaacataaagacacagaaatggttggagtattttatataaatagacaagtagggtgatattttccttggtctcgtgccgaccctagtaacaaaagtctctcagttacccagggcacctgggagagagtgagggaacagttctgttcagtgttaagcaagctcctctcctgtgaataaccttttctttaaaaaaaaaaaaaaaaaaaaaaaagctcaag

SEQ ID NO: 8023 - DNA, 537 bp, Homo sapiens
cccaagttgattttttttagttttgaaaatcaaacaaagttcaaaaagtaaacatcacaggttgacatcccagcccaaagctgaggaaaaatgtctcttgttacattttttggcacataatagaatttatgagcattttcagtgttttgatttttttccccagtcactgttattccttaccctccagagttaggtgtggagagattatgttggcctgtttccatggtgacactgaagaaaagtaattttttaaaggaggtttctactgtgttatttcacatgcatgaaacatcaacatctatgctgtgtggctattacccctaaacataaagacacagaaatggttggagtattttatataaatagacaagtagggtgatattttccttggtctcgtgccgaccctagtaacaaaagtctctcagttacccagggcacctgggagagagtgagggaacagttctgttcagtgttaagcaagctcctctcctgtgaataaccttttctttaaaaaagaaaaaaaacaaaacagagctc

SEQ ID NO: 8024 - DNA, 275 bp, Homo sapiens
acaccacgtacacagtcacacacacacacaccccacacatgcacacgtcacatcagcatcgatcacacaccccactcacacacaccacgtacacagtcacacacacacacaccccacacatgcacacgtcacatcagcatcgatcacacaccccactcacaccacgtacacaaacacacacacgccccacacatgcacatgtcacatcagcgtcgatcacacatcccactcacacacaccacgtacacagtcacacacacacaccccacacatgc

SEQ ID NO: 8025 - DNA, 529 bp, Homo sapiens
ggaaaagattacttctataattcatcaaggaaaatactaacttgctcccccagagagctgggggaaaacacattaatataaatataattgaggagtggaaacaaagtctaggaggagttaaagcataagtatcagcctggatgtgaattctaatataggaattagaattcctatattaaaaattgtattagaaacctttactttcttgtgatttctgttagttcagtaagtaacctttcttggaaggtctactaattcctttcaaaaaagatatttattttatatcttactataatatactaagcactgttattgctagggtgttttgaaggggcaggagatggtatttaaaactgagttgcagttctaggcagttaaataaaatccactgaccagaaaaaaatatgtaaaatgataaggcaggataagtattcactgccaaaaagtcaacaaagaaaatagtaaggatttatgttcagcaatccctgagattaaaatttaaaataaataaatagggatagtacgattt

SEQ ID NO: 8026 - DNA, 826 bp, Homo sapiens
cagaggttaaactgagaggctcgtaattccctgggtcttatcttttactttaaaatgaaatggcatgtgctattttctagtcattagcatcattctctgtattttcagacgatttaatagtcaaatgtatatgattctcccatgttttttaaaaaaaaatcttagtattatgtgaaatacaaaactagcatctcctttagttacagtattttttacttagtctaaaattattgtgattgtagtcattaattaatgtcctttgctattatgaaaatgaagctgtttgctttagtacttttacccatagaggaaatattttgtcatttataaagccgtattgctactacatatatctaaatgactttttattttttaattgttcttcattaattttagtgaatcttagtatgtgaatgtattactggaatatgaagcttaaaatggtttgttctatctcaggaatattgtaaaaaacatagttttcatactacctatgtatttctgtgatgtgtcttgtaaagtatagtcaaataaattattaataagattcatcattttagttatttctttttctcatactctacactattgacatctattttctcccataccgtcacaatttcacctttagctagttcaccaaaaagcccaatattatattttcatttgactttaagaaataaaaagaggtcgggcatggtggctcacagctctaatgccagcactttgagaggccaaggcaggagggttgtttgaggccaggagttcaagactagcctggtcaatgtagtgagacctcgtctctaccaaaaaaagaaaagaaaaa

SEQ ID NO: 8027 - DNA, 826 bp, Homo sapiens
cagaggttaaactgagaggctcgtaattccctgggtcttatcttttactttaaaatgaaatggcatgtgctattttctagtcattagcatcattctctgtattttcagactatttaatagtcaaatgtatatgattctcccatgttttttaaaaaaaaatcttagtattatgtgaaatacaaaactagcatctcctttagttacagtattttttacttagtctaaaattattgtgattgtagtcattaattaatgtcctttgctattatgaaaatgaagctgtttgctttagtacttttacccatagaggaaatattttgtcatttataaagccgtattgctactacatatatctaaatgactttttattttttaattgttcttcattaattttagtgaatcttagtatgtgaatgtattactggaatatgaagcttaaaatggtttgttctatctcaggaatattgtaaaaaacatagttttcatactacctatgtatttctgtgatgtgtcttgtaaagtatagtcaaataaattattaataagattcatcattttagttatttctttttctcatactctacactattgacatctattttctcccataccgtcacaatttcacctttagctagttcaccaaagagcccaatattatattttcatttgactttaagaaataaaaagaggtcgggcatggtggctcacagctctaatgccagcactttgagaggccaaggcaggagggttgtttgaggccaggagttcaagactagcctggtcaatgtagtgagacctcgtctctaccaaaaaaagaaaagaaaaa

SEQ ID NO: 8028 - DNA, 817 bp, Homo sapiens
tgagaggctcgtaattccctgggtcttatcttttactttaaaatgaaatggcatgtgctattttctagtcattagcatcattctctgtatttccagacgatttaatagtcaaatgtatatgaccctcccatgttaaaaaaaaaaaaatcttagttttatgtgaaatacaaaactagcatctcctttagttacagtattttttacttagtctaaaattattgggattgtagtcattaattaatgtcctttgctattatgaaaatgaagctgtttgctttagtacttttacccatagaggaaatattttgtcattaataaagccggattgctactacatatatctaaatgactttttattatttaattgctcttcattaatggtagtgaatcttagtatgtgaatgtctgactggaatatgaagcttaaaatggtttgttctatctcaggaatatagaaaaaaacatagttttcatactacctatgtatgtctgtgatgtgtcttgtaaagtatagtcaaataaattattaataagattcatcattttagttatttctttttctcatactctacactattgacatctattctctcccataccgacacaatgtcacctttagctagctcaccaaaaagcccaatattatattttcatttgactttaagaaataaaaagaggtcgggcatggtggctcacagctctaatgccagcactttgagaggccaaggcaaggagggtatgtttgaggccaggagttcaagactagcctgttcaatgtagtgagacctatgtctctaccaaaaaaagaaaagaaaaa

SEQ ID NO: 8029 - DNA, 613 bp, Homo sapiens
ttctagtatatgctctgttttgttcataactgcctttatcatcttacttggggcatctcagaaaggtgtgctttataactgtggtctaaaaggttttatataattgagtactgtaaatgtgtataatactctatagcttagagtgttatggtgtatatcatctgtgtttcctgtttgttctctggtcatttaaatgttccatgaaatactttagttccttgttaatatctttgaaacaagtttagagtaggaatttaagacactcctagatttatttggagaataaataagaagctatgattcttttttaatatttccctaaaagaattaattttggtggaacaatgttaagaaaaaataagatatttccaaagaagttgaggtgcttgggatgagaggctttaacagaatttttatacctcattctagtaaagaaagattactcatatgtcagagctgcctaacttttgtcaagccataaagggcactgtagaagctgcagtttacttaatcaaccacagtgtcctaggaaaattaaaaatgaagttgggcactgtagctcacacctatactcccagctctttgggaggctgaggcaagagggatcacttga

SEQ ID NO: 8030 - DNA, 33249 bp, Homo sapiens
gagtttggagcctcttccatcaagtggacctgattttggaggattaggagaagaagctgaatttgttgaagttgagcctgaagctaaacaggaaattcttgaaaacaaagatgtgagttttctgttgaaggtcttgatagaattgttagtggaaacattcacttccatacaccactagggagatgtaaaggaattaacctgtttccgtgcctttatcaaagaagagtttgtaaccacctacaactagaaaaactgatgactcttagaaaaacagtttctatttttaaagaagtcgctcttccttggtgatttttatgtgggaggtttagacaaacacacttttgtatttatgacaaaaaccaaaaatatatcaaggacaaactcaaactatacttaaatttatatttccattccctactcccagaaaaaagactgtgggtctcaaatgaaacttttcctaaatttattacctttgaaatttgaatatgcttttccagttcttgaagagtttactctctagcgagactgagaggtgagggccagtttgagtcagcatttattgtgccacctgaaatccctgcggggtctttagaggatgcatacagttttgttttgttttttttatttttaaaattttttttgagatgaagtctcactctgtcacccaggctggagtgcagcggcacaatcttggctcattgcaacctctgtctcttgggttcaagtgtttctcctgcctcagcctccaaagtaactgggactataggcgtgcaccaccacacctggctaatttttctgcacatagttattaagtcaggggtcatggccagcattcattcacaggccagtgctcagcatgcatgttaggaaggacagaggggttgtctgtggcctgctcgggtttagggctcacctggtcctgggtcatctggctggagaggatttgtagctcttgttcacagaaagtacataacgagcaaaggggaagtcacagtgactggttttttgaaaaaatgtgaaagatagtaaagtccagaggtaagaagtgtggattattaaacttgaagaaaaccttgacattaattaaaccttgacattgtctttagtcttgacacctaatctgtttgcctcatgtcatccctaatactgtccctgtgtgacttttaggtggttgttcaacatgttcattttgatggacttggaaggactaaagatgatatcatcatttgtgaaattggagatgttttcaaggccaaaaacctaattgaggtaggtgtggtctctacatggtgtgctttcccagtctcttctgaagaactcgtaaatgtccccatgtgaaaccacagagcaccctgcgcccggcctctgtgccggagatctgcctcctaccccacagggagccttggcacccccaagctgaaccccccgaattcctgtggtgcctcctacaaactccatgtattcgcatttgccttttcctcctgtctcttatcctggagaaagaagtgtctgtcctcttgcgttcctcataactctcccagcgccgtaatgcgagccagtggggttagtgcacagccgttcccaggcaccgcgctgagttcctgagagtgtactctcccttgccaaccccgtggggtgggcgcttatctgggacacactccctgtctcctcagggccctggctctgtctgtggagcagtctccttcctgcactgcaccccgtttctcatctccactgtgggtggtttcctctgcctttctgcccgtgggaccatattgaacatgcccagacagaggtcaccagcaacttctttgtggccgggtccagctggctcctttgtcttcatttcacttgaccttgcagcagcagcagtgtttggcactgtggaccattcccacttaaaaaaaaaaaaaaaaaagaatcttttttcaattttttttagatagggtcttgctctgttgcccaggctggagtgcagtgacacaatctcagctcactgcaacctctgcctcccaagttcaaaggattctcacacctcagcctcccaagtagctgggattacagatgtgcaccaccacacctggctaattttgttgtatttttagtagagatggggctttgtcatgttggccaggctggtcttcaactcttggcctcaagtgatccacctgcctcggcctgccaaaatgctgagattacagccatgagccaccgtgcctgcccaaatttgtatttttaaaaaattaaagtaacatgtaagcacagtaagaaggaagcatagaaaatcaaatggtacagaagggtattgaaatgaaaaggacaattttccctaccccggccaatcccagtctgctctccagaggtaacgtggctgacagtttcctagatatgttgtacgagtgtataaacatgtatgttccttaaacagtaatgccattctctacatttttttttcttttctgacataaattatggagatcttttcacatcagtacataccagtctgttggctgtgtggtacctcgttgtacacactttctaacttttttaaatttttttttctgagatagggtcttgctctggtgcaagtcctgctcaggctggagtccagtggcgtgaacacagctcactgcagcctaaacctcttgggttcaagcaatcctcccacctcagcctcctgagtagccaggactgcaggcacacatcaccatgcctagctaatttttaaagtttttctgtagagacggggttttgccatgttgtccaggctgatctggaactcctggcacaaggggtcctcccaacttggccttccaaagtgctgggattacagcatgagccacctcacctggccctctacattttattataaacagttctccattgatgggcatttaaattaattttcactcttacaaacaatgctgtactaaacatcttagtgtgtctttgtgtacattgactgtgttttaggataaattcctggaagtgggattcctgggtcaaagtgtgcgcactctgcagtgttcactgatgcagccgtattgctctgcaaagagattgcacaagtccactgtcttttttttttttgagacggagtttcgctcttgttgcccaggctggagtgcaatggcgcgatcttggctcactgcaacctccgcctcctgggttcaagtgattctcctgcttcagcctcctgagtagctgggattacaggtgcacaccaccacacccagctaattttttgtattgttagtagagatggggtttcaccatggccaggctcgatttgaactcctgacctcaggtaatccacctgcctcggcctgccagagtgctgggattacaggtgtgagccactgcacccggcccacaagtccactctcttacagcagtccatgagacggtctctttcccaaaattgggttttatcacaatttttaaattcttgccatcttgttagaagaaaaatgccatctcattgttttaaattgtatttatttaattatgaatgagatccagcatttttttttttctgtttagtgttcattcatatctctcttgtgaattaacttggtgtcttctgtcttccattgggtcatttggcttttgttgatttgcaatagctctttgcatattgaagaaatgatcgctttgtagcctcagctgaatgcacctgtcctgctttgttatttgcctttgaatgtgtctgtccctcttcttgcgcttgcctcttccctgggctttggtgaccattttcctgggttgctttttctgtctcatcacagtcattctcaggctctgttgtcagctccttttccctgtgagcatccttaagtgttgcttttccacaaggatcagtctcctgggtcatctcatccacatcccaggtttcagttacagcctgaatgcggagggctccccatgctgtctttctagccagctcctctgtgttgagctgtagccctgactatgcaactgccgactcatcgtttcctcatggcattgccacagccgtctccagctccatggggctgagacctgaagtcatcccttttccatctgtctgctctgcctgtcttcccatctctattcctgacttctctaatggtgttcagcgctagcccagtgctaagcgccgagctgcagtttcagtagcttctttcttagcctctttcttcttctcatgcactctacctaggcagtggcagtgtcctctgacccctgcctgtgaaatgtctccagggtctgtcctcccctccaataccatggcctgcactgggcctgccttcaccctagcccctgaggctgttgccagagcaccccctgcatccttcacctgcaggcttctcccatctgggcagaataccgcattcgtctgtgtgatccgttctttctcacaaggaaatgtgatcctttctgtctcctgctgacagttctacagtgactccctttcacctgcagggtggaatctcaactttccttatcacacgagggcctttccttctctgtgtcctcagcacttgctgccttaccttccttctacctgtccttccaataagaatggactccgtgcatcagaaggaactgctgttgacaacaaagaaaggacacaaagttgaacatttctaacagtggttagagatggttagaaaggccgggcgtggtggctcatgcctgtagtcccagcactttgggaggctgaggcaggtggatcacctgaggtcaggagttcgagaccagcctggccaacatggtgaaatcctatgtctgctaaacatacaaaaaaaaaattcgcttggcgtggtggtctgtgcctgcaatcccagctactcagaaggccgaggcaggagaatggcttgaacctgggaggcagaggttgcagtgagctgagattgcaccgttgcactccagcctgggcagcagagcgaaactctgtctcaaaaaaaaaaaaaaaaaaaaagaaaaaagaaaaaaagaaaaaaaaagaaagtaaagaaatgaatagaaaattgaaacaccacaagaagatgtgcatttcttcctcaaagggagagctgaaaaaaaaaatgaaaaggtgtgcagacacacgtgtctttcttttgccagacataaccactgttcacgattgtgatctcttccagcacaacgttctagactgtgtgttaggtttgtgtatctgcgttagtcttgttgtttatacgaaggggattatatgttgcacactcttgatgccaaggcttggttttgcacttgtgaatgggcatttttgttgcccctgtggtgcttttcccttctgtcatgtggctggtcttggtagtgctctctgctcagtgatctgacttagcaccgaatggtaaactaccagcctcgccgtgtggctgccatttgctgtttctgtatcgtagaagaatatattccttgtttttcttcccccattttataggtaatgcggaaatctcatgaagcccgtgaaaaattgctccgtcttggaatttttagacaagtggatgttttgattgacacatgtcaaggtacatattgtggtgtagtatctttataattccctttctgtccatcagagaaaagctgtttttatggccagatgcagatctgggcagcagagcactgctccctgctgtgtagaacctgaaagttgatcaaacaggtagtccttgagttagcagtctcagggaagggattggattttttgtttgtttttggagaggggtcttgctgtattgcccaggctggtctggaactcctgtgctcaagcgatctacctgcctcagcctcctgagtagctgggcttacagttgcgggcctggatttttgtatgaggccggggaggagtggtgaactttgaagatactgttgtgtgaagccctggactccacgggggcctgagagtgactctgaaggagggggccaggcttcgttcacatagcccagcccagcactgtgcagacccccatctcagtgtatgctttaaaaagaggagggaatccaatttccattttagtttttgcccattttcttgttgctgtgtgatactgggcacgtctctgaacatttattctttggctagtgagcacctgcttcgaggccagccctgtgcaggccccagagggagacacagggcgtggtctcctcctgatgggcttcggtcatagcagcacacagggcgtggtctcctcctgaaggggcttcggtcagtggggctgggttgggggcagaccagtaagtgatggcagcacagtcgctatgttgtgctgtaagaggctgagggaggagacagttcacctggccagggcatgagaaggggatcagagagggtgtccctgaaggggcgatgtctgagctgagacctagaagatgcatctgagcgagtatggggagaagggctggtagtgaggtggggtgaagaatgttctggggacagagatagcacttatcaggcccacgccaggggagagtggctcgctgggtggaccgcaagtgtaggaagagctggagtgcaggttgggggaatggagtgctggaagacaaggaagaaaagccgtcaggagcccagaccgtggtgggcctaacatggcgcggtagagttcccactttagtcagaattcagcagacaccattgaaaaataaaatttggaatgaatctgtgaatgagtaactcttcagaattgaatggggggtaattttgagaaggcctagataagacaatataggaaaatgcttgcaaaaaataaggtgctagataaactaaggacattttcattatttggagtatagtttcagccaacactaacagacctaaaagaacagtggcttagacaagagagaagtctccatctctccacacagctgggagactgccaagggctggtgtggtgctgcgttccctgaggtcaccttgggctggcgtggtttcctgtggttccctggggtcaccttgggctagtgtggtgccttgttctctgaagtcaccttgggctagtgtggtttcctgaggtcaccttgggctggtgtggtgcttcgttccctgaagtcaccctgggctggtgtagtttccccccgtggtgtcttgttgctttgtcatccctagggtccctgagtccctctgatggctgagcaccgtgtcctcattccagtattggaggagcacaggagattgagagggcttacccctccctttaagcacctgtcctaggtgttgtacacggcactgctctcatcccattggccaggacttaatcacttggccacacctaggtgcaggggaggctgggaagtcactggacttgagttaataattggtgtatgggtttatcagttgtgacaaatgtaccacacatgcgaggtgttagtaagtgtgtgtcggggtaaggagaggttcatggaaactctttgtacttttgtagtttgtacaaaaactttgtactttctgctttatcttttttttttacccgcaacccactgttgctggcttcaattctttatctttctgtgcgcctaaagctgctctaagaaataaagtccactaaataaaaaataaagtaaaataaaaaataaaaaaagaaaaagaaagaaaagatggtgccaggcggggtggctcacgcctgtaatcccagcactttgggaagccagggcggctggatcatgaggtcaggagttcgagaccagcctggtcaacatggtgaaaccccgtctctactaaaaatacaaaaaatattggcagagtgtggcggcgggtgcctgtcatcccagctactcggaaggctgaggcaggagaattgcttgaacccgggaggtggaggttgtggtgagctgagatcatccgactgcactccagcctgggtgacagaatgaggctccatctcagaaaaaaagaaaagacagtactgaggctccaccctagaactgttggacctgagttcctagagcggtgcctgagcatcagcatattttgacagttgcccagatgcgtctagatgtccagccagggctgagcacccctgtgtacaaggcaggagtcgcctttccttcctgtgagaggccactcattcctacagagcccagcccgctctgcacaaggcaccccagggccatggtgggtcacgaggtggctgcttccagctcagacccaaatcatacctggtgcgggggaggacagacatgcctcttacacacagtaacacagtaaacaatctcacacttatcttcgagggttactgacacccctattgtcatgtgagttccccattttcatgtcggttgaattgagaacccaaatattttcaaggacctctctaataggagaacagattcctttagcaaatattgtttgcttaagtttgcttaagtgaataatgctgcttatagttatctccttgtagcaaaggtagattgtttttgttttttggtttttggttttttttttagagacagggtcttgctctgtcgtccgggctggaatgcagtggcacagtcatagctcactgcagcctccaactgctgggctcaagtgatcttctcacctcagcctcccgaatagttgagactataggtgctcgccaccacatctggctaatttttaaaatttttgtagctatgttgctggggctggtcttgaactcttggcctgaaagtgatcctcccaccttgtcctcccaaagcactgtgattacaggcctgagtcactgtgctcagccctgtttattgatatattctaccagagaaactagaaacattattttttggtgtagaggtgtgcaatattttgattttgtgtgggagtgttcttaaacgtttctcatgattatattattttctaaaggagattgtaaaatagaatgaaccttcagattgctttttgtcttttttagcaatgggaacccaaagtaaaataacatcctggctgtcttattgtttaatatttttttatttaggtgatgacgcacttccaaatgggttagacgttacctttgaagtaactgaattgaggagattaacgggcagttataacaccatggttggaaacaatgaaggcagtatggtatgctacaggctttttactttcttatattggaacttagagttgggaacttttacactatgactgcattctaaaagctgatgatagtttcaaaattcggtcatttcatttaccttaatctgttgttatttgtggtttctctttaatcaccgtagaattggtgataatatgttttgggttgtttgataacaatgttaacgttagtaattaggaatgatttggagaatgttcatattaatagtctcttgttcaaattcctttaaactctaaatctgtaacattcttgagcctcacgggtggcaaggttagcttgtcccttgcattaatcaggtttgaatgcaggatgtgagcactcagcagcggcatgttttaaagaatgaaagtgattacaaatgaaagactagatctgtagttagcatcttccttctgtttttatgaaagtcccttagctagcatagtctttatccaatccaaagttctcattccttcaatgtagaccactgctattttttttttttcccctcctaggtacttggcctcaagcttcctaatcttcttggtcgtgcagaaaaggtgacctttcagttttcctatggaacaaaagaaacttcgtatggcctgtccttcttcaaaccacggcccggaaacttcgaaagaaagtaggaagcccaacagatcattgagtacactggcctgatagaaaagttaaaataggtggcttatttgtgaaaagaaccatgacagaatcagctgccacttctgcagtgaccacatgctgtagatttcctcttgaagatgagccctacgggcgtagtgttaagtctgttgatttaaatgtgtgcaagttctaatcactgtttcagcttttaaagctctatcccattgtctcctagtttctctgtaaacttatataaagttactggacagttcccttggagctcactgcgggagacggacagaggaatgtcagctgagtacagtgtgagtagcatttcagtccttccctctgggcttgggggaaaacagggtggctttttcactgattcccaaaggcagcaagagggcagcgtggaaagcacaggccctctgccctccgcaccaggtacctcctggccaggtgcctcttctctagccgagtacaggctacagggacccgagagtggctgatgcccatgttagcagctccttaacctggtcctgactacccgaggcaccattggttgtccctccccatatgtgtggagactgacagtttctcatagtcagcagagttggtcagatcactggaaggtttcttttttgttgttgttgagacagaggtttgctcttgtcgcccaggctggagtacaatggcacgatctcggctcactgcaacctccgcctccccggttcaagtgattctcctgcctcagcctccgtcaccgtgcccagctaatttttgttatttttagtagagatggcggtttccttatgttggccaggctggtctcgaactcccgacctcaagtgatctgcccgtctcagcctcccaaagtgctgggattacaggtgtgagccactgcacctggtccggaaggtttcatttttggttcacacctaagtttacacctagaagggtgtgattaaatgccaccattggaattcgtatcatttggcctttttggggctttatgataacctgctttttttttttctccttcctttcgccactgttcctgactcctcttgttctgggctttagttcttgcggagagccctgagatagaatactatgtaagagtcgttccccacatgtggtcttcagaccagcagcatcgacctcagctgtgggcttgttagaaatgcacattcgcgggctccaccttgagctgccaagtccgactcacagagagtggggcccaggaagctttaagtgtgctctccctccaagaacccagcagaagccctggaggcgaccacctgggcttgactcccccgtctcccttagggctgtgcgacctcaggcaaatgactcatctgtgaaatgaaggacaggagcgcggggtctcccagggccgttgtgagggttggatgagaggcgtggtaaagctcctgatgcggcgcgtggcgcagtttaggtgcttgaggtgcgttagtgccccaggcctctggtccttgcagaccaaggccatgagaactcagagcacacagagctgggccaggtagactccaggttcaagatggagataggagaatccaggcacatttgcactttcatttccttttctccaaattttcttgtctggaagggagcagccctgagacacctttctgctttgaaaccgtcctcggatgccctctggtggggccgtggaggggaaacctgggccacatgctgctctctccagcctgctgtcctccagcaggtctccaggtgcctgtgtgcacccacagtggtcgggctcccgggagcttagccacccttctccccagtgtcatgcttcatttctttctaagcctttttaaagagcagatttttaggagagtagaaataccttattttttcacaaggaatagcagagatgaaagacaccaaagtgtagactcggccctcgggtgggtgcaggtagaggggaggaggaaaggggagggcagacaccttgtcgccggcagccctgaagctgagctcctagaggaacggaccagatcatactcagtggtatccttggggcccatgtcaggccttctaaggaatgaagaaatgatttaggaagctctacacctcccgtaggaatttgggaaagtgcctgaatcccaggtggccctaagtgtagagatggtggctgtgcaggctgcccctcctgtaccatctccccagtgcctggcatggtgccctgtgggtgctgaggtgggtgcctctcaccatgaaggcgggatggagtgttctgggcctgctggtgacccacttaccccatggcctggagttcaattgcaagcctgagggctagagagggcccagcatgggacaccccctggggagtatggggtgacgtggcttccttgtgagagttaaatcactgtcctaccacttctcaaagccaccaaacatcgttcactgttcagaaaacatttctctgagatagaaatctaagatgagctgtcctggcagcaggaaagagagcgtcaggctgggaagcaggtgccacctgcttggaccccagaattcacccggctcaggcctctgctgcaggaaggatccctcgcctcccacataactctcgtctctgccaccttctctctgggccggtgcaagtcgctgggttgccaggcctggcttcagacagggtcgggtggaccaggtggggtttgcgccatcagatcatcttaggtgtcttacccattacaaagaagtgggaaagagatagcacctgtcgatgatagagctgcctgcagccctcagaccagccctgtccctcacctggggtgcagtcctgctacttagagcagtactgcctttgattcccttcacagctttccccctttcttcctttgtccttcttccctctggttttctcttccccttcttctcttcttccccttctccctctctctcatcattaaaaaaaattagatatttagttcattgtttcatgatgcttcattccaaaaaatgatttgcaacaagttcctaagtatgtgtggtccggaaagatgtctgatctccatgttgcagtttcccatatggaagaccagccacactgtcaagtgggaaggcgtatggcgagaactgggctgcctctcaaggacggcgtcatttgctgttcgaaaagaaagcggacattcactgaaatcatctctttcggtaacggtttctcttagttggagtaaataattttgttgatggaaccatgctatgcattgggaaaacagtctttgccaatatcagggctgactgagaagcgtcacccagatggggtgtccacagtggcggcccccactccccgagggcttgtggtgtcctgcctcgcgtggtcctttccgaataatgtcagtggtaacaggaagaggtgtgcttcagagctgactgtggaatttcagctttcaaaaagaaggaggaaccaggctgagccgactgaggccagggcgtcgagctccttgagagaacgaacccggtggtgggtgttcaactcccacgtagtgagcaggaatcgtttattcagttgaagctcaagtctcagtgtggacgtctcagtgtcctcctatgtaagatagggacagtcaccctcacttcctccaagggctctgtgaacacgaaatgacatgatagttgtagagtgctagcgtggtgtggcccacgtgctgtgagtgctcatggttatctaatagaacttcttaaagtgaaaatatccccattcaaatttctttcagcacgccatggtcatcgattctcggaattcttccatcttaccaaggagaggtgctttgctgaaagttaaccaggtagtgttgtttcacctgtgacccctgcagggtgaggggagccaaactttggacagtagataaagtcccggtgggctgggtgggcctgggggtgggcagtcccacagagtaatcgcacatgcagtatcgcttttgaaggtcgccagctccactctcagggcttccagcccggaaattgctccctaccccctgcagttcagtcttgtgccttcacagaacccaaggtgggggtaaggctgtggcatccttgatgagggcctgtaataggccaggaggagggctgtgacttggtgttacctgggagagagtgtccgaaggcaggggtcacccctcaatggctgcagggcaggtgcatcgtggcagcaggaggtgctggaggaaggtcttcaccaccttagaggagcgtgcttctctgctggtgttggaggcgggctgttagtctgtctttgggttgccctcttgttggaggcagggggatagttctttactgtaaggtacctacaaggtgcaggcacagtgaggagcccaccttggtggcttgagagtgagggcagcaggggctgcactgaaccttgaggcttccccgagcagctaccctcgctctggccggtggtacttaggtgttgtcaagcagggcaaaagcccgggggtgcctgaccttcagtgtcagaggagcaattagaaatcaggtttttatacaaaatagcccacattgtgaaaggtcagctgagtttttccccaaatgccgatgaagccaacgagccaagccgtctgtgctgagctctgtgttcagacactcaggctgccagtgctccctgcacacagccagagggcagcctctgcacctcttggatctgctgatcctccatcccagtccgtccactgttgctgtccgcaacaattaggatgtggcttctaggagacagaattttctgtagcctttaaaaaaatacaaaacggcaaaattaaatcctgatgcaaaaacatgattctgtagcccctgtaataagtctgtttgctccctttgacctgagtgctccttccctgcaggaactggcaggctacactggcggggatgtgagcttcatcaaagaagattttgaacttcagttgaacaagcaactcatatttgattcagtgagtatctaacggatgctggcacctgcactgtcagcccttactttggggatcttaccacagaatcttagctcctgaatatctaaagcacagagtggaagcctgggcggtaatgcttaacctttgatgtttccagtttagccagatttgcaggtagtctggggagaagccataaatattttcttttaaaagtaacctctgatggccgggcgcagtggttcacgcctgtaatcccagcactttgggaggctgaggtgggtggatcacaaggtcaggagatcgagaccatcctggctaacacggtgaaaccctgtctactaaaaaaaattagccgggcgtggtggtgggcgcctgaagtcccagctactcgggaggctgagacaggagaatggcatgaactccggaggcagagcttgcagtgagccaagatcacaccactgcactccagcctgggtgacagagagactccttctcaaaaaaaaaaaaaaaaaaaaagtaacctctgctaatcgttacacataggaccatgagagagcccctccccgtttatcatctcagggccttggaggaggggtggctggaggacagaggggtgtctcctgcccttgaaatgctgttccgtggaccttctgagtcttcactttgctgggtctacagggctctgggtgctttcagaaatttttttttttttttaatctttagtcctgttgggtcagtttctcctgattcactcaggagtgaggagaaagtgactggattctggtctcgccagaggagccccaggctgggagggcacctggcatatttctcacgtcttcccagcacccagtggctgggggcagctctgccctgcctttgctgcctaggtccttatctaccttaaaacctgggggcaaggattgagtgtaatgaaatggtgcatgcgactgtttctagagagctcattttaaaataatttgttactgcccctattcagcccttgactctgcactttgaacttggttcctgccttcctctgcccctgccaccacaggcctccttgttgtccggcacgtgagcccatcctgatcccttctgcagcactggatgttgtcgcctgctcgcctgttctcactttatctctcttgttttcttgactcatcattgctgcgctcttccactcctcagttttctcttctcagggccctttctgcctcataggcatggcttgcccctagatctctgttgccatctccccaccctgcttctctctgggacagtctcctacagccctgtggctgcagctgctgcctgtgtgtagcaactctggttctcctgcctccttcctgggcccagattcaagtgctcctggctgtctcagcccctaccttacagacacctcatatcaacagagctcattgccttccccacaaatctgtacccacgcctgggctccccatccactgacctgcacagtgcacccggctgcccttgaacttaactccctggctgctctcagtcctcccctcagccacctgccacccactgggcgctgcccttcctcctctcagcactgctcatccgcactgaaccaatgtcgcgttctgagtcgtctctgctcctctcctactccctgccttccccttcccccctctacactatggacatattagtctttttgagtcgtctttactccccttccactccctgccttccccttccccttctccacactgcagatgtgttagtgtttctgaaacacaagccttaccatatcactttcctacacaaactgcttgtgctgttagggtgcctgtagcccttgatccttcatcactgtgcctgtctcatgcttcggctctgtggaaatactttttgtttcccagaaggcattggctcaccctgactttcaggcactcgtattcactctgtctgccgctggctgtaactccctttttttcagttgtttccttggcctcccactccctgcctttaagactttggtataggtgtgtctcctgcaagccttcttcaacctcctagatggaagtgggggctcctccactgtgcccgtagctcctgtgcttatcctgtggtagtgcccatccatctacccacccatttacccatccatccatccatccgtccgtccatccatccacccatccacccatccacccacccacctacccacccacacatccatccatccatccatccatccattcacccacccacccacccacccatccatccaccagtctaacacatgtatgctggctgccaggcactgtccaggcactaagaatatatcagtgaacaaagcccaattcctgctctcaaggaacttccattcttgaggagggaaacctataagctagtatctttatatatcattgaggaggcggtgacaagtgttgtgaagaaaaataaagcagaattaaggggtagaaagtgaccagaaggggatgccatctagttaggatggtcagggagggtggctagtaaggcaacccccgagcacagcccagagcacggtgagggagcaagggtaggacagcgggacacctcgggcgggagcatgaattccaagagcagtagtggcaggagggccttggaggccggatgtgggctcttgcttccactctacatgagagggaagccctggagccttctgagcagagtccggacacctggctgagaagaaaatgccagctgctgtggggacagaagcttgtccttcctacagaagcttctgagaaagccatttctgagcagcttggagggacataggcatttgcaaggcagagaacgtgtgaggctcggccagccgcccgaaaacatggggtgcaggggagcaggagagcctctacctggttgaggacattgttgagaaggttttgtggcatgaagatgggctcactgagccaagactggctactgcctcctgccctgtaagagacaaggctctgtccttgagagtggggttgggagtgcgtctctgcattgggggagccttgcagccggtaccttctttcagcctaaaatgcgtgtgccctgaatccttccacattttgaggccgcggcaaagaggcctgagcaggtgcagggggcctggctccctcctctgtgaggccttggctcctgctgctgggcgtcacttcccgttgcagagcaggggcctgccctgtgtccgaatggaagccgggccctgctcgccttcggtgtgtcttgatttggactttggaattgcgtgttttaatagaatccacgtggcccttcgaagggtagctctgcaacgggacaagccaggcattctcctgcggcccttgcaccccatcgcggagctctgcacgccacgggcattcagtgtgtggccagttgctagttgctgatgttcctggagtgaaaggaatgctgggagaaaacaaccatttgtttctatttgaacaggttttttcagcgtctttctggggcggaatgttggtacccattggtgataagccgtcaagcattgctgataggtaagtactaatcaatgaatggataatttgcacatattttcctttggatcttttcagttgttttttataagatattttagagaagtttatttaggagagcatagtatttcaaatattcctttagtatttatgtttaagctaatttctaaatatcgggtatacctcacacttaatattttttgcttttgttggggaagttactttattatatttaaaatgtattgttcccttttgattatgaaggaatatagttcatactcattgcagaaatgcaaaaatggagaaacacttaaagaaattagagaaagcactcactaagtcatgagaaattctttataagcagcattgtagtggcatatgtttcattatttgcatataccataactttttagcctaccgtgtattttttgatatttcattggtttctaatttgtgatttttgtaaataacattgtaaataataacttttaagataacttgttgtttattttattttctgtggtattactctctcaaagtaaaactcatagtattgctgggtgctgcttttaggaagcttacagcaatttatacccctaccagcagggtatgaacttgtacttgttgcttcgaaatactaatcattgtcctctagggcaaaaaaacttttttttcaaccctgcattagttaaaatatactggtacagcttttttggatggtggtttggaagtagaacaattttaggtttataaactctggatcctaacagtttcacaaaactccatgaatctaatttacaaaagtacttttctaagtgtgtaaagatttatgtgtagaaggatgtccattgtagcattgctgatgaatagcaaagaatttgaaactgccttatgtaagttccgcagtagggaaatggtgaaattctagcacaaccattccagatctatgtaattattaaaaataaggagatatgtgttcataagttaacattttgcacatgaatatgtttagtggatccctttccagcgtgcatgcaggtgtagcaccgagggcctgggaagccagccaccaaaacagtgacggtgggcaccccagagcctgggatgcagcaggcagaaccatttcactcgttatgttatatgcatcctggatcatttgaattcaaatgtgtgatttatcgtttcttttttattttatttatgtatgttttttgagacagagtcttactctgtcacccaggctggagtgcagtggcacgatctcgacttactacaacctctacctcccgggttcaagctattctcctgccccagcctcccaagtagctgggactacaggcacccggcaccacgcccagctaatttttgtatttttagtagaggcgaggttttaccatgttggctaggctggtctctaactcctgacctcaggtgatgcgcccacctcagcctcccaaaatgctgggattacaggcgcgagctaccgcacgtggcctgattgatcatttctttaaaaacgaagcttgctgtttttgcaattcatgttaatggggtattcagaaaagccttgcttagaaatcccaagtagtaaaaacatatttataggttttaaaactcaaattaaaatgaaaaaattcataaaggcttttatttggtaggaaaaccagaaaaagccgcgccctgttccctttgtgctgttgcagacctgcagggtgttcttagcctcccgcggcctcaaaggtcagagggctctgagggcacctgccggggttgtgtccttggctgcctcttggctggaaagattacacagaatttctcttgtcatttaaattcattttttagtaattatcataatctaaaatcgggttctaatatgctgttcaatttttcagaaagtggatgggtttttatgtaattaatttttaattcacgcttttcatattattcagatatggttggtgagagtgtgacaatccagttcattagggaacaagaggagctcatatttaaaaattataaacctaacaagaattcttttttggtctgtttctagtattatagcccccctttttgtaatattgggattatactattaaataatttgtatcctgctcttcttcccctaatatcgcactgtgagccagtaggaggcccgccatgaaaaggaactgcgtcatgaattctcacagacagctgatagttcctttgtgacagacagtttgccctgcccctctctcctagtgtgtttcttggcatcttgtgtctcacctgcatctccaaagtttgcagtgtctccttagatgttgagatttttatgaaattcccctgtagtgtgcaccctcttggtctttctcaaaggttttgccttgtaaaaatgctgtcgataatctagtatcgaatgtgagtctgacatgtgtttcctacgcgttccgtgtgtcatgtcgtttctcacctcctgactttcctctgacctgtgtgctgttttgtcctaggttttaccttgggggacccacaagcatccgcggattcagcatgcacagcatcgggccacagagcgaaggtctgtcctttcccctcacggcgccaagtctagaaggctcgcgtctcactttggaaaccatgtacctgttattagcttacagcgataatagacattcctctttcacggtggtggaattagcacctaacacagaacttaccatgtagcaggtgtagaacatttattgagagaattgtaggaaaatgagaaaatatatctgagcaaaaactctgtgaaaatgacccgcagtcctacccagagagaacatgtgtaaacgtgttgttgtctgttccctgcaggtttgacatgtgcttcctactcttcctttgtttacatattattattttttttgagatggagtctcgccctgttgcctaggctggagtgcaatggcgcgatctcggctcaccgcaacctccgcctcctgggttcaaatgattctcctgcctcagcctcccaagtagctgggattacaggcacccgccaccatgcctagctaatttttgtatttttagtagagatggggttttaccatgttggccaggctggtctcaaactcctgacctcgtgatccgcctgcctcagcctcccaaagtgctgggattacaggtgtgagccactgggcccgacccctatgtattattattaatattatcattattattttgagacagagtctcgctctgtcgcccaggctggagtgcagtggcacgatctcggctcactgcaacctccgcctcccgggttcacacgattctcctgcctcagccccctgagtagctgggattacaggcacacaccaccacgcctggctaactttttgtgtatttttagtagagacggggtttcattatgttggccagactggtcttgaactcctgacctcgtgatccaccggccttggccttctaaagtgctgggattacagatgtgagccactgcgcctggcccctacgtattatttttaaacccatttctctcatcacctcccataaaaatgtaacagtatatttttatgcgagtaaatgccatttttaacaggtacatatttcatattattgacatcctatattttagttaataggcttaatttgttagagcagttttaggtttacagaaaagttgggcaaaaagtacagtgttcccgtataacccccatagcttccttattattagcaccttgtgttaggatgcttcattggttaggattggtgaagcaatatgataaccttattaactcaaggccatagtttacatgagggttcactcttagtgttgtaccttctgtgggctttgacaaatgcatgatgtcctgcattcaccattccaggatcacacaaagtggcttcactgcgctaaaaatgctgggctcccttcatccctcccaccagaccactggaaacgacaggtctttgaactatccatggagttttgccttttccagacagtttgggagttgggatcatacagtttgtagccttttcaagttgtcttcttttccgtagtaatatgcacttaaggtccctccatgtctttctgggacccaataacttgtttcttcttattgctgaataatattcctttgtctggaagtaccacagtttgtttgtccattcagctgccgaaggacagcttggttgcttctagtgtttggcagtgatgagtaaagcttctatcaacattcacgcgcaggttgttgtggacagcttctgggacataagttgtcacatctgctgagtcagtgccggggagcgcagttgtttggtcacgtgttaagagcacgcctcccctttgtaaggagctgccaggcgagcttccggggtggccgcgtccttttgcatttccccagtgaggaatgagagagagaaagtttatcatcttaatggctgcgtgttttgtcttatgacacactattatctttttaaagaccaaatcccaagctttggacattgagtttgtgtttttttttttcttttatgattataaaacaatgtattcaccttcgaactgaatgttggtactcatctgtaagttttatttatttatttattttttctttctttctttttttttttttttttgagatggagtcttgctctgttgcccagactggagtgcattggcgcaatctcagctcactgcaacctccacctcccaggttcaagtgattctcctgcctcatcctcctgagtagcatgattacaggtgcccgccaccatgcccggctaatttttctatttttattagagacggggtttctccatgttggccaggctgatctcaaactcctgacctcgtgatttgcccgccttggcctcccaaagtgctgggattacaggtgtgagccagcacgcctggccaagttttactttaatatgaaattctagatgtgaaatcgccagatcttttagggctttatcgtactttctgggaaggttgtctcatttatactcctagaaccgtctctgacatgcaacatccgtcagaggtatctccacatgctatggaactttaaaacatcatttaagtggatgcatattattccattattaaacattctcccctgattttcttactttttttttttttgagacggagtctcgctctgttgcccaggctggagtgcagtggcgtgatctcagctgactgcaacctctgcctcccaggttcaagcgattccccctgcctcaacctcctgaatagctgggattacaggtgcccgccatcacgcccagctaatttttgtattttttaatagagatggggtttcgccgtgttggccaggctggtcttgaactcctgacttcaggtgatctgcccgccttggccccccaaagtgctcatattacaggcgtgagtcactgcacccaggatttcttaaaatcttcagcacctttgttgcttccatttttatgtcattataagcaacaactacactctgcataaatttttgtcgaaagtatagattatttcttttcactcgtatttagagtgcttcattacagtgtaatttttaagaaaagtaacttaagtttttgatggttttatttcatctgtttattataagcaagtgtgatatgccgagtctatgagagctgagcctttacctacctgagaagtaaggcatgctggtgttccactcaccacctccgtgcggttggccagactctgtgggcaagaatgtaaattgctataatttttttgtgaaagtggtttgatgtatcaagagccttaaaatgtgtatgttcaagaattgttaataatactattaatgatagccccaagctggaaactggaaaccgaaatgcccatcaacagtaggaaatggtcagataattatggtatcttctactgtaatgaggaagaacaagttacagccactggctgaatgatggcatgagtaaatctcagaaacatgtcgggaggaaaagctagacccagaggaatgcctcctggaagatcccatttataaagcttggaagcaggtgaagtggcctgtgctgtgagagggtggggcagtggctgcatgtggtatgggcaccaggtggtggttagaagggaaggcaaggtctgatgtggggtgtgcttggtttcttggtcctggtgctctctgggcagatgtgtttcagatatagaaattcattgagctgtacacttaggatgtgtatactttcctatgggtatgcacaataaaagcttaaaaaaatacatgtttgtgccaggaaactcatcataggttaatgtccatgataaaggacttagaaaccagtatgacaatagaagagaaatagatcattaaatattggtccacctatgttgtttttcaggcataaaaaccccattttcaaggaagataaagcgttaggagaaagtgtttacaatatattaaaactgaaaaaaagtaggactggaaactgtgtatatatatatatatacacacacagagagagagagagcaagcaagcaccacattttattggcttgcttatttggttttacatttacattataatccactggaagaaaggacatcaggatgttagctgtttatttctgaatggtagaaattaaaatattttcatttttttctctttatgttgatcagatgttctacaatgagtatatttaacttttatgttcagaataaaatcagttatttaagaagagagaggaggagtggtttctgggaaacaaaaaacaaggttgttctcctgcaatttgttcattctctgttcccatcagagctctcgtgttgaaagggattaaggagatgttggtgtcttttttttccttcctctggattgtgaggaactgaagtctttaaatgaatcagcagttcattccttgaagttagtcttgaagacatcagtattttcccatttcatggtctgtcattttgtattagaggagagtaagacactgtataaatggtattttgcaacaaagtataaacctttgggttgtatgttttctgttgctttatagtttaaaatggaatggacaggaacgtttttagaaatatgcaaatacatgctctcagtggataggcttacactttggcaaaagtaacctaaatccaagcggtcatgaaccgttgagaattgtctcttctctggagacactgagctggaacctggtctcgctgtgcagtgggtggcaggcagcctctgccttttgattaatcatgtgcagctgtctccacacactgcagagacgctttctgcattttgtctctattgcgctctcgaaaatttggcaaaataatgcatttcatttgcaggtggaagtgagttggtcatctacatttgtggataaagttattgtcatgagactcatttcttcaaagcatttcacagatacgatgaatgacagagtgcattccttcctcaacgacattggctttgtttgcctcctcagttaaatcaaggtgtgaaacaaaccaggagaaaaagaaagattatttaaaatgaggccatcagtatcaggaatgagaagaacagctgcttgcaaactccagcactgtgtggcgttgtttacaggacagaaatcttgcttctgtaagttgtggaaagttaacgtgatgttaaccttgtcggaccttgtttttgttctgcacccctcctttgcttaggagactacctaggtggagaagcgtactgggccggcggcctgcacctctacaccccattacctttccggccaggccagggtggctttggagaacttttccgaacacacttctttctcaacgcaggaaacctctgcaacctcaactatggtaaaacttgcgctattcaagaaaccattgtagtacagttgttttcatgtttaaaagcacagtacacaaagaggtgtctgtcttttttttttttttttgagatggagtctcgctctattgccaggctggagtgcagtggcgcaatctcggctcactgcaacctccaccttctgggttcaagtgactctcttgcctcagcctcccgagtagctgggactacaggcgcgtgccatcacgcccggctaattttttgtatttttagtagagacgagatttcaccatgttggccaggatggtctcgatctcttgacctcgtgatccacaccccccttggattcccaaagtgctgggattacaggtgtgagccaccgtgccaggccatgtctgtctttttagattacatagtcattaaagttagagactgtgccttacttgaaaaaaattcttacaacagctaacataatgcccagcattaagtggttggttgagcgaatgaagcatacaagaaaaataatcatctaatgcccttacgaagaaaaatctgtttgtctatttaataaacaagtcatgatggccacagagctgagtaggattgggtgccttcctcagggagttcaggtccagaagagactcccagcagatgcctgggtgctaggggtgcctggaaagcttcctagaaggcatggaagtctccaagctgagactcagagtggggcttcccaggtggtcaggggatggggaaaagtcattctaagcagagggaacagaatatgccaggcccaaagaattgagaaggcgtggctcattctggatgtgagtaagtgtggctccaagtcctctcttgacctgggtcctaatctcacttcatgcatcctccctaatctctaggcctggctttaaaaacaactgcagggcccagccagggggagccagggcttgtctgggagagctgggagagcttggaaggacgggcacgcactgttgctcacaggtctttctcttttcaggggagggccccaaagctcatattcgtaagctggctgagtgcatccgctggtcgtacggggccgggattgtcctcaggcttggcaacatcgctcggttggaacttaattactgcgtccccatgggagtacagacaggcgacaggtacgtgttgggaattattttccacaatcacatcccactctccagtaattttattttgttttggacgtggttaatttcattagtggcttttaagcttgaagattttaagagaattaaatagttgcaaaataatgaaaacacatgtattttcctcctttgcgtttttctccatctagctgggaggagcaggtgtgaagcgttcccaccccctccctcaggtgctttgtgcttattgttcccagggtagtgggagcccctgccagggtctggctggaggaattgacaggtgatttggttcctgtgtgctgaaaacagaaggcagtgttttgagcagttgactttgcaggccagggtctctaggaaagttggggtgagtgaagctttgttcctgaccacagaggacacgatcttgagaacccctctctctacagcagaggaacccaccttcttggcttttcttcaccccttattttattgaggaaagattccctaaatgttacatgggtgaatatggtatagggctagttacacagttatataaacaaattctatttcttacatgcattgtgtaaaattttttttttttttgagacagactctcattctgtcgcccaggctggtgtgcaatagcacgatcttggctcactgcaacctctgcctcccaggttcaagagattctcctgcctcagcctcctgagtagttgggattacaggcatgcgtcaccacacccggctaattttttgtatatttagtagagacagggtttcaccatgttggtcagggtggtgtcaaactcctgacctcgtgatctgcctgcctcagcctcccaaagtgctgggattataggcatgagccaccacgcccggcatttttttttttttttttttttgagactcggtctttctctgtcacccagctggagtacaatggcctgaccatggctcactgcagccttgacctcctgggctcaagtgatccccctgcctcagcctcccaagtagctgggactacacaccaggctaatttttgtattttttgtagagacagggttttaccacattgcccacccaggctggtcttgaattcctgggctcaagccatctgcccgcattggcctcccaaagtactgggattacaggtatgagccaccgcacccagctgcgttgtgtaaattttaagagattcagacgtgttttcattatagtgtatctcggtcagctcaggctgccatcacaaaataccatggagtatttaagagtgacttaaacaacagatgttcatactctgccagttctggaggttggaaagtccaagatcagggtgctggcagatttggttgctgttgggttctcttcttggctcgcagatggcagccttgccactgtgtcctcacttggaggaggaagagtgcaggccagtgccccgatgcctcttcttatgcggcccctaattccatcacgagggccccatcttcgttacctcgtctgcacctcagcacctcccaaaggcctgcctccaggtatcaacaccatcctgtcagggttagggcttcagcatgtgaatcttgtggggacatgaatgttcagtccacaacagtgttcatactgtctcttatttttgtatatgcattcacagcaccccagcctgttttttctcttcatttttgtgtctacctttatgttgccaccaaatggtggtgctgttggaggcttaacccggtttcaaataggttgtagtttgtgccagttgaaggaaatgctgtatcatttttactctctccgtcttccgcatcagcatgtaggggatggtgctttgtaaaggggagccgcattcgcaagtgtttctgagcatcgcctctcaggtgcagtctgcgtctgtcattcaggtcctttacggttattgcttcagcggaatctgctccttacactcttgccagaaggcccttcagcatctgctccgcgtctggggacacggcaggggctgccaggctgctgcggctccctactgatgacagggccttcagagatggcggcggctgctcccacaaccgccagctcccattcccctccacgcctctcctgttctccacacaaagcccaagctggaaagggtgtagtcacgcaggctgcatgcatgtgtgcctgggggcccagctacccgggcttggggcccagcttggccactctgtgtgactgtgtggcccggggtgagtcacaaaacctctctgggtgtccattttcatgcccagaggatggacgatcatgatggtgactgttgcagtttggagaactcagtgagttactgcatgcagagcccttggcgcaccgcctggcctggggttgggaagtggttatttttcctgggctgctctgctgctgatacacccggcgtggccagcccctcacacaagggaacaggttcctgtgggaggtgttgcccctccccctccacatcatctcagctaacagtttgtgacaagccatagatgggatgatgcatcctgattttggagataataaagtgaaaaagtgggcacctttttccagagcgagactgcatcagataactccacgccgttactgtcttcagcagaccaggctggttttgcaagtttctttctatgaagcccttattccctctgcagttgggagtgttgggctccctggcctaacagccaggttctcatttgaatccttgcaggtagccccagaggcgctgtgacgctgctgcaccaacacctagcttaagtgggtggttttgagtggttgactgcaggcccggggctggaggggcgttggagcgagggaagctttagataccgctctctgacacagtccctgctgctctgggacccgccactgtgcacgtctcgggcagggagggtctgggcagcccacgctgccatcaccaccattgcagtgctctttgtagccactgggtgtcagtgtgccctgagaagtcaacgcggcttttaggagctctgttgaattgaccctttctgaaataattttcatatgaagtggttacatttacctttcagctttacttccgtctcttcaggttaaatctaaaaaacacgtttcagagattaatttcaaaatatggtttattccgggaggaagcagcatcctaagcacgtgacatttaaagaccaggctataaggaagtgcctctgcccccaggccaggtggcagctgttcagatgtttattatggacagtgagctctgaacggggtcagcctggcaccccgagtgtggaagacattttcgctcagtgtgaggccttgtttgaggttggtcatcaatattggaatttcgtgaagttggagtgaggttgccagatttaatcttcatttctaaaatttggtagctggcaggatggggtatcgtgtgtgtagaaattatccacaggtttcccccataactgaggcaggcacactgtaaataggacttcagacattcacaaagaaggaaacagttttgagatgtttgcttactgttatgtcgcaagtgatttgtggcaccactgtctctgggatctaacagcattctgtcagtttgtgtcttaggagtccggtctctggagacacagggctgaatcaggcaggctcgcttgggagagcagctcacagttagcagcaggaagacaagaaagtggatcatcttggttgttggggagggtgctgagagggccccctggagcaggtccctgagctgaatcttcctagaggacagacagccaggtgcttgcagaagacacgcagggacagtggtcctggctaacaaaggcaggagcaaagctgtgcaggtgtgcgctgtcggcgggcaccgggcagaaccgcgtcctacaggaacagaagggggagtggggaggtccaggccctgagctcccacgcctttgccttccagccccgctgacctttttccccttgggtatatgccagggtctttgagctcaggacttcatctgccttgttcaccgctgaggtccccatgactacaactgcacctggtgttggaagtgagagccaggtggagaggctcctggcgtgtggtgggaggtggggtgcaaggcgccaagggtgctgttggcatgaccttcctaaagcaccccatgctgggtgcttcctggcctccagcctcagagtccaagttcgtcagaagcctttgaacatcagactccaagaccctgtgccggcagtggcagtgctgggtgagaagaaggtgggagatgaccaggagccctgcaccaagacagcggccgtgagggagggagagagcgtggggtgcacagcagaaggtggatgtttggggctgtctggaggatgccaaggctggcttgcccctggtctggtggaacttcgcagcgctgctttgaatgtttgcagtgggtattttgttctgtgacatgtttatgtggtctctgagcataaacctatgcttgtgaagttgtttaatctgtttgtttgtacttagagtgacaggcctttattagaatgcttgcttgttttctgaattacatatgccaagagcttgacttcctttttagctcctagcttatgttcaggcatttttctaagtagcgaatgtaggtatagactagtttgaaggagctgagagtgtacaatctaaaaacagatctgaacacaactaaatggtacaaatgcagcccgggttttgatgtggattctggtgttttaaggccatggatgtggcttactgtaatcttgaaggggctgcagtcctggcttctggtgagaggactgcagtgccggggctggttaataagcacccttcatcctgcaggaggccggcgcagcatttgtgagtatctgtgttgaatctcttcgtggatcagatattgtgtcttcttgctcagagtcaggttggaaaaggaaaacttgccgccggtgtgcatgtgctccaaatcctcagcttgggcaagggcacgggcgtcgtgaataaaggagccattcttgctggccttttctagaaattgcccacagcttgcaaaaaggctgtgttccctggccccggctgcggctgtgtaggagtctgaatatcattttccccagaagttgaggtccctaggttaggcccaccttgtcccaaatgggcagcattggccttgccccatgcacaggctccaggcggacagagctgctgcaggcatgctgtcagggggacaggctgccccccagctgtgcatggcagtgtgtcggaaagaacaaggcctgtgggtgcccctgagccgggtctggagtcctgtcctgccacttctcagccgtgtgactggagcctctttgctcctctctgaaaatgggtctggtggtttgttcccaggttcttaaccactgtgtggagtcacacctgcagaaggtcagctcataacagatatggcaaccaatgtgacctttgcatccttccttcctggggtcaggagcaggtctaagaggtggtcaggctaaacccctgtagggctgtgggtactgctggtttcctaagccccgggaccttctgggggccgggcggaccttaagttctgtccacctgcctctcctccatcctcactacccaccttgtccttccggctccttccctccctgctccgcctctcatcggccctctgtcctctccgtccggagaggggaacgtgaaggaggtgaggagggagtagtgcaggaggatttgggtctctccttctttcccttttccattctccgagggcttaaccagctggtgaaggttcttaaccagcaaaggaggaagcagccggggccggtgagggtgaggccggcagccaggcaggaaggcagcaggaggaggaggaagcggaggcggcaccttctgagaggcgcatgctcagtgagtcgtgaagatggcagggctggcggagcggccgccgcatctgatctctcccctttttttaggatatgtgatggcgtccagtttggagctgggataaggttcctgtagccgacacccctacaggagaagctctgggactggggcagcagcaaggcgcccatgccacacaccgtctctcgaggaaacgcggttcagcgattctttgactgcggaccctgtgggaaaccccgtcaataaatgttaaagacacactccgag

SEQ ID NO: 8031 - DNA, 240 bp, Homo sapiens
ggagaaatacccaaaccgtgtaacattagggacactgaagcaaagacggagcctggtgtctacagacgaatggcagcatgaatgagtgtgcgttttctggggctgctctaagtcaccacaaacgtgggggcttaaaacaacacacattaatcctcttgtagtctggagatcagagtccagaatgggtcttgctgggctgcgtcctcctggaggcgctaaggggaaatccccctcctttgc

SEQ ID NO: 8032 - DNA, 250 bp, Homo sapiens
acgaggtcaggagatcgagaccatcctggctaacaaggtgaaaccccgtctctactaaaaatacaaaaaaaaattagccgggcgcggtggcaggcgcctgtagtcccagctactcgggaggctgaggcaggagaatggcgtgaacccgggaagcagagcttgcagtgagccaagattgcgccactgcagtccgcagtccggcctgggcgacagagcgagactccgtctcaaaaaaaaaaaaaaaaaagac

SEQ ID NO: 8033 - DNA, 326 bp, Homo sapiens
atgaaataggccgggcgcggtggctcacgcctgtaatcccagcactttgggaggccgaggcgggtggatcatgaggtcaggagatcgagaccatcctggctaacaaggagaaaccccgtctctactaaaaatacaaaaaattagccgggcgcggtggcgggcgcctgtagtcccagctactggggaggctgaggcaggagaatggcgtgaacccgggaagcggagcttgcagtgagccgagattgcaccactgcagtccgcagtcgggcctgggcgacagagcgagactccgtctcaaaaaaaaaaaaaaaaaaagaatgaaataa

SEQ ID NO: 8034 - DNA, 321 bp, Homo sapiens
gccgggtgcggtggctcacgtcctgtaatcccagcactttgggaggccgaggcgggtggatcatgaggtcaggagatcgagaccatcctggctaacaaggtgaaaccccgtctctactaaaaatacaaaaaattagccgggcgcggtggcgggcgcctgtagtcccagctactggggaggctgaggcaggagaatggcgtgaacccgggaagcggagcttgcagtgagccgagattgcgccactgcagtccgcagtccggcctgggcgacagagcgagactccgtctcaaaaaaaaaaaaaaaaaaaaaggaaaaaataca

SEQ ID NO: 8035 - DNA, 318 bp, Homo sapiens
gactcacgggcgggcgcggtggctcacgcctgtaatcccagcactttgggaggccgaggcgggtggatcatgaggtcaggagatcgagaccatcctggctaacaaggtgaaaccccgtctctactaaaaatacaaaaaattagccaggcgcggtggcgggcgcctgtagtcccagctactcgggaggctgaggcaggagaatggcgtgaacccgggaagcggagcttgcagtgagccgagattgcgccactgcagtccacagtccggcctgggtgacagagcgagactccgtctcaaaaaaaaaaaaaaaaaaaaaaa

SEQ ID NO: 8036 - DNA, 270 bp, Homo sapiens
ggaggccgaggcgggtggatcatgaggtcaggagatcgagaccatcctggctaacaaggtgaaaccccgtctctactaaaaatacaaaaaattaaccgggcccggtggcgggcgcctgtagtcccagctactcgggaggctgaggcaggagaatggcgtgaacccaggaggcggagcttgcagtgagccgagattgcgccactgcagtccgcagtctggcctgggcgacagagcgagactccgtctctaaaaaaaaaaaaaaaaaaaaga

SEQ ID NO: 8037 - DNA, 248 bp, Homo sapiens
ggtcaggagatcgagaccatcctggctaacaaggtgaaaccccgtctctactaaaaatacaaaaaattagccgggcgcggtggcgggcgcctgtagtcccagctactcgggaggctgaggcaggagaatggcgtgaacccgggaagcggagcttgcagtgagccgagattgcgccactgcagtccgcagtccggcctgggcgacagagcgagactccgtctcaaaaaaaaaaaaaaaaatagatcagc

SEQ ID NO: 8038 - DNA, 284 bp, Homo sapiens
cagcactttgggaggccgaggcgggtggatcatgacgtcaggagatcgagaccaccctggctaacaaggtgaaaccccatctctactaaaaatacaaaaaattagccgggcgcggtggtgggcgcctgtagtcccagctactcgggaggctgaggcaggagaatggcgtgaacccgggaagcggagcttgcagtgagccgagattgcgccactgtggtccgcagtccggcctgggcgacagagcaagactccgtctcaaaaaaaaaaaaaaaaaaaaaagtcta

SEQ ID NO: 8039 - DNA, 5125 bp, Homo sapiens
tcccagcactttgggaggccgaggcgggtggatcatgaggtcaggagatcgagaccatcctggctaacaaggtgaaaccccgtctctactaaaaatacaaaaaattagccgggcgcggtggcggacgcctgtagtcccagctactcgggaggctgaggcaggagaatggcgtgaacccgggaagcggagcttgcagtgagccgagattgcgccactgcagtccgcagtccggcctgggcgacagagcgagactccgtctcaaaaaaaaaaaaagaaagtgtggagttgaggccttgctgctggcttatctctcttaaggctacaagcgcaatcaatgctggcagtgttgctgggacccaagcctctatgccccagatggcaggccccattccatcctggatggtgtgacggtgggcactgcagatcgagcagggagccctggagaagtgctagggctggggaaaggggaggaggcagcctgagccatggaagaaaccatcctggtcactgcatgcttgggtactcagcctacttccttggttccatctaacagtccccagagccctaggacctggatctgggccttgctcaccctccctgttctcaaaatccttcttgctgatccaactcctttccagcctcagggtctttgcatgtgtgactctctgccaaaaaccctctttcctcaacactgtttctggtggtttttccccggttgataaggcctcagcaaaatgtcacctcctgggaggcttcccttgcctctctattcagctatttatagcagcctcctgtcattctttcacactgtttgctacaatttgtgctttaatagtcatttgttcctttattggttcaagggtcagtgttggtgtggtcactgctgagtccactgtgcccagaagacagggtccacagcaggcactccataaatacatgttgcaggactgccctcactggctcactctgtggagtgagggacctaatgggccccatttacctattgcctctgaaagttaaagggcaggaacaaggtggagggccactgccctctggcctggcatggcccagaggcagcttggggttagctcaaggcagctaagcaggtccagcccaagaactaagtcaagtgggccgaggaggctctgagagtggccggggccggcgtacattccctggcatgggtgagaactgcggctgttctggacgcacattcatctcatgcgaggtgctggggcccaagttcatgtaggttgctggcagctgcacataatggtccccaagcagtgcagacactatctgctccacctcccccactagtactccgaaggtgggtcgcactgctgggtctgcctcccagcattgctgcatcacttggtacctgttgggggaaagggatgtcaggttaaggcaatttccacccaaggattctgggccacccacttgctgttaaacctctggcaggccacacagggatgaggatagatgacaggacctagtacctagcactacccaatcaggggcagctcttctcatccctatgattactgttccagtcctgccttcccaccctggcagaggtcgaactacctcaggtgttaagagcttgggctcctgtgccctgtggcctgggctatgtgatcttggataagttccttaacttctctgtgcctctgggtcctcctctgatcacagagaagtaggcatataggctgatgcctgtgaagtgctaggcacaaggcccagctcacgaggtacaatggtcatcatcacagttcttccaggaaggaagcctgggtccagcaaagcaggaattaaaaatcctgaagtggccgggggcagtggctcatgcctgtaatcccagcactttgggaggctgaggtgggcaggtcacgaggtcaggagttcgagaccagcctggccaacatagtgaaaccccatctctactaaaaatacaaaaattaactgggcaaagctgggcgtggtggctcacgcctgtaatcccagcactttgggaggccaaggtgggtggatcacgaggtcaggagatcgagaccatcctggctaacacagtgaaaccccgtctctactaaaaacacaaaatattagccgggcgtcgtggcaggcgcctgtagtcccagctactcgggaggctgaggcaggagaatggcgtgaacccgggaggcggagcttgcagtgagccgagattgcaccactgcactccagcctgggcaacagagcgagactccatctcaaaaaaaaaaaaaaaaaattactgggcgtggtggcacacgcctgtagtcccagttactcaggaggctgaggtaggagaatcacttgaacctgggaggcagaggttgcagtgagccaacattgcgccaccgcactccagcctgggcatcagagtgagactctgtctcaaaaaaaaaaaaaaaaattctgaagcaagagcatttggggcagcaccagtggcaccctggtcctgaagcagaggttccccaggtttacctgctgggtcctagtgcctgccccattatcttggggatgtcattcctgcctgaaataatactctaccctacacacaatatctcatataattctcagactctcggaaggtggtactgttgtctccactttacagatgaggaaattgaggcccagagaggagaagggctggactgctgaagtggaccctatggtgtgccacccagatacccctttactttcccagtggctaggagtgttgcctgctgatggttcttgactgaggctctctctaggaattgccctaggcagaagagaactgcctctgccaagctcacatcccctcaccagggacagcctgtgactagtaactgattaatgcctggtacaaagacctggcctgttggtctcaatttcagaaaactgtggtgggtcatcccagttcaagcagtccctgtgggatgggctgcagtttctgtgacatttctcctgcccagtccttcttcccttgcccccaacctctcagtaaatccccgtacataaatctccagctgagtctgtttccaggagcccaatctggatatgggtaggcagtgaattaaagaagtgaatagtaagagcaaacccaaggcaggtaggactgtgaggaagggctactcgcatccttcttggagcacagcctgagacaggaggcgttaactacttttacctatgtcctggttctctctgttctaacccagcagacctagccacagctcaggcacacctgctacgtatgaagctgaacctcagcaccgaacccaccccgtaggcactgaggacaatgcagctgccgccatccctccaggaatggggaatctgaaaccacatacagtgaaaaaacctgacctggagatccagagggggttgctgtgggggttatggaatctttcctcgagattaaatgagaggaaaaggtggaaagcagaccccgttagtgggagtcgggtaggaggagcactgggaaaatcaaaccacgggcctcaaccccaactctgagctcagaatgctgttaccatggcaactgtgaggtcctcccagggtcctactctgcatgagggtgggaccagttcacagatgaggaaattgaggcccagcgagagtccctttcctagtcaaccagaagttcagtcaggaagccaggcaggagctctgtctcctgtctcttccatgtctctggggcccagttccctccccactaccacctccacatactcacagagaatcagggcaatactcaggctggggcaggcgccgaccctgggccaggaagtgggtaaggtcaaaagggtcaatgtggcggtatggtggggcaccccgtgtcagcagttcccacagcagcacaccaaatgaccactgtggaaagggggaggtgaggggactcaactcaccccaaatttgggggcaggtgggtcccccaggggcttctacctcccagagtccttcagctggaaatggaagaccctaccctccactgagagctcattcctcaatacatcacctgtgtctttcctctgtctcctcccactacctcatcctacccagagttggggctgggcaggccctggattatctgtgaggagccagtgagttcccagcctcctctagccctggcaggtgtcagattccatcttacatctgcccaagaggtgagcagatgggctgtgggggtcatctaccctggggactccctgggctcagatcattcagagctgaatgggtgaggcccagtgttcttgggtgccaaagccatgtggactgtagggcaggtggggcctcaccacatcagacttggtggtaaatctataggtctgcaggctctccagcgccatccacttcacaggtaggcgagcgtggcgatgctgttgaacactatagtactccctgtccaggatgtcgcgggccaaaccaaagtcagccaccttgactgtgaatgactcgtccagccttaggggtagggagaggatcacacttaggactggcccttaccaggccctgaacccacctgttctaggcccttacagaattttttttttttttgagacggagtctcgctctgtcacccaggctggagtgcagtggcgcgatctccgctcactgcaagctctgcctcctggggtcacgccattctcccgcctcagcctcctgagtagctgggactacaggggcccgccaccacgcctggctaatctttttgtatttttagtagagacggggtttcaccgtgttagccaggatggtctcgatctcctgacctcatgatccgccttcctcagcctcccaaagtgctgggattacagacgtgagccaccgcgcctggccaaatttcaaagccacagtgtccagtccaagtctgcactgggcagacaaaaaaagtaaggtgcagagaggggaggacaaggctggagtgggcccttccctgaggcggccttgagcaccgcacaccctcatgccctgtccttttgcttcaccccagctactctggactctcacatgcagttccgcgcagccaggtccctgtgcacaaacttctgctctgccaggtactccatgccgcgggctacctgcaggccaaagctgatgaggtccttcacggtggggt

SEQ ID NO: 8040 - DNA, 296 bp, Homo sapiens
cggtggctcacgcctgtaatcccagcactttgggaggccgaggcgggtggatcatgaggtcaggagatcgagaccatcctggctaacaaggtgaaaccccgtctctactaaaaatacaaaaaattagccgggcgcggtggcgggcgcctgtagtcccagctactcgggaggctgaggcaggagaatggcgtgaacccgggaagcggagcttgcagtaagccgagattgcgccactgcagtccgcagtccggcctgggcgacagagcgagactccgtctcaaaaaaaaaaaaaaaaa

SEQ ID NO: 8041 - DNA, 295 bp, Homo sapiens
aatcccaaaactttgggaggccgaggcgggtggatcatgaggtcaggagatcgagaccatcctggctaacaaggtgaaaccccgtctctactaaaaatacaaaaaattagccgggcgcggtggcgggcgcctgtagtcccagctactcgggaggctgaggcaggagaatggcgtgaacccgggaagcggagcttgcagtgagccgagattgcgccactgcagtccgcagtccggcctgggcgacagagcgaaactccgtctcaaaaaaaaaaaaataaaaaataaaaaaaataca

SEQ ID NO: 8042 - DNA, 785 bp, Homo sapiens
tttgttcattctttcatgcattcacctcttattcagctaagacttcagctgctgttatgtaccaaagggtataggaacccttcccagtcttcctgagctgctcctagtccttatttagttcgttttttataccaatatagctcttcttcctccttgtcctcttcgtccatcaccacttcgtgtttttaggcttactgcaaatcccaactttcttgttcttgttttggtattgcaagcttgccggctggctccattggctcactcattatcctctccatcacattcttttcttcacttactactgagtgatgcatatgtctgtgtttgtctgtctctcctaattttagattttgattaacctgtatccccagtgccctggcatatagtatttgttaagtaaattaatggataaattcagaattgatcccttttttgccttctgtgctttattctccattatgttattcccaccttgtgctattgaaaaaaggaaacttcaggtcaggtgcagtaactcatgcctgtaatcccagcactttgggaggctgaggtgactggatcccttgagcccaggagtttgagatcagcctgggcaacatggcgaaaccccatctctacaaaaaatacaaggattagctgggcatggtggcatgtgtctgcggtctcagctgaggcaggaggatttctccagcccaggaggtcaaggctgcaataagctatggttgcgccactgccctccagcctgggcaacagagcgagaccctatctcaaaagcaaaaagaaaa

SEQ ID NO: 8043 - DNA, 785 bp, Homo sapiens; identical to SEQ ID NO: 8042

SEQ ID NO: 8044 - DNA, 386 bp, Homo sapiens
tgatgtgatgtatttaagtgtttgtccccttttctcacctgtagggctccttggtaatgaccagtctaagggattaggaccagcatcagaacagtcagagaatgaaaaggacgatgcatcccaagtgtcctccactagcaacgatgttagttcttcagattttgaagaagggccgtcgaggaaaaggttagtacccaaggctgaaaatattggtaccttcaaccagggactgcaaactcaggtgccagttttcaccacatgataacgtgagcccattcacccaatctcttgattttcatagaggagccagaatcatgaggtttcgtatcaaatgccctgctttctaagtattgtctaataattataattaaaaacgggaaaaaaaa

SEQ ID NO: 8045 - DNA, 386 bp, Homo sapiens; identical to SEQ ID NO: 8044

SEQ ID NO: 8046 - DNA, 1296 bp, Homo sapiens
agttccacctaaagatttctccatacataatgaactctaacttaccggcatgtaaacagacctgacctactcttgtgccaatctctgagtttcagccaatcacaggcagccaactgtttaatccctgttcaaataaggtaaatgccaagctgtaaccaacccagctgtttctgtacctcacttccattttctgtacatcattttcctttttatgtccataaatcttgtctatgtggcagctccagagaatctctggacctattttgattcaggggctgctcaacttatgaatcactgttcaattaaactccatcgatttaatttgtctaaagttgttcttttaacaccagaataatgtatatcataatctccctcactctaatcatgtggagattcagattttttcagctaatgaggctccaaccctgtctttgtttaaaaaaaatgaaaaaacaaaacaaaaccatgtcctagttttactgctaacagtatttctctgacttttctggatttcagttttgtacaatttctataataagaggttaacagacattatatgctagcctcacatgaatattacctcctgatacctataataatatgaataatatagagttatgggtaaggaacagacaacttattttacattcttgtcttttcctctccttttccttttcaatcttgccagcaaatcttgccatttaaaattttatatttaaaatgacgtatgcatttttctccatagggaatattagtggtctataaactagtcagtatttcttccctacaataaagcaaaagcagtagaggtcttttgctgtatcctatcaaaccagtaataatccctctgccaaaatcatcatctgttctgagtgtctactttttcatttgtctgatagctcctcttggcatatagtactctcttttgaaccttctgccaaacaagcacaaaataggacaggaaataaaaactctgaggccaaggtctccatggcccacatccccatctgtgagagcacaagagctattgctctcctcactaaagattgcctgatctatttgttggtctccaacaatttcctgagtgtatctgaatgaatgcaagttatttggaatgagtggttgctttttagtctcaatactggctttatactctacctctcgtcttttcctgttccatctcctatcatcctttttttaaagggagcatgtggaagtgaaaggacacggcggagccagaacaagagtgactgagttttgtctccactgcttacttgataagtgaccttggacaag

SEQ ID NO: 8047 - DNA, 2698 bp, Homo sapiens
gttcccctctatgtgtccctgtgttgtcatcatttggctcccacttataagtgagaacatgcagtatttggttttctgttcctgtgtaagtttgctaagggtaatggcctccagctccatccacgtccctacaaaggacatgatctcgttatttcttgtggctgctactgacatagcatctatcttgaaattcatttcattcatgcaaagttgtccagcgcttacacagaacacagagagcagagttgggccaaaggaccttagcttttatcatgtctcccttttttttgactgtgctaaagcattattttgcttttctgtttgttaccaaatcctttatcttcaatggttaattttttgtttatatatttggttaaacaggaaaactgtggtatgtctgtgtgtaatggtaaaatatatatcctgggcggaagacgggaaaatggagaagccacagacactattctctgttatgatcctgcaacaagtatcatcacaggggtagctgcaatgcccaggccagtgtcctatcatggctgtgtgactattcatagatacaatgagaaatgctttaaactctgaagacaggatacctcaccgaagaagccacactgatccaagatgggaggttttaaaaactctacagtgggaacttcacatatctcctttgtgccatatgcaaaaaatagtaaaaataataatttggtgcctttctcctcaaaatatcaatctttcaaactataataaagcctttcctataattgaaaaaaaaaacttttttgttaaaggtaatggtggttgttacttggcctttgaagagtgtacctttgtaagtatttgtaagaagtctatgtgaattaggaaatgtctgtctgcataccttttaggagcgtgtgaatggtgtcttcacttattatgtatgtttatctgtatgtatattccttattttgtcatatatgtagagaaaattgcatgacttgaggcatcatttaggttgaagaagttaatgcttaggatgcattctaggagaaaaaatcagttttaaaaacctttgttgttaacaaagtatatccagattggttaattttattgaagggtttttttctgtaattgataaaaatgtaatgacaacaattcaggcatcataaaatactgaactattgtgactttattcttagaattgctgtcttacattaaacatgtttttagggggaagttaggtaggagatagaaaaataagtgcccctacaagggggattaaaattacaagttaattcctaagagaaaaatggaatggcctttgaaggaaaaatgacccactatggctctcaaagtttttatgcatcatctcttcaatcctctaagaaagcctcttttcttaacttgataaagcagtggaaacccattttgcaatattgttttgtgaaaaacagggacagacagccaggtacagagactcacacctgtactcccaactactcagcaggctggggcaggaggattgcttgagcccaggagtctgaggctacagtgagctatgaacgcacacggcaccctagcctgggcaacaggttgcgacactgtctcaagagaaaagaaaaagaaaaatagggataggttttccttcctagcccagtagagtttgacctcattagtatggtgctttgggtgaggacctcttccttgattatcccactttctagtgaacagctaaaattcctgagagtctctactgttaaggtacctttaataggataaagcagggaccacctatctcagtgggtccatttttcttttaaaattagttatctgaaaaaacttagcagtagttcccatctttaaggtaagtctttcatttggtccccattgtgtaaaatactaatcaacattttcaagcttctgtacaacagactgcttttgtctagatttctcaactccactttataaagcttatcagttttcagagaggaatgtgaattttttttctaatgcaaataaatggatatggcaggaactacagcataagtgattattgtgattctgggtggacggatataatttacaacatttagggatgttctaggtagcctgctgtagtttgacttccagtcactgttgtctttcacattataatttgtatatttcttgtgatagaagggatgatgcaaatatgtaattaaagtgtcaccagatttctgttaaaaccaaggttgaaataaaaagcctaacattggtaagctacattgttttctcattttagaatgattcagagatttcagatagacattttttaaactttaatgcttagctagaatctacattctgaggaaaactctaaaaaacttaaaaatttttagggaatttttatttttcaaatcataattttaaaatgatagataccattttgtgataacaacaattcagaaaacaattttctatcctcttagttgaaagaatgtaggtacagtttggatacttgtactttaattttagagtaaacatctgcattatactcttatagataatagaattatttagttaagaaattctttacagtaaatgagataatgtgtgaaaaagtattttgtaaatgctgaggattctacaaatgatagttgttattttcatgtgtatttgtaagatcatgtccatttcatgaatataggacttcacataaaaaaagactttctcaagacaa

SEQ ID NO: 8048 - DNA, 17947 bp, Homo sapiens
aggtccactggctattctgaggtgatagttgtcgttggaggatgtgagcgagttggaggatttaatcttccatacactgagtgctacgatcctgtaacaggagaatggaagtctttggctaagcttccagaatttaccaaatcagagtatgcagtctgtgctctaaggaatgacattcttgtttcaggtaaatatagaattattacagtagctacttttaatttggacacagcttcattattttaaacatcaacagtgtcttaaaatagtgaaatgtgaatactcccacttgaggaagatcagtttacaacaaataaaaccaagaatgactttttgctcttaaaaacaggtacaaggccaggcgcggtggctcacgcctgtaatcccagcactttgggaggccgaggcaagcagatcaccgggtcaggagatcgagaccatcctggccaacatggtgaaaccccatctctactaaaaaatacaaaaattagccaggtgtggtagtgggcaactgtagtcccagctactcaggaggctgaggcaggagaatcacttgaactcgggaggcggagattgcagtaagccgagatcgcgccactgcactccagcctggtgacaaagcaagactccgcctcaaaaacaaaaaacaaacaaaaagcaacaacaaaaaaaacacaggtacaagatgacatggaatgatttacaaaagatccaccagaagatacctttaatcatgtcatattttaaatgctctcaaatgcatgtagaatatgctgtaattttttaaactttacctctttgcaagtcagaagtactcatagaattaagcatttctaattcacccatgttttctgaaattctccgcaaagtttatgaaataagatttgctttaaaattcttaacttgaacttctttatgattgtgatatgttacctttaaaattagaaaataaaatgacagacttgtacaaagtataactatagtatctatgatgggaagtctgttaattggtaaaataatttcaccagctttgcagattattatatatattatccacactgagaaatataacaatacatactttattttttacaatagtatgctttttgaaaaatcggtcaattaaaaaaaaaacctttagaataataccattatttgcgtgcttctgatgtcttactcttaaattaacaatcttttatgtttgtaaaattcacatcctatatttaattattttggatctataattatcacttatcaagataacaattggtaaagtttaaattttctctgtagaactatttccattaaatttcaagaggtctttatttattgagctgaattctcaaattcttgaattagatgaatgaattccatgttttctttacctatgccttggtggcacagatctcttggtgacagctatatcatgataaattatcgtgtgtgcattgttttgcatttcaaggtggaagaatcaacagccgtgatgtctggatttataactcacagttaaatatttggatcagagttgcctctctcaataaaggcagatggcgtcacaaaatggctgtcctccttggtaaagtaagagaaaccactttttattactattgctggtacctttccaaagtaaataccacagctgaatctttcattttactcaccctctgggtattttggattcaaattgtatttccttccatttctaacctcaatagataaaccaaagatataaacaatatgacactgtacttttgaatggatattttgttctcctaatttggaattcatggcagtgtagcacatttctcttctcatgcatcactgaagtccaaatgcctaagaagcattggaaaataaaggagttacatcaaatacagacaggccaatgtctaacccacgcagtttgttttctttttactaactttgcaagtcaggcagagatatatttgtccaaagtcatgtattttatcttttttattttaaataaatattaagataaactcactaacaggccaggcacgttggctcacgcctgtaatcccagcactttgggaggctgaggcgggcagatcatgaggtcaggagatcgagaccatcctggccaatgtggtgaaaccccatctctactaaaaatacaaaaaataagctggggttggtggcgggtgcctgtagtcccagccactcaggagggtgaggcaggagaatcgcttgaacccgggaggcggaggttgcagtgagccaagatcgcaccactgcactccagcctggcaacagagcgagactccatctcaaaaaaataaaaataaaaataaaaaaactcacattcttaaagaaaacctatttttgactgcagctaatgattattataaacaatacattatttgggttctaaaccatctactgtctgtaggaacctgagaatcaaacttttttttttttttgagacaaggtctcttactctattgcccaagctggagtacagtggcattatctagctcactgcaacttctgcctccccagtgcaagtgattctcctgcctcagacacctgagtagctgggattacaggtgttcgccaccacacctggctaatttttatatttttagtagaggcagggtttcgccatgttggccaggctggtctccaactcctgagctcgtgatcctcccacctcggcctcccagagggctgggattatagttatgagccaccgcacctagccagtttccaaactttttaaaagcaactacaggtggagtttccaaaatgcttgggaccagaagtgtttctgattttggatattttttttttcttttgtttttagacaggttctcactctgttgcccaggctggagtacagtggtgccatcactgctcactacagccttgacctcctggacccaaactatcccttctacgtcagcctcccaagtagccaaggccacaggtgtacaccacaatgcctagctaattttgtattttttgtagagattgggtttctccacattgcccaggctggtgttgaactcctgggctcaaatgatctgcctgcctcagcctcccaaagtgctgggattacaggcatgagccactgcactgggccaaatattttggatttttttcatattttggaatattttcattatattcattgagcatcccaaatcaaaaaatccaagatctgaaatgttccaatgagcatttcctttgagcattaatgtcatcactcataaagtttcagatctggaacattttggatttcagattttttaagatttggaaagttcaacctgtatattgtcttttaaaaagtcatatctaatacaaaaatttattacataacagatgaaaatacaacagttgtaccaaggattaccttggagtctttagcttctccctgcccccatctccatctgcttgtccaaaaccacctcaaattaatgaacaactaaaagcagcacacttgctttcgcatatgtctttgactgatctcctagcacccctttctaagaagattgctgtctcataggccctcctatggagacagttaagtaccaccaataaaaaaacaaagctctagctgaaacagaaatggtgaccaggaacccttcttggtcagcctcttactagtcctccttcctctctttccccacaggggtttcttaaaacttctatactaggccagtcgtggtggctcacacctgtaatcccagcactttgggaggccaaggtaggtggatcacgaggtcaagagatcgagaccatcctggccaacatggtgaaaccctgtctactaaaaatacacaaattagccgggcatggtggtccgcaccggtagtcccagctactcgggaggctgaggcagaagaatcgcttctggcggagtttgcagtgagccaagattttgccactgcagtcagcgttctgttaggaatctaattgcacagcagtaggtgagcagccactgagcgagctttaccgcctcaactccacctcctgtcagatcagcgcacattaggttctcataggagcatggacagcacatatgagggatatctaggttgtggctgcttatgagaatctaatgcctgatgatctgaggtggaacagttacatccccaaaccatcccatccccgaccagtcccccaccagccccccacccagacctgtgggaaaattgtcttccattaaaccgctccctggtgccaaaaaggttggggactgctgcgtagaatactagagcttctcaaaacagtttatatatttttattttttgagatagggtcttgctgtgttgctgaggctgtagtgcagcagcacagtcatggctcactgcagcctggacatcctgggctcaagtgatccttctacctcagcctccctagtagctaagactgcaggcacacaccatcacacctaattttggtattttttgtggagataatgttttatcctgttgcctgggctggtttcaaactcctgggttcaagccatcctcttgcttcagcctcccgaagtgctgagattacaggcatgagccaccatgcccagctcaaaacacagtttaaaagctgttaattcctaacgacctggatctagtgtgctgctgctgtctacaaggccaatgaaataatgaggaccttgagacagatttactggaaataaaatattaatagaatcttttctaaaaccatttggtttgttagtacttactatattatatatagtgtttgaggctgtgcctcaagaaggacaaaatattactggaaaagaggggctaaaataatccaggggttggaaggagatgctgatacaaaggcaaatgaaaagtactgatgtctcaaaaaccatgtatgtattggtaaactcaaatttatttgacaaaatagtgtacttgacttgaagatacccaaagcttagaagcactaaatcaataaagaaaaggaatcattcctaccttacacagcaagtactcaattcatggaagtcattttgctaaaattacaatatagatttaattcaagcttataaaacatacttaaatttataaatactctgtttaaggaaacctgggatggtttagaatatagaatcttaggggagcactccccagtgtaacttagaagtgtgtcttaggctgcaatcctcaagaaaaaataaaaaattaccgggtgcggtggctcacgcctgtaatcccagcactttgggaggccgaggcaggcaaatcacaaggtcaggagttcaagaccagcctggccaacatggtgaaaccctgtctctacaaaaatacaaaaaattagctgggcatagtggcggacacctgtaatcccggctacttgggaggctgaggcaggagaatcacttgagcctgagaggcagaggctgcagtgagctgcctgctgcactccagcccggtgacagagtgagactctgtcaaaaaaaagaaaaggaaaaaaatcttagagtaggaagggatgatggaataatggagaatatttaatataacttggtcatcttataaataaccccaaagagatcaagtcacttcccaagattacacaaaaaatgataaagcagaggcaaaagctcagacttttcttaatctagaggccttttgtcttgatgctcatggcatgtattatattttaatttacacatgtaggaatacgtattaaagtttaatcctcaaaattatgccatgtgatagatactatgattgtctacattttaaaattgaggaaatatagccaagcatggtggcgggcacctgtaatcccagctactcaggaggctgaggcaggagaatcccttgaagccaggaggcagacattgcagtgagctgagatcacgccattgcactccagcctgggcaacaagagcgaaactccgcctcaaaaaaaaaattataaaattgaggaaataaatttgagtctccaaaagggtagataaattgcccttacattggatggcagagctggtgatcaaagcctgtgcccttaattgctacatcgtgccacaggttccatactccatatagctgtgtggacttttgtaagttacttaacctgtctgagctgcatagtgttggggacacaaactcaccaacagattattttaacataatgtgagaaatgcatgatagaagtggcattgagtactgtggaaatttgggggtgcacagaaagataaattgtggacaaatttgaaggacaagttatgaaatgtggccttgacccttagacattcattgttgaaatattaagaggaactgataaagtattttaggaagaataatctgtggtttagagagaacaagagtggaggccaggaggttatttgagaggaatgaaatgttgtggaccctcaagtgggtgatggcagcgggaaacgtaaaggaaggggtatatgtgaaagatgctgtggaagaagactcagtgggacttaatagttaattagctatggagggaagagttaatgatgacagtccattaagagaaatgtgagctgggcgtgatggctcacgcctgtaatcccaacactttgggaggctgaggcaggaggatggcttgagagtgggagaatggcttgaggccgagagttagagaccagcctgggcaacagagggagaccctgtctctgtgaaaaataaaaataaattagtagggtgtggtgatacacacctgtggtttcagctacttgggaggctgaggtgagaggattacttgaacctcggaggttgaggctgtagtgagctgtgatcatgccactgcactccagcctgagcaacagaatgagacccatctccaaaaaaagaaaaagagagagagagaaacgtggatgttaagctgctggagagctttgttaggttgaaagttccctatataaaccatggattttttgcatataagccatttaataaatatcttactgattggttcacctgtcatataaagatactaatttgccctacctttctcttatttgtgaaaagaaaatgtacataaaagctctgtgaactttaaagttcattttgtgtcaagtacttttctaggtattgtacggactaaaagaaaggcctgaccagcactctcatagtctagtaattctttcctaatattttagtttcacagctctaatactttataataatcaaatatttcattacccataagtgtgaatatttaagctaaattgtaccattctcagtgtgagcagtattacccccaagggggcaaagattgtttcttagaagatgaaaaaaaatgtaccctttcttgtgtaaagaacagatatacatacattaaggtaaatagatacacaatttctctgtggtattacaattttattgagggaagactattaggaagaaaatacctaaaaaggctccgtggattgtgatggtggtaggggatgatgattttttaaaaggttcagaaactctgagctaaatatattgcaattatatttatttagcaagggcattttaaagagaagagatcccttaattctttagccaactacttcaaaattcagacttttgataattaagatttttccatgtattttacatataggtatatgttgtcggtggctatgatgggcaaaacagacttagcagcgtagaatgttatgattccttttcaaatcgatggactgaagttgctccccttaaggaagccgtgagttctcctgcagtgactagctgtgtaggcaaactgtttgtgattggtggaggacctgatgataatacttgttctgataaggtaagccatgcacttttaaagaaattaccaatattaagtacaagaagggaaatacagaaggcttatcaagtaggtagccaggtcacatagtgtgaggggtcttttaaaaattttctggtactatatgcttttggagaaaaacattgaattctgggttgctaaagtgagactctagtatatctaacaatttgctctaacaaatgtgatccaatctttttgaaatgagactatctgtgtagaagttttctactaaataaattgttctgagcctttgctgtcatctacaaaatctaaaaactatttatacaaaacacagttgagaagtgaattagcaaagggtaagacatagtaactaaatatgctgcttccaactgggtcattttctacatacttttgaagtatttttcagaaaaaaggaaaggaaacctccttagtgtaaatagaggatggctcaaagttgttccggttcagtaaacttctgggacgaaagaatatgtgctatcctgacatctcaggaaatgtttattctggaaaaaagcatctaatgcctagctggtttagcactgttaactgaattttgtcagtctattaattctttttctaaattcagtttaaaataatgtgatcaaatgttacttatttagaatttgttatttcagaatttgtgataattcagagcatactgattgaattgaggtttacttgttttcttttgaagaaaggactccctaaaagcattaagaagttatattcagatgtgaggcatagttatcctacataacacaattgtgaaaagatttagactgttaattttagtggacaaacctggtggccattcattctagaaacaatctgtgtgtttggtactctattctgcttgatagtaataaatttgcattttatttgagaatgttcgtaattcagacatttcactatcaggctaacctctcttaattctctgaattaataggattttattttaaataatgtttgtaggtattggtagattctttattaagtacatttccatttttgtttagaaattttaattatatatttttatatgttattaggttcaatcttatgatccagaaaccaattcttggctacttcgtgcagctatcccaattgccaaaaggtgtataacagctgtatccctaaacaacctgatctatgttgccggtggactgaccaaggcaatatactgttacgatccagttgaagattactggatgcacgtacagaatacattcagccgtcaggtaataacataaagcagtacaaaagaaaaataaatctaagagggaccaagtacataatcattattaatacactggaatttcaattttaaaatatttcaggctgggcgtggtggctcacgcctgtaatcccagcactttgggaggccgaggtggatagatcacttgaggtcaggagttcaagaccagcctggctaatatggtgaaaccccgtctctactaaaaaattatggccaggcgtggtggttcatgcctgtaatcccagcactttgggaggctgaggcaggccaatcacctgaggtcgggagttcgagaccagcctgaccaacatggagaaaccccgtctctgctaaaaatacaaaattagctgggcgtggtggcgcattgcctgtaatcccagctactagggaggctgcggcaggagaattgcttgaacccgggaggtggaggtcgcggtgagccgagatcgagccattgcactccagcctggacagcaagagcgaaactccgtctcaaaaataaataaataaataaaaataaaataaaataaaataaaacaaaataaaataaaaaattagctgggtttggtggcacacgcctgtaatcccagctgctcaggaggttgaggcgggagaatcacttgaatctgggaggcagaggttgcagtgagccgagatcatgccacttgcactccagcctgggcaacagagtgagactccgtctcaaaaaagtaaataaataagtaaaataaaatatttcatgtttgcttgaattattttatatatttttcaaaactccacataaagcatatggcaacctgttttgaactccttccaaggggtcattttattgaaataacttcctttttaccatcccatggagaagtatctgttacacttgggctgttcttttttttttctcttgacttttttcacaatcctactccagtatttatcccctctctttcatatttcagaagagaggaatgttcccaaacttgttgtttctttggttagaggctgggaaatctgttatttctgttgtaaaggaaatggctgtgctcacctttctttcatccatgtattctaaccggagccctactccctacccacactgccacctcccaaaaggccttttccccaccttttgattcatggctccttttccttccacccccaaaatgcttgatggttctgatgctgaaaatctggctctacacataccactctagagatgtactctcaaaggtcactgctaataatctcctcactcttgttcatactctcttgtttttctacccagtccttaaatatgttccttgagcctgtcctctgtcctcttcccagtttatactctttcctgaatcatctcatttactgctcagcactgatgtcttccaagtctgtatcgccatcaaagcctctctcctgtgttccaaactcaaatttctaactgcctatttgatattttatttgatattttacatgggtatttcaagattttaaatttcaaatagaactcaccttcttccccaaacctgttttttctatatttccaattaacctagaaacttaatttattagattatctttttcttctcttaaattgaattaatctagcctatcagttctcctattttttccattcctattgtttctatttttgttcaagttcttaccaagttttacctaaacaaacaaaaatactctaattagtcttcctttctctaatagcttgtcttgctagctcatttagcatcaattttctttctttctttctttctttctttctttctttctttctttctttctttctttctttcctttcttccttccttccttcccttctttccttcttttctttccttccttccttcctttctttctttctttttttgagacggagtttcactcttgtcacccaggctgaagtgcaatggcgcgatctccacacactgcaaactccgcctcctgggttcaagtgattctcctgcctcagcctcccgagtagctggaattacaggcgcccaccaccaagcccagctaattttttgtacttttagtagaaacggggtttcactatgttgaccaggctggtctcaaactcctgaccttgtgatccacctgcctcagcctcccaaagtgctgggattacaggcatgagccaccatgcccagcctattatttttcaataaatctacttattgtctcttctttgattggaaacctattaaataaaatccaaaacttttaccacttcattctagaccttctattgcctgaccttcatttgacctttcagcttcacattctataactttacctcaggtaccttaagtatctgtcatttgtagtctctaaacagatcataaatgttcttgccctggttcatgctgtcttcttatcctgtaatgcctgttttaccttctctacttgtaattctacttatctttcaaggaccacttcagtacaacagagtttaactggggcagaatggatctattttgctttctgatctgttaaagcactcatacctcttatggcaattgtatattcccttatgggtataaatgtttatttcctatactagaatttagtcttcttgaggacactatttcttctaactcatcttgtatgtatcttgcatttatttctgcatagtaaatatatatatattgaataagtaaacaaatgaggaagtaccagagggacttaattttaagataatcttatttgcaagatacattagagatacagcatagattataaggatagtgaatagggtttgaatataaaaccacttttctaaagttgttgacattgaggtatagtctccaattagtaatatatatgcagtaacattgccccagttaatgaaagggacataataggcacttcagctccatggtacagaatgagtattacgttttctccctctcatatcacatgtaagtaaaaataaatcacatttctccagctcagggacctcccctggaaaaccattctccagccctacagaagcgacagtgtaccctacttgcatgagaatcctcatgtggtcaagtattgagacttatttctaatttttaaaaaatctaagctgctttttattggtttatttcagtgaagattgtaaagaatgatgcatttttattaagaattactgctcaagctgggtgcagtggctcatgcatataatcccagcaccttgggaagctgaggcaggaggatcacctgaggccaagagttagggaccagcctgggtgacacagtgagaccctgtctcaaaaaaaatttaaaaaaaaaagaaagaaaaaagaaaaagaattaccatttattcggaactttgctatattgtataaaacgataacagtttaggaagataattgccagtatgtagcatattgcagggcatacatgaatattttttaactaggttattgagataaaactgagaaaaaaattaataataggacacacatggcacattttctctaattaaacaacattcattgactttagaaatttaaagaaaataaacatttggatcagaagtatattaagtctaacaaagacaaataattgaagttcaaatctagtactgggatttaggtgattattttctctcctctgtttattgttaccaccaatgctactaaatacatctatgcacacattgatctcggctcactgcaacctccgcctcccgggttcaagtgattctcctgcctcagtctcccaagtagctgggattacaggcgcatgccaccacacccagctaatttttgtatttttagtggagacagggttttgccatgttggtcaggctggtcttgaactcttgaccttaggtgatccgcctgcctcggcctcccaaagtgctgggattacaggcatgagccacggcacctggccttatgcacatgttattgataggtaatttttgagccgtgtgtgattgtttacccttttaatgccaaccgatgaaaaaggataaatcaaactaatttcattgtatacagttaaatgaacccaatactgttgctttttaaaatgcttagaatattaaatgcaaaaaagagctgaaaaaaatgaggtctttattttttatagtcctaatggaccctgcctatttctctgtttgtccttcaccatttccacgcctcttctgactttgcataattcctaaaaacacagcttattattcaaaacatattttgctttttaacctgtgtcaggaacatcctttaaaaaaaattgtgggattttttaaaaagtcagtgatgaagactttttttctctctcttcagtagaccaggtatttaaaataccattaaagattagaataattaaatgaaatctgattctttttgtctattgttgacagtttaacattttaagcatacaaaaataacgagagggttttttggttttttttttttttctttgcaatgttaggatcatgtttcgtttcagtctttaaaaataacattaaaactttatatattgataaattattgttcctactagctgcccttactcctgaatgaagagtaagtttttcatacagtataaacaaacagagtaaatggtattttactagcatgaaataagctattatatcggatagaggtaatttcctgatatgaatacttggtttcaaggttctttgctttatttaactctgagcattattatctgaaatggtattaattaccagaccatgtaattatatattgttttagaatcatcctcaaaataactagaggttcaatagtgggaactagcttgtacctgaaaactaaggtttttgtttgtttttattatattcagaacttgaagaatttatagaaagcgcttattgtgctttaaatgaaaaatattagagtttgttccataattggtgcaattcatgggggtgtggtattctgaattaaagtgtctttcactatatgataataggctaagtcattctgggtgtctataaattctaatataggcatttttaagtactcacaaattctttcagacctaaagatagtatccttctattatataaagccaccaagatttaatttcttctataagagcaaaatttatataaagcaaatttggtcaagtaaaaatgcttattgaactcattggtagaaactatttcattgttggttatgtggaaccaggataataaggtgcaataactctctgaattaaagtgaaactttaattggaaatggaagaatatctggcctgcagtataaccagatgcatgtaatagtgaatcagttgttaatgtagggttttttgtttgtttgtttgtttattttttttgagacggagtttcgctcttatcacccagactggagtgcagtggcacaacctcagctccctgcaacctccgcctcccgggttcaagcaattctcctgcctcagcctcccgagtagtagggattacaagcaccccccaccacgtccagctaattttttgtatttttagtagagatggtgtttcactgtgttgaccagactggtctcgaactcttgatctcaagtgatccacctgcctcggcctcccaaagtgctgggattacaggcatgagccaccatgcccagccaggttttgtttttgaagaatcactctcatccttgcaagaatatttgttttatatagtaactgtgttattgacagagaataataaaatttagcttagaatcccattgtgtgggaagttaactgtaagatgttatttgagacatttctatggcccagccaaggctcctaataacagtgttttgttaacttagttataaattttttcctcattcattcattcaatttttgggtaatcccatataatgaatattgttcctactccttggtcatgtaaccgccactttctataataaccttcctgtaataggagaagcaagccaggctctttaaagatgcttttgcttaactaccattaagttaaaacccttttatcagtccacatcctacctcccacatcttggccccaattactaacatataatcttttttttttttaacttttattttaagttcaggggcacaagtgcaggtttgttacataggtacactgtgtcatgggggtttgttgtacagattgtttcatcattcagttcttaagccctagtacccattaattttcctgatcctcttcctcccccaactctgcaccttctgaaaggcccgtgtgtgtgttgttcccctctatgtgtccctgtgttgtcatcatttggctcccacttataagtgagaacatgcagtatttggttttctgttcctgtgtaagtttgctaagggtaatggcctccagctccatccacgtccctacaaaggacatgatctcgttatttcttgtggctgctactgacatagcatctatcttgaaattcatttcattcatgcaaagttgtccagcgcttacacagaacacagagagcagagttgggccaaaggaccttagcttttatcatgtctcccttttttttgactgtgctaaagcattattttgcttttctgtttgttaccaaatcctttatcttcaatggttaattttttgtttatatatttggttaaacaggaaaactgtggtatgtctgtgtgtaatggtaaaatatatatcctgggcggaagacgggaaaatggagaagccacagacactattctctgttatgatcctgcaacaagtatcatcacaggggtagctgcaatgcccaggccagtgtcctatcatggctgtgtgactattcatagatacaatgagaaatgctttaaactctgaagacaggatacctcaccgaagaagccacactgatccaagatgggaggttttaaaaactctacagtgggaacttcacatatctcctttgtgccatatgcaaaaaatagtaaaaataataatttggtgcctttctcctcaaaatatcaatctttcaaactataataaagcctttcctataattgaaaaaaaaaacttttttgttaaaggtaatggtggttgttacttggcctttgaagagtgtacctttgtaagtatttgtaagaagtctatgtgaattaggaaatgtctgtctgcataccttttaggagcgtgtgaatggtgtcttcacttattatgtatgtttatctgtatgtatattccttattttgtcatatatgtagagaaaattgcatgacttgaggcatcatttaggttgaagaagttaatgcttaggatgcattctaggagaaaaaatcagttttaaaaacctttgttgttaacaaagtatatccagattggttaattttattgaagggtttttttctgtaattgataaaaatgtaatgacaacaattcaggcatcataaaatactgaactattgtgactttattcttagaattgctgtcttacattaaacatgtttttagggggaagttaggtaggagatagaaaaataagtgcccctacaagggggattaaaattacaagttaattcctaagagaaaaatggaatggcctttgaaggaaaaatgacccactatggctctcaaagtttttatgcatcatctcttcaatcctctaagaaagcctcttttcttaacttgataaagcagtggaaacccattttgcaatattgttttgtgaaaaacagggacagacagccaggtacagagactcacacctgtactcccaactactcagcaggctggggcaggaggattgcttgagcccaggagtctgaggctacagtgagctatgaacgcacacggcaccctagcctgggcaacaggttgcgacactgtctcaagagaaaagaaaaagaaaaatagggataggttttccttcctagcccagtagagtttgacctcattagtatggtgctttgggtgaggacctcttccttgattatcccactttctagtgaacagctaaaattcctgagagtctctactgttaaggtacctttaataggataaagcagggaccacctatctcagtgggtccatttttcttttaaaattagttatctgaaaaaacttagcagtagttcccatctttaaggtaagtctttcatttggtccccattgtgtaaaatactaatcaacattttcaagcttctgtacaacagactgcttttgtctagatttctcaactccactttataaagcttatcagttttcagagaggaatgtgaattttttttctaatgcaaataaatggatatggcaggaactacagcataagtgattattgtgattctgggtggacggatataatttacaacatttagggatgttctaggtagcctgctgtagtttgacttccagtcactgttgtctttcacattataatttgtatatttcttgtgatagaagggatgatgcaaatatgtaattaaagtgtcaccagatttctgttaaaaccaaggttgaaataaaaagcctaacattggtaagctacattgttttctcattttagaatgattcagagatttcagatagacattttttaaactttaatgcttagctagaatctacattctgaggaaaactctaaaaaacttaaaaatttttagggaatttttatttttcaaatcataattttaaaatgatagataccattttgtgataacaacaattcagaaaacaattttctatcctcttagttgaaagaatgtaggtacagtttggatacttgtactttaattttagagtaaacatctgcattatactcttatagataatagaattatttagttaagaaattctttacagtaaatgagataatgtgtgaaaaagtattttgtaaatgctgaggattctacaaatgatagttgttattttcatgtgtatttgtaagatcatgtccatttcatgaatataggacttcacataaaaaaagactttctcaagacaa

SEQ ID NO: 8049 - DNA, 2698 bp, Homo sapiens; identical to SEQ ID NO: 8047

SEQ ID NO: 8050 - DNA, 432 bp, Homo sapiens
tgttatacatttattttaatatccatgtgtttattatagtaaatttgaaatgaaatcctgaaaaacagaatttttttaaacacagacctcacaccaatattaattttttctctacataatttaaaactacataaattaagtacttaaaatttatattgaaggccaccaagaacttaggttgaatcttagaaaatttaaataactatttttaaagttacccaacttaatattttaattttttaatatttatcttcctttactaattcttgataaataatagcattagacttgataaaataaaaaagaattttagagtagaattaatatatcaaaaggggtatatcaaccaaattggtgtcagattgtattcattctctcatcacataaagatttttcttttgataggtgatgctcatatgaacctttggttta

SEQ ID NO: 8051 - DNA, 432 bp, Homo sapiens; identical to SEQ ID NO: 8050

SEQ ID NO: 8052 - DNA, 23825 bp, Homo sapiens
aggttattgcttacaactcagaaggtaaaagtaatccaagtgaagtagtagaatttactacttgccctgataaaccaggcatacctgtaaagccttcagtgaaaggaaagatacattcacacagttttaaaataacctggggtaagatattatgcatgtttatacattattacttttgcgtttgattaaaataatttgaatatgaagataatttttaagatatttgagtaaatttgttatctcaagccagtccaaaaagaaatgtgagagtcattcattgggtatgttttttgtggaaaaccttatactctcatacatgctaggttaagatatgataaaaaggaacttgcgatccactgtaagataatgagcaggggtagcactgtgaaatgaaggattactgaacttgcagctaaagtcacctgggtcatctggctctcgtaagaaatgaaaaccattcatttaaaacaaacatttatcgagcacctacctacatacctaatggaaaaacaaagatcccataaacttgacccttgcctgaaaaattcagaccaataaaaatgcttcagtgatatttataatattcaaaaatttcaaacaaccttaacatctaaagtaaatggaggctgggcatggtggcttacgcctgtaatcccaacactttgggaggcccaggcgggcagatcacatgaggtcaggagttcgagaccagcctggccaacatggtgaaaccccgtctctactaaaactacaaaaattagctgggcatggtggcacatgcctgtagtcccagctactcaggaggctgaagcaggagaatcgcttgaacccaggaggcagaggttgcagtgagtcgagattgtaccattgcattccagcctgggcaacagagtgagactccatctaaaaaaaataaataaaaataagtaaatggaatatcatgcagccattaaaaattgttatagagagccatattttaaatatggtaaattaagtgaaaagcagatgacaacagcatggagtaattgggtactggtattaagtcattgcaggtgattttttttttttaaacctagtttggtattctgtttattaggttttttttatcatttttatgttgttttgtaccttgcctaatactactttgcttctttggatagatccaccaaaagacaatggcggagcaaccatcaataaatatgtagtggagatggcagaaggttctaacggtatgaatggatattaaacactgatagatttattccagccagtctctttctattctttatggctttacattttatgtcatatcttttctttcttcttgcttttcataaggtacaccataaaaagatgttcacttcactttgggttgtcctggattttttttttttaatgtcataagtttattgacaaacatatctagtatgccatatgagttcaagtttgatccacttccagaggctgtacctcttaaaatgctcttcatatctgttaatggatgaactgaaacatccttatgttttaagtagttgttgtcttactacaagaaagggtgtagcaaatgcagatccaaagtacaaacacatcttagctagtaacgaccacttgttttccactgaaaatggcaaattcttcccagggccctcctcacagtggctcctacggaccacagaggttgtgaacctccggatgctctggcccaacgtagcgctgctggaagctctgcgaaaggcacagaaaccgaggacggatgaaatggcggcacctcaccaagaccttttttttttcctggattttttttttctttgtttgtagcagttaggattttgcctgttatgatccactttaaattgtgatttccagaaatacagtgaatcaaatgtaagagtgctgaacaactgtatcgttgcatttacatgttctttttgttctcatttatttacattgctcagcctctatacacctagaccaagtcattagatactatgaatcttctgaaggttagtttattcagttagatttatatacagatatatcagagaaggattaacttctaaaatttaactcacatcatactagttttagtagtaagttttatgactagtgaactttattcttgaatcacacatttagcagtgtttatttctatgaaatgacctatttcctgccaaaaagaaaaaaaagatgtcttttaattaggactagacttcctctgatactggttttttgtactctttgtatgctataacgttattactggaccagtaaacacatttaaaatgcttaattaaaagtaaattatcaatctaggccaaagtctgtacagagttacagagatatttcacttccacaaagccatgcagacttgtctaggaagctgcacacataaagaaaattagatcatttccaggaaaccgaaacaaacctaaattgtttctgacaaattacacaaatacttactttgtgaagctaggatacctgatgtgtccatgataccagaacgttaaacattacctagtatctgattgaacacaattcctcaccttacaggaaacaaatgggaaatgatatacagtggtgctaccagggaacatctttgtgatcgactgaatccaggctgtttctatcgtttacgagtttactgcatcagtgatggaggacagagtgcggtaatacttatatgtagattcttttgtgttgttattaagtttggccaaatggggtaggatcaccaggtgccacttcaaatattgaaacatatccacaaatggagaaaagtaacttctgtaacctgttgggttaatttgatagtgaccaaaatattctaatgtggtacttagctcacagtaagtattcagtgtgtgtctgttgtctggttggtattcagctttggaaaaacaaatacatgaaaacattggagaaaattttataaagataaatttgagaatgatgctcaataaccatactaagcagagatagaaataaaataattatagaccgatttactgctccataaattatgtgtgtgaggacacatcataaaatagtatctgctgtttaatctactttctaatatttacttacttcaaaaaagttggccattattttattattagagactcaataaccaaaatgaacttaaaatgtaccattgatataaagacataatgttctagggatgtatgtttattaatgagtgattttttttttttttgggaaacagtctcactctgtcgcccaggctggagtgcagtggcacgattggggctcactgcaacctctgcctcctgggttctgcaacctctgcctcctgggttcaagaattctcctgcttcagcctccctagtagctgggactacaggcgccccccaccacaactggctaatttttgtatttttagtagagacggggttttaccatgttggccaggctggcctcgaactcctgacttcgtgatccaccggcctcagcctcccacagtgctgggattacaggcatgagccaccgcacccggccaagtgattttttttttttaaatgaattaaaccaagaatggtttcttggatcattcataattgctgggttttttttttgaaatgaaatttaatgcaatgaaagtattcttttttaaaaatgaaatataggcattttgttgaaaatgaaactaatgtgcaactgagtgtgagtcctgcccaactggcttgtgctccagttgcttcattttatccagtaagaaaatctccctggatttcagaaaagcaacaacacatagacatgcacaaaatcctgttctactatagcattttacagcatttttacatagatagctttctgataaaaagatgaccaaatattttgtgtttaaaaagaatgttaagtatgaaccttaatatgttgcaagtaagtaatatgccactgagtttgtggcattgttttttttgagacagagtctcactctgttgcccaggctggagtgcagtggcacgatctcggctcactgccagctctgcctcttgggttcacaccattctcctgcctcagccttccaagtagctgggactacaggtgcctgccaccatgcccggctacttttttgtatttttagtagagactgggtttcaccatgttaaccaggatggtctcgatcttctgaccctgtgatccacccgcctcagcctcccaaagcgctgggattacaggtgtgagccaccgcgcccggcccagtgtggcattgtttttaacagagtgtctttaaaaataaaggctttttaaaatataaatatagcatagaaactaaaagcagtatcaaatacctagaaagatgccaagtaactggaaaagcttacctgattttagaattatttttaggtggaaaggatgaaggaaagataatcttttaatgtataagttaagcttggtgcagtgacaaatgtgtatagtctcagctactctggacgtgggaggattgcttgagcctaagaatttgaggctgtaatcatacctgtgaatagcaactgcattccatcctgggcaacataccaagaccccatctctaaaaataaataaataaatcagtgtttaggttaaaaatacagtctacagtagtaaagtagccaaaatattctaaacctccttacaacaatacaaacagcatatacagtattttaaaacatccctccttagaagagatttatggatccttttggagaagatcaaaaatattgcccattaaattgtgttggaagttgtttttttctttagttatggaaagaaaaggaaaggaagggttcattgaagttctttttcagtaacttgctttgtatatagtagttgcacagtacatgtctttctttgtctatgaaaattttgagtttttatttaattgggttttcattttttttcagaactttattccttttttgttgacaatcaagtacaatttcaaattatcagtgcaatatttgtgtttatattatttttccttaccaaaagcaatctgattatttggttttggggcatttttgttttctttttgcttttgttttggcaggtctctgaatctttacttgtgcagactccagctgtgcctcctggcccatgcctccctcccagattacagggtagacccaaagcaaaagaaatacagttacgatggggtaatttccattttggtaataaattataattaagctagaacaggaagtattcgtcttgttaaattgcattaatctttccatcttttaggaccccctctggttgatggtggatcacccatttcctgttacagtgtggaaatgtctcctatagaaaaagatgaacctagagaagtttaccaaggttctgaagtagaatgtacagtgagcagccttcttcctggaaagacatacagcttcagactacgtgcagctaacaaaatgggggtaagaagactgtgctggtagaattataatcacaatggtgatatatgtttcattttaacatatatcatcatatccattatttggccatttggctttaacatatgactccaaattttacaatttttaacaagcctacattgataaatacaagagaagtcggtatattccataacttaatttttatgaaatctcagtatttttagatcccacttacagtttgtgacactttggacttcagctgggctagagtttaccttttaggcagtgttaatagagtttacttaatcaatttaagagtagaaataaaatcataagtactgaagttttttgaggctgattgaagtttttgaggtttttgaggctgattgaagttttttgaggctaaagtagcatttactttcagttggcaactaattatgattcattttttttgcccaaatgaaaaaaaacttatgcttgaaactattctggttttgtatgtattttttgaaatattatctatgtatttaatatataactccaaaaagtggacaaagtaggtgatatctccatttcacaactaaggaaacgggttcaggaaagctaaatattttgcccacagtcatacaaactaataagtgatagaggtaagctacaaaccttagtttgtcagactccagagccaaagctctttccactcagctatgacacctctcatctctctgcaataaagcaggttccctaaggacaaagcagtaatttcctatctcagctaaataacaatttctttcaactattgtataattaaaatttttatagaattaaactgacagttctctcctacccattattttggtgaactatactatatttcaaatcctgttttccaacagggttctgtatttacatctgtaaacttatttttcaatttatttctgtttgattttttgaaacagggtctcaccctgtcacccagggtggaatgcagtggtgtgatcttggctctctgcaacctccgcctcctgggctcaggtgacccttctacctcagcctcccaagtagctgggaccacaggtgtacatcaccacacctggataattttttcatatttttagtagagagagggttttgtcatgttgcccaggttagtctcaaactcctgggctcaagagatctacccacctcggcctcccaaagtagtgggattacaggcaagagccactatgcccggcctaaatttcttatatgtcaaatttatatacttaggctgctcttacacaagtcattcctttctgtaagaagccatcttgtcagcctcacaaggctgcagtacactaggatcgcatctttaatacttacgtcttaatttatattttcaggtttgtgataatttgtcaaaatcaccttaagtaaatatttactttccgtatttccagagaacatacattttagacctttctaaagctattccagattttaagataaaatttatgcctaccagagagcagtactgataaataatgtactataagtacactatttacagttttattttaaataaaatccattcagcatgctagaatggtgaagctttgtcattattttgttgttgtcgacatgaattaaccttgttcaaaaaaggggggcaaaaaaatgacatttgtcatggaaaactttttttaatccctataggacttgaggaacagaatccttacttcagttcttataaatagttgtgctaaacctcaagtttctatcatttagtggccctttccatgctctccatgaactaaactgaattatctgtgtgactgatatgttttcttaggttgccttataacatgtataacagtactctttatttgtagatacctttgtatgtatgtgtgtgtatagacagatagacagactttttttttgagacagggtatctgtcacccaggctggagagcaggggtatgatcatggctcactgcaacctcaacctcccaggcttaagcgatcctcctgcctcagcctcctgagtagcagggactataggtgcacaccaccataccaggctgattttttacttttttatagagatgggggtccccttatgtttcccaggttggtctcaaactctcgggctcaagtgattcccccaccttagcctcccaaagaggtgggattacaggcatgagcctctgcacctgaccttttatatatacttattattgtaaatcatttgctgccactagcagtctgtaagtctatactattaaatgacatattggccaggcatggtggtaaatgcatgtaatcccagcactttgggaggccaaggtgggtgggtcacttgaggtcaggagttcgagaccagcctgaccgacatggtgaaaccccttctctgctaaaaatgcaaaacttagctgggcatagtggcgtgtgcctgtaatcccagctgctctggaggctgaggcaggaaaatcacttgaacctgggaggcggaggttacagtgagctgaaatcatgccactacatccagcctgggcgacagagtgagactctgtctcaaaaaaaaaagcaattaaaaacaaaaaactattaaatgacagatttatatttggaattttggctaggcacagtagctcacacctgtaatcccaatacttggggaggccgaggctggcagatcacttcaggccaggagttcgggaccagcctggccaacatcgggaaaccccatatctactaaaaatacaaaaattagctgggcttggtggtacccacacctgtagtcccagctactcaggaggctgaggcacaagaatcgcttgaacccaggaggtggaggttgcagtgagctgagattgtgccactgaactccagcctgggcaacaggctttttctcaaaaaaataataacatatttggaattttaaaattgattgggttttcaaatttattgttttaaattaggaacttttgaactactaataaaactatctgccatagttcattgatttttacatgaaatatttattttcaagatggtttcaagattacttttcacaaagcaggcgcattatatcaccattttgctctgccttgtaaacttgccatctgggatttttgggtggtattcatgtgagagtaaagcatattctctagcagtttcctatagctacaggtttgtttgttttttttcattgcttctaacaggatatagttactatgagtccatgaaatataatggaaatgtgaataaggagtttactgaagactttaaacatttgatttttttttaatcgtgaatatgatagaaactggtagtgttgagcagtgcaaatatttgaagtggtgatttgtgaaatagcccagcattgccttaaacaaaatcacagtctacttcttgttttatacatatgatagtataaaaggtttcttttttttcccattttctgagatttatagattggtatatagctttaaactatataaagttttatggaaagattttttaaacttattaatataaattttaaagttgatataattaaagtgagcctatcttctgtttataaaatgcaagattccttaacatttataattatacagatgaaatagtttctataaggaagttggagttttgattttgccctttatagatgttagattgtgcagatttgtctgtattttctcaccatatcaaataatacttttattataagattggttttcaagagccgtattagttgttataattgattagtatatagtttaactttattcatcatatttatactgtagatttatggccagaggttgaggttatttcaggagagttgatgaccttcatttaaagtctagctaaaatcagtgctgtaaacaaaaggaaacatttacgtttgtttctgtttgccatatatagtagccttgattttttacttttttataaaacagttacgttcacaatattagcctgaggtattaatgacattgtgatgatacaaaatggtgtatattccctgtgcaatcggatttggaggaaaaatgaaggacttaacattatctgaagtcactgatactctgaataagtatggtcaaggagtgaactattttcttttggaaaaactttttaaaattttatttttaaagtattatactgttatttttagggcctaatggttacattgaatagttggtttcaccttcttaaggttttttaccaatattcatgaaacttgatatttttaaaatccctaccctttggtaagtcgttatttattaacatttttattggtgattaatacatgttttttcctaaattaaaaataaataacttggaataattttaatattaaatatttgttaacaactgaatgtttccatagaattttctgagaagttgagtttcttagagttttcgtagctggctgggcccagtggctcatgcctgtaatcccagcactttggctcaagcagtcctccctctgagacaggaggaccacttgtgcccaggagtctgagaccagcctgggcaacatggtgaaaccctgtctctgtaaaaagtagaaaaattagcccagcatggtagtgcacacccgtagtcccagctactcaggaggctgaggtgggaggatggcttgagcccaggaagtcgagggtgcagtgagccatgtttgcaccactgcactcctgcagtctaggtgatggagccagccagaccttgtctcaaaaaaaaaaaaaaaaaaaaaaaaagaagttgagctagctcttaaagatgggcatttggcaaaactgcctgatacagtgcagtaacaagtaggtttacttctgaccattataatgatgcgccactgttaagtgaaaataccagtgtattggggcttttcttttgctaatgagctttgaaaaattgatgacaagaaatttctgtaattgttctcctatgtgtcggggaaggaatttgccaatactgaataaaattttttatattccgggtaatgtatgttaaaagtaattatgagaaagtgagctttttagcatggaacagaaaaatcaaattctgttacaaaataaacaaatttatagaacagaatgttggtaaaatttgatatggaatatgcctaagaaagattcgtgaagtattaaaaaattaaaaataataatttacacctaccatctcccgtacctttaattagtatcaatttcttcactccttatatttctcctgaattattccaccgacctcattccctaatgtcctgcccttcttacaaaaaccatttcctgaagaaataaggggcagaagaaagtataggtaaatgaaactttaaaatttctcacacctttactttcatgatttttaagtctttttagttaatgtgaatacttatagaattatgaccaaattaatcttgaaacacagggaaaagactttattaatgaatctttaaatatgcagttctgtgcaatcagtggacatttaagggtgaaaaataaaaacactagttacatttgtttttctagtttggaccattttcagaaaaatgtgatattactacagcccctgggccaccagatcagtgcaagccccctcaagtgacatgtagatctgcaacttgtgcacaagtgaattgggaggtattgtaatttccattgacttgtatctactttcttaagtgaatagaatagtttatataaaagaataaagatactgttcatttttaccgcctatattatacagagtaagccctagtttaattcacatgaaaaacagtgacttctttttcctctttgaagaatttgagtaaggtatatttgcattacaaatatttagattcctgttcattatgtgctttgtatttttatgaatggctttgtctcagtactgagatatttcagccactgtaagtttaatgttcagaatagacatacacaggaattagtaaattctatttctcttatatttatccagtacacatctccagtgtacttattgtggatagtaataatcagtgatgataattattatattttcagttccctttgaaatttaacaaaatgtgtgtatgcttttaacatttcatattaatagaattatcttgaaacatatttaccttaaaacactctttctaaagtgacttagtcatatttctacttctaattcaaaacagttatatatttgaccaatcttaaattcagataatcttaatgaataaaaaatgtaaaattgaacagttttgattgtgcttaaaagttttaaagaaactcaaaagcaatctagttttacatgtgctcaggtaaagagcatttttggccaaaagctatttaatcaacatcaagactaagacctttatccttttcttaatttaaaggttcctttgagtaatggaacagatgtcactgaatatcgactggagtggggaggagttgaaggaagtatgcagatatgttactgtgggcctggtctcagttatgaaataaaaggactttcaccagcaactacctattattgcagggtccaggtaaagatgatcagtaccttgtcacttaactctatccagagttttatatttcattggcattttcatggtcatgactttgttaactcggaggctctgttaatttgtaggctctgagtgttgtgggtgcaggccctttcagtgaagtagtagcctgtgtgactccaccatcagttcctggcattgtgacctgtcttcaagaaataagcgatgatgagatagaaaatccccattattcaccttctacatgccttgcaataagctgggaaaagccttgtgatcatggttcggaaatccttgcctacagcatagactttggagataaacaatccctaacagtgggaaaggttacaagctatattatcaacaatttgcaaccagatacaacatacaggtatactctaaaaattatgttgatttttgcctagaccagagagacgctttaaataaaacaatcataaccaaactttttttcttatgtggcacttagaatacgaattcaagccttgaatagccttggagctggtcctttcagccatatgataaaattaaaaactaagcctctccctcctgatccacctcgtctggaatgtgttgcctttagccaccagaaccttaagctgaaatggggagaaggaactccaaagacattgtcaaccgattctattcagtaccaccttcagatggaggataagaatggacggtaggtttttttaattgcttctttatatagtttcttaggtcttaagtatatacatttctgtaactattagaagtaggccaggtgtggtggctgacacctgtaatctcagcactttgggaggctgaggcaggcgaattgcttgagcccaggagtgcaagaccagcctgggcaagacagtgagaccttgtctctaaaaaaaatttattttaatgaagtaagttttcaaaaacgaagtcaagattgtcatacaaaagtgtgctgtttttaaaacgttagaaaacacaatgtacatttcctgtttataatttgtgagtggaataccaagagaaaaaaataagtgggctactgtttggttgttttctgtaatccatttactgttttcatgatagtaaaagacacctaatcttagatacaaaataaactcttcagtgtttatttctagcaggacacaattttttttttttaagacaaggtcttgctctgtcacccaggctggcctccagtggcactatcttggctcattgcaacctctgcctccagggctggagccatcctcccacctcagctccccaagtatctgtgaccacaggcgtgggccactacacctggctaatttttgtatttttagtagagatggggtttcaccatgtcgctcacactggtctcgaactcctgggctcaagtggtcctccccgctcagcctcactgagtgctgagattacaactcatgagccactgtgcctgaccgaaacaattttttttttttttttttttgagacggagtctcactctcaccaggctggagtgcagtgacgcgatctcggctcactgcaatctccgcctctcaggttcaaacaattcccctgcctcagcctcccaagtagctgggactacaggtgcgcaccaccacgcccggctaattttttgtattttagtagaggcggagtttcaccatgttggccaggatggtctccatctcctgacctcccgatccacctgcctcgacctcccaaagtgctgggattacaggcgtgagccactgcacccggccctgaaacaattttatagtaaatgattatgatcgttcctggcctctgagatccttgagggcagagattatgtttcagtcttttccagattcctgacacagggcctgcacgctaaatgaatacagttcagtttttcactgtgtgatctcagttagattctgtgattaattatctagtccctttgctaatcactgttgctaatctttgctaatctttgaattagaaagaacctaatttcattcaggttctttctgtgcctctttcacatcttcatgtacatgttgtactattcctatataatgtgccatatactgccacactaaatcatgtattttaattacagtgttaactctgaatatttgtaacagtcattctaatgccaactagggctatttattcacattatattccatataagcaatgccacatacctcccacagctgttaatcctttaatattttaagaattttgaattttgcttttctacttttcactgaatatattagaaacaatttccaaatctgatggactcagaatactagtaacagtttttcccaagatttacttttctgtgttgtttgtatcttagccaggtattcaacaatgaaatattcatggtgcttgtacataaccactctctatcagaaatacttatacatttaaaataacatatggaataattttgtatactagtatatcaccagtaagaacattacacagaacaaacgtgatcatttcctaaaatctgtatcgatgaatgttagcctttgttcttggcagaattttatgtaatctttgtagccttatctctacaaagagattatttgccttgtacaggtttttggtatagccatttatctttaatatatgttattattactggacaaattaattgtttaaatttttttcctcccctttctagcatacatttggggtagtgcaagaaggcttactggaaacaggtctaattagtgtttggttgaaagataatagaataaagattctattagatataaattctattatagaacttccaacttaatattcagctagcatctagagaattgttatggggtatgaatatggctcatggcctttggttgtggaaaataaagaaattaaaaccttttatgatactgttaagtttaatgcacacatttaataaattaaatcaatttaatatctttgattactttcattccctttgattttcacaactatatacacttgctgtgggatggtatcataatgatactttagttgttccctgatccagattttgtcattgttcagcttttttaaacagtggtattaccactatttttttttcctgtcattaaaaaaaaatttagaggttgaaaaggcaaggcttatccaattactgcttattggaagtactgtttcttcctgtcattaaatatttctttatttttaacttggctacaattttcagactgttagcattgaataagcattcattattcattctctaatttccaaaaattttagaaacatccaatcaaaaataatgggatgcattcaacttatagataacatattaggagaaatatgtatgatattcaacttcattgaacagttcaagtgggtaatgtattggaaattttatattatcatactgcttttgtaaatctctaaaaaaacgtcaccaagtcaactaaaaatctgcctgggaattgagaattctcttttttccagataaagacaaggaagattaaaatagaaacttaatctcatagctcaggtctctatgccatacttggcaaattttatcaatatgactttagttagaaataatttgtaatgaaaattgtgatgttctgagcatcttttaaaatgtacattaacaaaacagtattcagaaacaaagctaaaccggaagcctgagaagaaacagttatggtcggacatgaaatttagtaacagacttttggtaaatcatgtcaaattgggaaatttaccaaatatcctatttttcttaatctgatgaaaaacagatttattttaagtgacatagagttcctggcatcaaacttttggggtaacttatcactcctaaataatgttcataactgtgtttttatactagtttgtaaaacactttaataaggtatcataaggtagtataaggtttatctaatagttatttccattttaggtttgtatccctatacagaggaccatgtcatacatacaaagtacaaagacttaatgagtcaacatcctataaattctgtattcaagcttgtaatgaagctggggaaggtcccctctcccaagaatatattttcactactccaaaatctgtcccagctgccttgaaaggtaagttatacatcctgaacttattttctttataataaattactttttaatgtattttcataaatgctttgtttactgatattaaaatttagcatccagtatatgtccaccagttatacaaaatcgtataggcaagcccaactctactgagagttccactcaataataaaagctgttttatctggcacgctcatattcagacaagtactggcttttgtcactgatgtttttaataatgtagcataaaaatactaaattgaataggaaggctggttttctaatgaggtcatttgcttaaagaaaaaaatcacaaactctggttgtttaaacgttttgagttattgatattacattcatttggatttcagaaggaaagcttggtcatctgttaagcaaaacaaattcttcattaatgtgggtttttcaattagttttacacacacatgtacacatatttacacacatttgtatatacatttatcttttaattttagaggggttcttattttaaagtgactctggcaagggctacactctatttttagctgaaaagtctataaagttaattgctctgaagactaatcacagagacttctagaaccatatcctagatcatgtacttaaacctatcatttgttaaacagcagaactcttcttgactagtctttctaataatattgagtttcactgagtcatttttctgtttgctcatcaagtttagtgtctcttagctttaagaagagtgctgactataagcagggcacagtggctcacacctataagcccagtgctttgggagactgaagtgggaggctcacttaaggccaggagtattgagaccaacgtgggcaacatactgagacctgcctctctacaaaagaaattttgaatcagctgggcatggcagcatatgcctgtgtgtgtagctgcacaggaggctgaggctgcattgagctatgatcgcaccactgttgtccaggctgggtgacagagtgagatcccatatcttagaatacaagagtgctgattttaacctctttggatgcaaatttcaaaaattcactgatacttatttcaagtttataagtggattttaaatatttgttgatttttattaagacaagtgtctgcatgatgtaccaaattaaaaatcaagtggaacagatattatttatatttgtttcctacagcccccaaaatagagaaagtaaatgatcacatttgtgaaattacatgggagtgtttacagccaatgaaaggtgatccagttatttacagtcttcaagttatgttgggaaaagattcagaattcaaacaggtatgtaccaagatattaatgtgtggatgcatatttttacccttttttaatttttatgtattttcagtgtaagatttggccatctttaccttttaattcataaatatttattcagtatatattatgttccagagatctcaagattccaaatcttttcagtatgaactacacttgaacagattattcatttatctgataagtattcattgaattctgtgccaggcactcaggatatagcactgaacaaaaagtcccttgcctccatggagcttacttacattctggtggaaaagaagacactataagcaagtaaacatgacaatatattgtcagatataagtgtaatggagaaaaaacaaaattggataaaagaaatagggagtggagggggagggcactgagtgttatttcatttggggcactcagctgacatttcagcatggcccagaggagatgactatggagagaagagtgttccaagaagatacgctgaggcaggaacatgcctattaaatctgatgaacataaaggagccaatatgactggatggagagagcaaagggaagagttgataaggtcggatagttaatcctaaggggcctataggtggtatggagtgacgtaaggcataataggccatactgtggcttttactccacgtgaaatgagaagacagtggaggattttgaccagggtattcacgtgatcagacacaacgttgttttgactatagtgttgaaactacagtaggacaagggcagaactagaaagactaataaggaggcttttacaataatagtattaataatagtcataatgcagtgctgtaaatatgacattaggcatgaagttataatggaaacctagaggaattgtcaccttcctagccaagaggtttcaaagatagctttctgataaagcaagaatagcagtgagatagagtggagtgttgccaatgtttgttacaacttttaaaaagaataagcttttataccactccaaagactaattaaatacctatacatttcacctgattttccctttttcctgtaaccttaattttgagggcttttaagctgggttgttttcattgtgtcttatattttcctcttccactaaaaaaaagatccttcatttgttttattccagtattgtgctattgtaaccactctatgtaatatcttaactgaaattacaaaagatccaaagagtcagattaaatctggcatgcaattgtttttctttattaagccatctgcaaattgacaggataattagatttgaaatgtaatttacagataagtaggtttccttctaaggaggaagcaaaattaatattaaagaaaatataattgtattacacgtttaaaggaaatagggattccacatttgagtagtatatgaataaccttaaggcttgtttgaatgacttttcttgggtgtataaaccttctgaaattagcttgagcaggttaatctgttttcttcagtcctgtatttacagttacctgtgtctcttcctgcttagaggtcttcccacatctgaaatacaaaattgaaaacttgatcccatcatcttccctcccagtatctcctctccaacatctttacttcatcagtgtcatagacaccaatatcatcttggtctccaagctttaaattcttagatgaatttttttttcctatcaactcttaatcagaatttgtttctaaatccataaaactacatcagggcctcatcactttttacatgtacatcaagagtccctgtcctactcagctcccttcagtccttcacacagcctcacgattaggattccataaacactgttttaatgtcacacacctacagtggtcccttttgaattaacctaaatttccaactagtgtaattaatgtattcttcctctttgtaccagatctcttatcaccctcatgccatttgttgaggtttttctttcttaacctaatactgccaggctcatggaatggtatatgaagacacatggaaagtataaagacaaaaatcatctattatatccataagacaaatacatatttttaatttttactcaatttacttcagtgttatgtatacaattttacactactttatcatacaacattctgttttaagtgaatccttttacaggttgaagcatcccaaataaagtccaaaattcaaaatgttccacccaaaatctgaaactttttgaggatcgatatgacactcaaaggaaatgctcattggagcatttccaatttcagatttttgggtttggaatgctcaactagtaaatatgcaactattccaaaatcaaaaaaattgaaatgcttctggttccaagcatttcttataagggatacccaacctgtaccatctcccaaacatggatcatttctacattctattccctgaaacattatgcatccttagaactaatgtatagtcaccattttctttcagatttatcttaaagcttctttcagtaagttcctttatatattgttatcagcatccacatttttatttattgccaataattcactaatttaatgtccttttattaagtacctactatatgctagattctggagacagaaaaatgagacagagatcttactttactttgagagcaaagcaatatgtaaaaatttagatttacatcacaggtacaattgaggcagctaaaagtacttgaaagcccccatgtgttggttcttctgacttgtagcccaccaactaactggagaaactcaactgacaagtcatttaaccctatgaaccttggttttctcaattacagaatgagtggtgggaggttgctcattattggaaatgatagctcctacagattgagcagtgactgcatgctgagcactgcgctaagtgctttaacaagcattagttcatttcatcctcataattatcatacatgttaactactagtatgtctgttatactaaggtagttggtctaaaatcacatctggagtgtgaagtggtagagcagaccttggatgccaggggtgaacagttctagtatatagcttcttatttatgcctagtgttccattattggaacactaagcttgtggtagttatttatatctcactgatcaaggttattgccaaggtctgatttttcacaaaaaaaaaatttgcaacctctggcataaatgggttaattactagcacattcctctgaaaatccgtggaatttcattctttttatttcccttgtgaggcatggcagaggaggtcctattttctgattctaagtgatctcccctctctggtttatacagtgatttgccataggcacctatagaaagctccccttattcattttccatttcattgtacagatatgtttgaaattatatggaaatttatcagttatacaaagacataatgggggaagcaaaagtagacactatcccttctttgatggaatgattgcattgaaaaatgacttcttacatttgagaaaagcaagaaaatgcttgaggaccgattttgcttgttctctagctgccctggggcacatctgcactccttaattcatctgtgaaccgtataagggtagatcctcgcttttgaaatttctcttgcccctatgcaacaaacagataagtactttaatggacaggtatttttaacatgtcatttaaaagataaaatcaatggcattcactggctttcacatgaaaaacaattctaacactagccagttttaacacattttctgtccagccttcacacgtaattcttccttctaatattttattaacagatttacaagggtcccgactcttccttccggtattccagccttcagctgaactgtgaatatcgcttccgtgtatgtgccattcgccagtgccaagactctctgggacaccaggacctcgtaggtccctacagcaccacagtgctcttcatctctcagaggactgaaccaccagccagcaccaacagagacactgtggaaagcacaaggacccgacgggcactgagtgacgagcagtgtgctgccgtcatccttgtgctgtttgctttcttttccattttgattgcctttatcattcagtactttgtaatcaagtgaaaatataactttattttttaactctattacattttattttgtcatgtactaaaattatttctgtattgcttttataaaaaacagtggcatttagcactggcattgagactatagcacatcatttttgccattttcagtgcttatattgttaggtagaggctggcactttattagaatgcaagccacaaaaatatcaattttgttttttttgttagggtgggtcttctttttttctttccctctctctttttttaacaaatgccttcttatagaaaaactttctaagaggcaacaatttagaatggatattttgacgaatcggcatgagtgtaacagtgataacctgatctgtttgttttaaagattattaccaagtgaaaaattcagaatgaatagaatttacactaacatgctatataaaatgttaaagtctgatgctgtgaaagcaatctagtgctatatttctacctcctcatttgtcttaattatttggtaagtgggattatgatgagtaactggaggggcttagaaacaaaaactggatgaaagagtatgcatgaagaaaagcttctttgataaatgtggagttcttcattataaatatatattcatgaattcacagataagtacttaaagaacagacagtttacttggcctaaaaatattttgatgtttactcaaaaagtacctcttcaggtcttgagaacatggaaaagaattgagtgcttttaaatactttttagaaagtaatcataaaagtaaattgaatttcaaacctatttggcttctgttttgtgaacctttgaactatatgtatgtgtataagggtatacacatacatatatggcatataacaagtgtacacatatacacataacaagtgtagaagtatatattacatacatacactcactctgtctggtataggctaattttgaagaactcccataagtttctgctgcttctcccataactgctgccaccaccatcagaattcataatcaaacctaacctttttgtttggggcaccaaatctgaagacaaaattaatttgcaccagtaaacttcaagctgctttctttcttgaaaactaaacgtttaacgtataatgtctgtttggatactgttccaaattgttgattgcatgtggttaatgttgcattagagcactttgcaattgcataattcattaatgttttgtgagcttgcatttgtgagttattggatgatcagactgaattttgtcaagtatcacattgtacatcttgcctagatgtcgatgactgcaagtaataatacagtttataatgaaactatctacaattcttgttttagcacatctgttatccgtaaaacacctgtaactagcttttttaatttattatttgaattttaggatagcgaatcactaatttttagttgctgaggttggcattttagtgattattaagcacttctgtcagtctttgaaaaaagaacgtattttttgtgctttgaagatctctgaagaatttcttttataatagaatgggcatgtattgtaacagttttatgtcaaatgatctgtgctgtagaaaaacattaacccttgttcaaaaaagaaatggataaacttggcctttctaagtggtaagaatgacctgtcactataatatactgtatgtttacattttatttaaatttaatctcttatgtatagggtgataaccttccccagaaacaacagtgattgcgattgttttctagaaacttctttaaagtgccacatttggcagtacaaatgagtctgagtgtaatagcccagagatttatatatagttgaatgtctaaaatggtaaaatgtgccactgtgtcaagttacagtggcttatgtttttcatagtaattcaaatgaacttcctatttttgatagtaaatgtcatttaatagtatacttgccatttgagcctcactgcaaaattagtgcagaggagaaaacaatttttaatgtaatcttgattttacctcatatactgtacattccaaaaactctaaactttttaaagattatagatacactaccaaacatatcaccttaaaattgtataaggctgaatgaacttcatacaaatgaaaaaaatctcataaaaatacataaactatgtagcaaaagtatctgtaaaatccatggaaaataaaagttgtatcattctttttgagatacgtttattgtattcatatatattcattatttgctacctgtttaagaaagtgaaatgttatggtctcccctcttccaatgagcttaaaacatttttcccaacagtatataaatcttcaacatgagaggatgtatatttattatataaagcccagtaaagaataaaattagaagttttatcctagtgactt

SEQ ID NO: 8053 - DNA, 23823 bp, Homo sapiens
aggttattgcttacaactcagaaggtaaaagtaatccaagtgaagtagtagaatttactacttgccctgataaaccaggcatacctgtaaagccttcagtgaaaggaaagatacattcacacagttttaaaataacctggggtaagatattatgcatgtttatacattattacttttgcgtttgattaaaataatttgaatatgaagataatttttaagatatttgagtaaatttgttatctcaagccagtccaaaaagaaatgtgagagtcattcattgggtatgttttttgtggaaaaccttatactctcatacatgctaggttaagatatgataaaaaggaacttgcgatccactgtaagataatgagcaggggtagcactgtgaaatgaaggattactgaacttgcagctaaagtcacctgggtcatctggctctcgtaagaaatgaaaaccattcatttaaaacaaacatttatcgagcacctacctacatacctaatggaaaaacaaagatcccataaacttgacccttgcctgaaaaattcagaccaataaaaatgcttcagtgatatttataatattcaaaaatttcaaacaaccttaacatctaaagtaaatggaggctgggcatggtggcttacgcctgtaatcccaacactttgggaggcccaggcgggcagatcacatgaggtcaggagttcgagaccagcctggccaacatggtgaaaccccgtctctactaaaactacaaaaattagctgggcatggtggcacatgcctgtagtcccagctactcaggaggctgaagcaggagaatcgcttgaacccaggaggcagaggttgcagtgagtcgagattgtaccattgcattccagcctgggcaacagagtgagactccatctaaaaaaaataaataaaaataagtaaatggaatatcatgcagccattaaaaattgttatagagagccatattttaaatatggtaaattaagtgaaaagcagatgacaacagcatggagtaattgggtactggtattaagtcattgcaggtgattttttttttttaaacctagtttggtattctgtttattaggttttttttatcatttttatgttggtttgtaccttgcctaatactactttgcttctttggatagatccaccaaaagacaatggcggagcaaccatcaataaatatgtagtggagatggcagaaggttctaacggtatgaatggatattaaacactgatagatttattccagccagtctctttctattctttatggctttacattttatgtcatatcttttctttcttcttgcttttcataaggtacaccataaaaagatgttcacttcactttgggttgtcctggattttttttttttaatgtcataagtttattgacaaacatatctagtatgccatatgagttcaagtttgatccacttccagaggctgtacctcttaaaatgctcttcatatctgttaatggatgaactgaaacatccttatgttttaagtagttgttgtcttactacaagaaagggtgtagcaaatgcagatccaaagtacaaacacatcttagctagtaacgaccacttgttttccactgaaaatggcaaattcttcccagggccctcctcacagtggctcctacggaccacagaggttgtgaacctccggatgctctggcccaacgtagcgctgctggaagctctgcgaaaggcacagaaaccgaggacggatgaaatggcggcacctcaccaagaccttttttttttcctggattttttttttctttgtttgtagcagttaggattttgcctgttatgatccactttaaattgtgatttccagaaatacagtgaatcaaatgtaagagtgctgaacaactgtatcgttgcatttacatgttctttttgttctcatttatttacattgctcagcctctatacacctagaccaagtcattagatactatgaatcttctgaaggttagtttattcagttagatttatatacagatatatcagagaaggattaacttctaaaatttaactcacatcatactagttttagtagtaagttttatgactagtgaactttattcttgaatcacacatttagcagtgtttatttctatgaaatgacctatttcctgccaaaaagaaaaaaaagatgtcttttaattaggactagacttcctctgatactggttttttgtactctttgtatgctataacgttattactggaccagtaaacacatttaaaatgcttaattaaaagtaaattatcaatctaggccaaagtctgtacagagttacagagatatttcacttccacaaagccatgcagacttgtctaggaagctgcacacataaagaaaattagatcatttccaggaaaccgaaacaaacctaaattgtttctgacaaattacacaaatacttactttgtgaagctaggatacctgatgtgtccatgataccagaacgttaaacattacctagtatctgattgaacacaattcctcaccttacaggaaacaaatgggaaatgatatacagtggtgctaccagggaacatctttgtgatcgactgaatccaggctgtttctatcgtttacgagtttactgcatcagtgatggaggacagagtgcggtaatacttatatgtagattcttttgtgttgttattaagtttggccaaatggggtaggatcaccaggtgccacttcaaatattgaaacatatccacaaatggagaaaagtaacttctgtaacctgttgggttaatttgatagtgaccaaaatattctaatgtggtacttagctcacagtaagtattcagtgtgtgtctgttgtctggttggtattcagctttggaaaaacaaatacatgaaaacattggagaaaattttataaagataaatttgagaatgatgctcaataaccatactaagcagagatagaaataaaataattatagaccgatttactgctccataaattatgtgtgtgaggacacatcataaaatagtatctgctgtttaatctactttctaatatttacttacttcaaaaaagttggccattattttattattagagactcaataaccaaaatgaacttaaaatgtaccattgatataaagacataatgttctagggatgtatgtttattaatgagtgattttttttttttttgggaaacagtctcactctgtcgcccaggctggagtgcagtggcacgattggggctcactgcaacctctgcctcctgggttctgcaacctctgcctcctgggttcaagaattctcctgcttcagcctccctagtagctgggactacaggcgccccccaccacaactggctaatttttgtatttttagtagagacggggttttaccatgttggccaggctggcctcgaactcctgacttcgtgatccaccggcctcagcctcccacagtgctgggattacaggcatgagccaccgcacccggccaagtgattttttttttttaaatgaattaaaccaagaatggtttcttggatcattcataattgctgggttttttttttgaaatgaaatttaatgcaatgaaagtattcttttttaaaaatgaaatataggcattttgttgaaaatgaaactaatgtgcaactgagtgtgagtcctgcccaactggcttgtgctccagttgcttcattttatccagtaagaaaatctccctggatttcagaaaagcaacaacacatagacatgcacaaaatcctgttctactatagcattttacagcatttttacatagatagctttctgataaaaagatgaccaaatattttgtgtttaaaaagaatgttaagtatgaaccttaatatgttgcaagtaagtaatatgccactgagtttgtggcattgttttttttgagacagagtctcactctgttgcccaggctggagtgcagtggcacgatctcggctcactgccagctctgcctcttgggttcacaccattctcctgcctcagccttccaagtagctgggactacaggtgcctgccaccatgcccggctacttttttgtatttttagtagagactgggtttcaccatgttaaccaggatggtctcgatcttctgaccctgtgatccacccgcctcagcctcccaaagcgctgggattacaggtgtgagccaccgcgcccggcccagtgtggcattgtttttaacagagtgtctttaaaaataaaggctttttaaaatataaatatagcatagaaactaaaagcagtatcaaatacctagaaagatgccaagtaactggaaaagcttacctgattttagaattatttttaggtggaaaggatgaaggaaagataatcttttaatgtataagttaagcttggtgcagtgacaaatgtgtatagtctcagctactctggacgtgggaggattgcttgagcctaagaatttgaggctgtaatcatacctgtgaatagcaactgcattccatcctgggcaacataccaagaccccatctctaaaaataaataaataaatcagtgtttaggttaaaaatacagtctacagtagtaaagtagccaaaatattctaaacctccttacaacaatacaaacagcatatacagtattttaaaacatccctccttagaagagatttatggatccttttggagaagatcaaaaatattgcccattaaattgtgttggaagttgtttttttctttagttatggaaagaaaaggaaaggaagggttcattgaagttctttttcagtaacttgctttgtatatagtagttgcacagtacatgtctttctttgtctatgaaaattttgagtttttatttaattgggttttcattttttttcagaactttattccttttttgttgacaatcaagtacaatttcaaattatcagtgcaatatttgtgtttatattatttttccttaccaaaagcaatctgattatttggttttggggcatttttgttttctttttgcttttgttttggcaggtctctgaatctttacttgtgcagactccagctgtgcctcctggcccatgcctccctcccagattacagggtagacccaaagcaaaagaaatacagttacgatggggtaatttccattttggtaataaattataattaagctagaacaggaagtattcgtcttgttaaattgcattaatctttccatcttttaggaccccctctggttgatggtggatcacccatttcctgttacagtgtggaaatgtctcctatagaaaaagatgaacctagagaagtttaccaaggttctgaagtagaatgtacagtgagcagccttcttcctggaaagacatacagcttcagactacgtgcagctaacaaaatgggggtaagaagactgtgctggtagaattataatcacaatggtgatatatgtttcattttaacatatatcatcatatccattatttggccatttggctttaacatatgactccaaattttacaatttttaacaagcctacattgataaatacaagagaagtcggtatattccataacttaatttttatgaaatctcagtatttttagatcccacttacagtttgtgacactttggacttcagctgggctagagtttaccttttaggcagtgttaatagagtttacttaatcaatttaagagtagaaataaaatcataagtactgaagttttttgaggctgattgaagtttttgaggtttttgaggctgattgaagttttttgaggctaaagtagcatttactttcagttggcaactaattatgattcattttttttgcccaaatgaaaaaaaacttatgcttgaaactattctggttttgtatgtattttttgaaatattatctatgtatttaatatataactccaaaaagtggacaaagtaggtgatatctccatttcacaactaaggaaacgggttcaggaaagctaaatattttgcccacagtcatacaaactaataagtgatagaggtaagctacaaaccttagtttgtcagactccagagccaaagctctttccactcagctatgacacctctcatctctctgcaataaagcaggttccctaaggacaaagcagtaatttcctatctcagctaaataacaatttctttcaactattgtataattaaaatttttatagaattaaactgacagttctctcctacccattattttggtgaactatactatatttcaaatcctgttttccaacagggttctgtatttacatctgtaaacttatttttcaatttatttctgtttgattttttgaaacagggtctcaccctgtcacccagggtggaatgcagtggtgtgatcttggctctctgcaacctccgcctcctgggctcaggtgacccttctacctcagcctcccaagtagctgggaccacaggtgtacatcaccacacctggataattttttcatatttttagtagagagagggttttgtcatgttgcccaggttagtctcaaactcctgggctcaagagatctacccacctcggcctcccaaagtagtgggattacaggcaagagccactatgcccggcctaaatttcttatatgtcaaatttatatacttaggctgctcttacacaagtcattcctttctgtaagaagccatcttgtcagcctcacaaggctgcagtacactaggatcgcatctttaatacttacgtcttaatttatattttcaggtttgtgataatttgtcaaaatcaccttaagtaaatatttactttccgtatttccagagaacatacattttagacctttctaaagctattccagattttaagataaaatttatgcctaccagagagcagtactgataaataatgtactataagtacactatttacagttttattttaaataaaatccattcagcatgctagaatggtgaagctttgtcattattttgttgttgtcgacatgaattaaccttgttcaaaaaaggggggcaaaaaaatgacatttgtcatggaaaactttttttaatccctataggacttgaggaacagaatccttacttcagttcttataaatagttgtgctaaacctcaagtttctatcatttagtggccctttccatgctctccatgaactaaactgaattatctgtgtgactgatatgttttcttaggttgccttataacatgtataacagtactctttatttgtagatacctttgtatgtatgtgtgtgtatagacagatagacagactttttttttgagacagggtatctgtcacccaggctggagagcaggggtatgatcatggctcactgcaacctcaacctcccaggcttaagcgatcctcctgcctcagcctcctgagtagcagggactataggtgcacaccaccataccaggctgattttttacttttttatagagatgggggtccccttatgtttcccaggttggtctcaaactctcgggctcaagtgattcccccaccttagcctcccaaagaggtgggattacaggcatgagcctctgcacctgaccttttatatatacttattattgtaaatcatttgctgccactagcagtctgtaagtctatactattaaatgacatattggccaggcatggtggtaaatgcatgtaatcccagcactttgggaggccaaggtgggtgggtcacttgaggtcaggagttcgagaccagcctgaccgacatggtgaaaccccttctctgctaaaaatgcaaaacttagctgggcatagtggcgtgtgcctgtaatcccagctgctctggaggctgaggcaggaaaatcacttgaacctgggaggcggaggttacagtgagctgaaatcatgccactacatccagcctgggcgacagagtgagactctgtctcaaaaaaaaaagcaattaaaaacaaaaaactattaaatgacagatttatatttggaattttggctaggcacagtagctcacacctgtaatcccaatactggggaggccgaggctggcagatcacttcaggccaggagttcgggaccagcctggccaacatcgggaaaccccatatctactaaaaatacaaaaattagctgggcttggtggtacccacacctgtagtcccagctactcaggaggctgaggcacaagaatcgcttgaacccaggaggtggaggttgcagtgagctgagattgtgccactgaactccagcctgggcaacaggctttttctcaaaaaaataataacatatttggaattttaaaattgattgggttttcaaatttattgttttaaattaggaacttttgaactactaataaaactatctgccatagttcattgatttttacatgaaatatttattttcaagatggtttcaagattacttttcacaaagcaggcgcattatatcaccattttgctctgccttgtaaacttgccatctgggatttttgggtggtattcatgtgagagtaaagcatattctctagcagtttcctatagctacaggtttgtttgttttttttcattgcttctaacaggatatagttactatgagtccatgaaatataatggaaatgtgaataaggagtttactgaagactttaaacatttgatttttttttaatcgtgaatatgatagaaactggtagtgttgagcagtgcaaatatttgaagtggtgatttgtgaaatagcccagcattgccttaaacaaaatcacagtctacttcttgttttatacatatgatagtataaaaggtttcttttttttcccattttctgagatttatagattggtatatagctttaaactatataaagttttatggaaagattttttaaacttattaatataaattttaaagttgatataattaaagtgagcctatcttctgtttataaaatgcaagattccttaacatttataattatacagatgaaatagtttctataaggaagttggagttttgattttgccctttatagatgttagattgtgcagatttgtctgtattttctcaccatatcaaataatacttttattataagattggttttcaagagccgtattagttgttataattgattagtatatagtttaactttattcatcatatttatactgtagatttatggccagaggttgaggttatttcaggagagttgatgaccttcatttaaagtctagctaaaatcagtgctgtaaacaaaaggaaacatttacgtttgtttctgtttgccatatatagtagccttgattttttacttttttataaaacagttacgttcacaatattagcctgaggtattaatgacattgtgatgatacaaaatggtgtatattccctgtgcaatcggatttggaggaaaaatgaaggacttaacattatctgaagtcactgatactctgaataagtatggtcaaggagtgaactattttcttttggaaaaactttttaaaattttatttttaaagtattatactgttatttttagggcctaatggttacattgaatagttggtttcaccttcttaaggttttttaccaatattcatgaaacttgatatttttaaaatccctaccctttggtaagtcgttatttattaacatttttattggtgattaatacatgttttttcctaaattaaaaataaataacttggaataattttaatattaaatatttgttaacaactgaatgtttccatagaattttctgagaagttgagtttcttagagttttcgtagctggctgggcccagtggctcatgcctgtaatcccagcactttggctcaagcagtcctccctctgagacaggaggaccacttgtgcccaggagtctgagaccagcctgggcaacatggtgaaaccctgtctctgtaaaaagtagaaaaattagcccagcatggtagtgcacacccgtagtcccagctactcaggaggctgaggtgggaggatggcttgagcccaggaagtcgagggtgcagtgagccatgtttgcaccactgcactcctgcagtctaggtgatggagccagccagaccttgtctcaaaaaaaaaaaaaaaaaaaaaaaaagaagttgagctagctcttaaagatgggcatttggcaaaactgcctgatacagtgcagtaacaagtaggtttacttctgaccattataatgatgcgccactgttaagtgaaaataccagtgtattggggcttttcttttgctaatgagctttgaaaaattgatgacaagaaatttctgtaattgttctcctatgtgtcggggaaggaatttgccaatactgaataaaattttttatattccgggtaatgtatgttaaaagtaattatgagaaagtgagctttttagcatggaacagaaaaatcaaattctgttacaaaataaacaaatttatagaacagaatgttggtaaaatttgatatggaatatgcctaagaaagattcgtgaagtattaaaaaattaaaaataataatttacacctaccatctcccgtacctttaattagtatcaatttcttcactccttatatttctcctgaattattccaccgacctcattccctaatgtcctgcccttcttacaaaaaccatttcctgaagaaataaggggcagaagaaagtataggtaaatgaaactttaaaatttctcacacctttactttcatgatttttaagtctttttagttaatgtgaatacttatagaattatgaccaaattaatcttgaaacacagggaaaagactttattaatgaatctttaaatatgcagttctgtgcaatcagtggacatttaagggtgaaaaataaaaacactagttacatttgtttttctagtttggaccattttcagaaaaatgtgatattactacagcccctgggccaccagatcagtgcaagccccctcaagtgacatgtagatctgcaacttgtgcacaagtgaattgggaggtattgtaatttccattgacttgtatctactttcttaagtgaatagaatagtttatataaaagaataaagatactgttcatttttaccgcctatattatacagagtaagccctagtttaattcacatgaaaaacagtgacttctttttcctctttgaagaatttgagtaaggtatatttgcattacaaatatttagattcctgttcattatgtgctttgtatttttatgaatggctttgtctcagtactgagatatttcagccactgtaagtttaatgttcagaatagacatacacaggaattagtaaattctatttctcttatatttatccagtacacatctccagtgtacttattgtggatagtaataatcagtgatgataattattatattttcagttccctttgaaatttaacaaaatgtgtgtatgcttttaacatttcatattaatagaattatcttgaaacatatttaccttaaaacactctttctaaagtgacttagtcatatttctacttctaattcaaaacagttatatatttgaccaatcttaaattcagataatcttaatgaataaaaaatgtaaaattgaacagttttgattgtgcttaaaagttttaaagaaactcaaaagcaatctagttttacatgtgctcaggtaaagagcatttttggccaaaagctatttaatcaacatcaagactaagacctttatccttttcttaatttaaaggttcctttgagtaatggaacagatgtcactgaatatcgactggagtggggaggagttgaaggaagtatgcagatatgttactgtgggcctggtctcagttatgaaataaaaggactttcaccagcaactacctattattgcagggtccaggtaaagatgatcagtaccttgtcacttaactctatccagagttttatatttcattggcattttcatggtcatgactttgttaactcggaggctctgttaatttgtaggctctgagtgttgtgggtgcaggccctttcagtgaagtagtagcctgtgtgactccaccatcagttcctggcattgtgacctgtcttcaagaaataagcgatgatgagatagaaaatccccattattcaccttctacatgccttgcaataagctgggaaaagccttgtgatcatggttcggaaatccttgcctacagcatagactttggagataaacaatccctaacagtgggaaaggttacaagctatattatcaacaatttgcaaccagatacaacatacaggtatactctaaaaattatgttgatttttgcctagaccagagagacgctttaaataaaacaatcataaccaaactttttttcttatgtggcacttagaatacgaattcaagccttgaatagccttggagctggtcctttcagccatatgataaaattaaaaactaagcctctccctcctgatccacctcgtctggaatgtgttgcctttagccaccagaaccttaagctgaaatggggagaaggaactccaaagacattgtcaaccgattctattcagtaccaccttcagatggaggataagaatggacggtaggtttttttaattgcttctttatatagtttcttaggtcttaagtatatacatttctgtaactattagaagtaggccaggtgtggtggctgacacctgtaatctcagcactttgggaggctgaggcaggcgaattgcttgagcccaggagtgcaagaccagcctgggcaagacagtgagaccttgtctctaaaaaaaatttattttaatgaagtaagttttcaaaaacgaagtcaagattgtcatacaaaagtgtgctgtttttaaaacgttagaaaacacaatgtacatttcctgtttataatttgtgagtggaataccaagagaaaaaaataagtgggctactgtttggttgttttctgtaatccatttactgttttcatgatagtaaaagacacctaatcttagatacaaaataaactcttcagtgtttatttctagcaggacacaattttttttttttaagacaaggtcttgctctgtcacccaggctggcctccagtggcactatcttggctcattgcaacctctgcctccagggctggagccatcctcccacctcagctccccaagtatctgtgaccacaggcgtgggccactacacctggctaatttttgtatttttagtagagatggggtttcaccatgtcgctcacactggtctcgaactcctgggctcaagtggtcctccccgctcagcctcactgagtgctgagattacaactcatgagccactgtgcctgaccgaaacaattttttttttttttttttttgagacggagtctcactctcaccaggctggagtgcagtgacgcgatctcggctcactgcaatctccgcctctcaggttcaaacaattcccctgcctcagcctcccaagtagctgggactacaggtgcgcaccaccacgcccggctaattttttgtattttagtagaggcggagtttcaccatgttggccaggatggtctccatctcctgacctcccgatccacctgcctcgacctcccaaagtgctgggattacaggcgtgagccactgcacccggccctgaaacaattttatagtaaatgattatgatcgttcctggcctctgagatccttgagggcagagattatgtttcagtcttttccagattcctgacacagggcctgcacgctaaatgaatacagttcagtttttcactgtgtgatctcagttagattctgtgattaattatctagtccctttgctaatcactgttgctaatctttgctaatctttgaattagaaagaacctaatttcattcaggttctttctgtgcctctttcacatcttcatgtacatgttgtactattcctatataatgtgccatatactgccacactaaatcatgtattttaattacagtgttaactctgaatatttgtaacagtcattctaatgccaactagggctatttattcacattatattccatataagcaatgccacatacctcccacagctgttaatcctttaatattttaagaattttgaattttgcttttctacttttcactgaatatattagaaacaatttccaaatctgatggactcagaatactagtaacagtttttcccaagatttacttttctgtgttgtttgtatcttagccaggtattcaacaatgaaatattcatggtgcttgtacataaccactctctatcagaaatacttatacatttaaaataacatatggaataattttgtatactagtatatcaccagtaagaacattacacagaacaaacgtgatcatttcctaaaatctgtatcgatgaatgttagcctttgttcttggcagaattttatgtaatctttgtagccttatctctacaaagagattatttgccttgtacaggtttttggtatagccatttatctttaatatatgttattattactggacaaattaattgtttaaatttttttcctcccctttctagcatacatttggggtagtgcaagaaggcttactggaaacaggtctaattagtgtttggttgaaagataatagaataaagattctattagatataaattctattatagaacttccaacttaatattcagctagcatctagagaattgttatggggtatgaatatggctcatggcctttggttgtggaaaataaagaaattaaaaccttttatgatactgttaagtttaatgcacacatttaataaattaaatcaatttaatatctttgattactttcattccctttgattttcacaactatatacacttgctgtgggatggtatcataatgatactttagttgttccctgatccagattttgtcattgttcagcttttttaaacagtggtattaccactatttttttttcctgtcattaaaaaaaaatttagaggttgaaaaggcaaggcttatccaattactgcttattggaagtactgtttcttcctgtcattaaatatttctttatttttaacttggctacaattttcagactgttagcattgaataagcattcattattcattctctaatttccaaaaattttagaaacatccaatcaaaaataatgggatgcattcaacttatagataacatattaggagaaatatgtatgatattcaacttcattgaacagttcaagtgggtaatgtattggaaattttatattatcatactgcttttgtaaatctctaaaaaaacgtcaccaagtcaactaaaaatctgcctgggaattgagaattctcttttttccagataaagacaaggaagattaaaatagaaacttaatctcatagctcaggtctctatgccatacttggcaaattttatcaatatgactttagttagaaataatttgtaatgaaaattgtgatgttctgagcatcttttaaaatgtacattaacaaaacagtattcagaaacaaagctaaaccggaagcctgagaagaaacagttatggtcggacatgaaatttagtaacagacttttggtaaatcatgtcaaattgggaaatttaccaaatatcctatttttcttaatctgatgaaaaacagatttattttaagtgacatagagttcctggcatcaaacttttggggtaacttatcactcctaaataatgttcataactgtgtttttatactagtttgtaaaacactttaataaggtatcataaggtagtataaggtttatctaatagttatttccattttaggtttgtatccctatacagaggaccatgtcatacatacaaagtacaaagacttaatgagtcaacatcctataaattctgtattcaagcttgtaatgaagctggggaaggtcccctctcccaagaatatattttcactactccaaaatctgtcccagctgccttgaaaggtaagttatacatcctgaacttattttctttataataaattactttttaatgtattttcataaatgctttgtttactgatattaaaatttagcatccagtatatgtccaccagttatacaaaatcgtataggcaagcccaactctactgagagttccactcaataataaaagctgttttatctggcacgctcatattcagacaagtactggcttttgtcactgatgtttttaataatgtagcataaaaatactaaattgaataggaaggctggttttctaatgaggtcatttgcttaaagaaaaaaatcacaaactctggttgtttaaacgttttgagttattgatattacattcatttggatttcagaaggaaagcttggtcatctgttaagcaaaacaaattcttcattaatgtgggtttttcaattagttttacacacacatgtacacatatttacacacatttgtatatacatttatcttttaattttagaggggttcttattttaaagtgactctggcaagggctacactctatttttagctgaaaagtctataaagttaattgctctgaagactaatcacagagacttctagaaccatatcctagatcatgtacttaaacctatcatttgttaaacagcagaactcttcttgactagtctttctaataatattgagtttcactgagtcatttttctgtttgctcatcaagtttagtgtctcttagctttaagaagagtgctgactataagcagggcacagtggctcacacctataagcccagtgctttgggagactgaagtgggaggctcacttaaggccaggagtattgagaccaacgtgggcaacatactgagacctgcctctctacaaaagaaattttgaatcagctgggcatggcagcatatgcctgtgtgtgtagctgcacaggaggctgaggctgcattgagctatgatcgcaccactgttgtccaggctgggtgacagagtgagatcccatatcttagaatacaagagtgctgattttaacctctttggatgcaaatttcaaaaattcactgatacttatttcaagtttataagtggattttaaatatttgttgatttttattaagacaagtgtctgcatgatgtaccaaattaaaaatcaagtggaacagatattatttatatttgtttcctacagcccccaaaatagagaaagtaaatgatcacatttgtgaaattacatgggagtgtttacagccaatgaaaggtgatccagttatttacagtcttcaagttatgttgggaaaagattcagaattcaaacaggtatgtaccaagatattaatgtgtggatgcatatttttacccttttttaatttttatgtattttcagtgtaagatttggccatctttaccttttaattcataaatatttattcagtatatattatgttccagagatctcaagattccaaatcttttcagtatgaactacacttgaacagattattcatttatctgataagtattcattgaattctgtgccaggcactcaggatatagcactgaacaaaaagtcccttgcctccatggagcttacttacattctggtggaaaagaagacactataagcaagtaaacatgacaatatattgtcagatataagtgtaatggagaaaaaacaaaattggataaaagaaatagggagtggagggggagggcactgagtgttatttcatttggggcactcagctgacatttcagcatggcccagaggagatgactatggagagaagagtgttccaagaagatacgctgaggcaggaacatgcctattaaatctgatgaacataaaggagccaatatgactggatggagagagcaaagggaagagttgataaggtcggatagttaatcctaaggggcctataggtggtatggagtgacgtaaggcataataggccatactgtggcttttactccacgtgaaatgagaagacagtggaggattttgaccagggtattcacgtgatcagacacaacgttgttttgactatagtgttgaaactacagtaggacaagggcagaactagaaagactaataaggaggcttttacaataatagtattaataatagtcataatgcagtgctgtaaatatgacattaggcatgaagttataatggaaacctagaggaattgtcaccttcctagccaagaggtttcaaagatagctttctgataaagcaagaatagcagtgagatagagtggagtgttgccaatgtttgttacaacttttaaaaagaataagcttttataccactccaaagactaattaaatacctatacatttcacctgattttccctttttcctgtaaccttaattttgagggcttttaagctgggttgttttcattgtgtcttatattttcctcttccactaaaaaaaagatccttcatttgttttattccagtattgtgctattgtaaccactctatgtaatatcttaactgaaattacaaaagatccaaagagtcagattaaatctggcatgcaattgtttttctttattaagccatctgcaaattgacaggataattagatttgaaatgtaatttacagataagtaggtttccttctaaggaggaagcaaaattaatattaaagaaaatataattgtattacacgtttaaaggaaatagggattccacatttgagtagtatatgaataaccttaaggcttgtttgaatgacttttcttgggtgtataaaccttctgaaattagcttgagcaggttaatctgttttcttcagtcctgtatttacagttacctgtgtctcttcctgcttagaggtcttcccacatctgaaatacaaaattgaaaacttgatcccatcatcttccctcccagtatctcctctccaacatctttacttcatcagtgtcatagacaccaatatcatcttggtctccaagctttaaattcttagatgaatttttttttcctatcaactcttaatcagaatttgtttctaaatccataaaactacatcagggcctcatcactttttacatgtacatcaagagtccctgtcctactcagctcccttcagtccttcacacagcctcacgattaggattccataaacactgttttaatgtcacacacctacagtggtcccttttgaattaacctaaatttccaactagtgtaattaatgtattcttcctctttgtaccagatctcttatcaccctcatgccatttgttgaggtttttctttcttaacctaatactgccaggctcatggaatggtatatgaagacacatggaaagtataaagacaaaaatcatctattatatccataagacaaatacatatttttaatttttactcaatttacttcagtgttatgtatacaattttacactactttatcatacaacattctgttttaagtgaatccttttacaggttgaagcatcccaaataaagtccaaaattcaaaatgttccacccaaaatctgaaactttttgaggatcgatatgacactcaaaggaaatgctcattggagcatttccaatttcagatttttgggtttggaatgctcaactagtaaatatgcaactattccaaaatcaaaaaaattgaaatgcttctggttccaagcatttcttataagggatacccaacctgtaccatctcccaaacatggatcatttctacattctattccctgaaacattatgcatccttagaactaatgtatagtcaccattttctttcagatttatcttaaagcttctttcagtaagttcctttatatattgttatcagcatccacatttttatttattgccaataattcactaatttaatgtccttttattaagtacctactatatgctagattctggagacagaaaaatgagacagagatcttactttactttgagagcaaagcaatatgtaaaaatttagatttacatcacaggtacaattgaggcagctaaaagtacttgaaagcccccatgtgttggttcttctgacttgtagcccaccaactaactggagaaactcaactgacaagtcatttaaccctatgaaccttggttttctcaattacagaatgagtggtgggaggttgctcattattggaaatgatagctcctacagattgagcagtgactgcatgctgagcactgcgctaagtgctttaacaagcattagttcatttcatcctcataattatcatacatgttaactactagtatgtctgttatactaaggtagttggtctaaaatcacatctggagtgtgaagtggtagagcagaccttggatgccaggggtgaacagttctagtatatagcttcttatttatgcctagtgttccattattggaacactaagcttgtggtagttatttatatctcactgatcaaggttattgccaaggtctgatttttcacaaaaaaaaaatttgcaacctctggcataaatgggttaattactagcacattcctctgaaaatccgtggaatttcattctttttatttcccttgtgaggcatggcagaggaggtcctattttctgattctaagtgatctcccctctctggtttatacagtgatttgccataggcacctatagaaagctccccttattcattttccatttcattgtacagatatgtttgaaattatatggaaatttatcagttatacaaagacataatgggggaagcaaaagtagacactatcccttctttgatggaatgattgcattgaaaaatgacttcttacatttgagaaaagcaagaaaatgcttgaggaccgattttgcttgttctctagctgccctggggcacatctgcactccttaattcatctgtgaaccgtataagggtagatcctcgcttttgaaatttctcttgcccctatgcaacaaacagataagtactttaatggacaggtatttttaacatgtcatttaaaagataaaatcaatggcattcactggctttcacatgaaaaacaattctaacactagccagttttaacacattttctgtccagccttcacacgtaattcttccttctaatattttattaacagatttacaagggtcccgactcttccttccggtattccagccttcagctgaactgtgaatatcgcttccgtgtatgtgccattcgccagtgccaagactctctgggacaccaggacctcgtaggtccctacagcaccacagtgctcttcatctctcagaggactgaaccaccagccagcaccaacagagacactgtggaaagcacaaggacccgacgggcactgagtgacgagcagtgtgctgccgtcatccttgtgctgtttgctttcttttccattttgattgcctttatcattcagtactttgtaatcaagtgaaaatataactttattttttaactctattacattttattttgtcatgtactaaaattatttctgtattgcttttataaaaaacagtggcatttagcactggcattgagactatagcacatcatttttgccattttcagtgcttatattgttaggtagaggctggcactttattagaatgcaagccacaaaaatatcaattttgttttttttgttagggtgggtcttctttttttctttccctctctctttttttaacaaatgccttcttatagaaaaactttctaagaggcaacaatttagaatggatattttgacgaatcggcatgagtgtaacagtgataacctgatctgtttgttttaaagattattaccaagtgaaaaattcagaatgaatagaatttacactaacatgctatataaaatgttaaagtctgatgctgtgaaagcaatctagtgctatatttctacctcctcatttgtcttaattatttggtaagtgggattatgatgagtaactggaggggcttagaaacaaaaactggatgaaagagtatgcatgaagaaaagcttctttgataaatgtggagttcttcattataaatatatattcatgaattcacagataagtacttaaagaacagacagtttacttggcctaaaaatattttgatgtttactcaaaaagtacctcttcaggtcttgagacatggaaaagaattgagtgcttttaaatactttttagaaagtaatcataaaagtaaattgaatttcaaacctatttggcttctgttttgtgaaccttttgactatatgtatgtgtataagggtatacacatacatatatggcatataacaagtgtacacatatacacataacaagtgtagaagtatatattacatacatacactcactctgtctggtataggctaattttgaagaactcccataagtttctgctgcttctcccataactgctgccaccaccatcagaattcataatcaaacctaacctttttgtttggggcaccaaatctgaagacaaaattaatttgcaccagtaaacttcaagctgctttctttcttgaaaactaaacgtttaacgtataatgtctgtttggatactgttccaaattgttgattgcatgtggttaatgttgcattagagcactttgcaattgcataattcattaatgttttgtgagcttgcatttgtgagttattggatgatcagactgaattttgtcaagtatcacattgtacatcttgcctagatgtcgatgactgcaagtaataatacagtttataatgaaactatctacaattcttgttttagcacatctgttatccgtaaaacacctgtaactagcttttttaatttattatttgaattttaggatagcgaatcactaatttttagttgctgaggttggcattttagtgattattaagcacttctgtcagtctttgaaaaaagaacgtattttttgtgctttgaagatctctgaagaatttcttttataatagaatgggcatgtattgtaacagttttatgtcaaatgatctgtgctgtagaaaaacattaacccttgttcaaaaaagaaatggataaacttggcctttctaagtggtaagaatgacctgtcactataatatactgtatgtttacattttatttaaatttaatctcttatgtatagggtgataaccttccccagaaacaacagtgattgcgattgttttctagaaacttctttaaagtgccacatttggcagtacaaatgagtctgagtgtaatagcccagagatttatatatagttgaatgtctaaaatggtaaaatgtgccactgtgtcaagttacagtggcttatgtttttcatagtaattcaaatgaacttcctatttttgatagtaaatgtcatttaatagtatacttgccatttgagcctcactgcaaaattagtgcagaggagaaaacaatttttaatgtaatcttgattttacctcatatactgtacattccaaaaactctaaactttttaaagattatagatacactaccaaacatatcaccttaaaattgtataaggctgaatgaacttcatacaaatgaaaaaaatctcataaaaatacataaactatgtagcaaaagtatctgtaaaatccatggaaaataaaagttgtatcattctttttgagatacgtttattgtattcatatatattcattatttgctacctgtttaagaaagtgaaatgttatggtctcccctcttccaatgagcttaaaacatttttcccaacagtatataaatcttcaacatgagaggatgtatatttattatataaagcccagtaaagaataaaattagaagttttatcctagtgactt

SEQ ID NO: 8054 - DNA, 832 bp, Homo sapiens
ttttttttattcaagaggtaagtacatagcttcaagctcaaggtctaggttgaggacaatcatgagtcctattaaaggacaaccagtttaaagaacactgtcaggcaagctaccacgtagctctccttcactccaggcttagctgttccagacttcccagtactgatgaaggatcatgtttttgttcagctttgcccagtgctgtcattcataatagataaatgaaaagtcccagaaacctgttgtgtttgggaaggttttcttttgttccaggcttcagtggttaatatgcttgacaaatttcagagtctctatctctgtagaccaatgccaaagaattgctttctggattcactgttagcagctcttcgtcttcatctttggcaatgtaagaaaaccaccatattctggcccccagccttcacagccacagtggagaattaagtctagggcaaaatcagccttgccatggtcacgaattaaaagtgtggtgaccagtcttccaacgcctcagttccctttggcatgtgggaacacctgattcattctttgtttcattttcctctgactcggtctgtctgctcatggctctgttggccgttgatgctgatggctgcctgattattctctggctcaggagggctatggccagtcccttcctcagttctatcagcagcagaggctgctgcttcctcttttttgtcatccatctcatcttccgaaggggccaagaagtgaagcttcaggcctgtgaagttggagagcagcaagaatagtgcctcagagcaaaataacttcatgcactccttcaatatatcaggaagcttactct

SEQ ID NO: 8055 - DNA, 832 bp, Homo sapiens; identical to SEQ ID NO: 8054

SEQ ID NO: 8056 - DNA, 3004 bp, Homo sapiens
catacgcaccagtgcagtagctccaggtgtaagaggtcacgaaggcaccctgcccataaaaccaggatgtgcatacgtacacacaatcggtgtctggttatggttttctaaacactacataaggatctgaattttttagtgtgccaaaagcaaacgataggtttaaatgaaattgctcactaccaaatcaagactcttcatatatatacgtgtgtgtatatatatatgtcataacactttcacgtgtgacagcctaaggtttctttagttttaggatggggtggggtgggagtggttttgcatgtttgaccaggatgtgatgcctgtctttattccttgataagaagtagctgttacagcatttcaagcaaattattttaggtagaatagaacttactgccaaatgattatttatttagcaaaaattattctccaacttttcgaattcacaatttttctaagtgcatagagtagttttttacattgtcacgaattccttaatacctttatttaaaatggaaaaaatatggacaatattttagaaatatgtgctacacatctaattttatctgtagtttaagtgatctaaattgagatgcctttgatatgaagagatttaccaacattatatgcactcgtgccttcaatgtggaatcaaactggttaacctcagcacagtcctctcgtttctgtgtttctgctgcactaattgccagggggtgggggagaaggcgaatgaattaattcatagtagaaggaggcgataggtgcagcaaagggcagccacagtgttgattccacattataatgttgttgcctcttcttggcaaaagacaccacattgtgggaagatctcagcttccagggtaaaagttaatttataacttaaaagtgctattaagtttttattaccaaatatatcttttatggtttatattgtagtggtatgtatgaaacatttaaaattttactgtggaaattgtgtatatatatatatatagtcgaaataggtgttcacaggtcacatgtgaacggagaactgcatgaccgtacatgaaatgcaataaaccaactggaaaaagtgcatgtgcttcatcctctcaagccaactgcagctggaaagtgctgcttatcctccacccccagaaaatgcatgtatcaatatgagaataaagaacgcacactttcaattttattgaggctttcaacactatttaaaagaaaatgtaagaatttgacattctggagttattataacattagaaaatgagcataacattcactctgattttagccattaagggagattagtaaacagactgctacagtgttccatagttggactgtgcatccaaaacatttttttatctttaataaatggtacagtttttatgtagttttcgaatgtaagaagaaaggaatgctgaccaaaacttgatttcatcagcttcatgaaaaggactagtgtcattaacctgttgaacagaattggtttattaaaaaaatcatttccagtagtgtgaaacctttacgagtctttaacatctaaatgttatgactccttgtaccttaagttttccagtctttcttatttatatcatctccaagtacctctggctcctttcctcttgctcaccggaaccttagttttcctcaacagaatgctttgttaaagtagcccacagttgcaggatccatagcaccgtcgtgcagactagcagcccaaaggtgtgtttggtttggcttatacggtgttttgctttttaaactacttgccataatttaaaagtggcaacactagacttaaaaaaaaaaaagtctgattgcccatattagattttttttttaattcttcacaaaatctgctcttcctgaaagatcaaagtgtctagaaagcccaaacatgtattcttaacatagtaggcaccagctgaaactgagtaattaaacggtcccctgaagccaagtattccctggttagtcgccaccccaccactccttcctgtctctagtgtcacacttgggctgttgattttcttactcttctcttgctttaatccttccccccggctctctggctcctgtggatatctgtgcttgtttcctggtccaggatggtgatctgactttcaaaccagcttctcaaaaggggtgacataaaatcagttttgatgtttttcctcctgaaaaatcagatgaatattttagtcactgttactcatgcacattgtgttcttatgtttacagaagtgcttaagtgaatggaagcactagacatttggatttccttcctaacgtaatttttaatgattaccccttttatacagtaatttgtggtctttagaaagcagttaaactaattgaccatctaatagttgtactatacatatgtctaaaataatagtcatggtaagtttggcatcatatcttccccaaaaaatgtttattaaaattagattattccagtttaatgctattttgtgaactgtataccctctgaaagcgcttatttttacatgctacacaacagttccaattttaaggagtgtctcctaaaattgggatgaaaatctactgtagtctgttttaaagtatgctatactatgttcattggttacttaactggatattaatataaaggttattacaagaaaaatgatgaagagcaaaaggagaagaaaatatttgcaagtgaatccacaattcttgcagaactatttgagttgatactaaagattttatgttcactcctttaccttagaactgtcaagcttgggaatgaggaaagtgccttggctgtgcttgaaacctgaattttagtgcttcccttattacattcattgttttcaatgattgatttataaaattaagacatactggtagtacaagttgaaagttggtttgaatacattttaattaaatgataatatgttaatatgcttttgttcattgctttctcactgaggtaaaacagcattaaaaagttgtccagaatttaaactga

SEQ ID NO: 8057 - DNA, 486 bp, Homo sapiens
aggtggcgggaaaatgtaaaactttaaagctcatgagcggaacgcaatgcaagtcctgaaactaagagttaaatgtgagtctcagggaaaaaagctagattagcaaatcaaacatacatatgcctcatccagaacatcattcaggcatcagttcgggggctactagcagtaaagttggttttaaatgaaataaagtggaaaagtttgatatcacttccagaagtggtctgtcatcagtaagtattggtgttgagtctaaaatgaattagaaacctcccgttactcttaggattaaagcaacccggtatggagagaaatgaaagaaaaaatgtagtgttagcttgactttatgtccctttcactgaattccatatgagcctatttggcagagaaattttgtactctacaaggaaaacatcactgatgtggacagcaccaataatgtacgtcccattaagctaataaatacccagacggccgtgtgaa

SEQ ID NO: 8058 - DNA, 927 bp, Homo sapiens
cctactttacaaatacagtcagactaaaacattaaacaagaagtttaagggggaataacattgggatttgaaaagttgtatgtgattaatttcttgcatgcaaatcaatttaagatttcttaaatatcttcatgcttttcttggctggaacttgggtaaattaacctgtaattatgaattatttagtttaactcaaggtgcatttttatttcacagattgatacttgcttttttctgtgaaacagttctcctagataccaaaatcctcaggatgaatttttgcatttgtaaataacaatttatctttgtaaattacattttatttatttagagttctaaaattgagggctgaaatgaatgacatgtaatagaagacaaaactgtaccaatacgctgttaaccaatcagactgtccaggtattctcatttcataaatatgtatacacacatataaatacacagagtagtgttagctgatgtgagtgataacagcgaatcaccattgagatggtcatttggatcatgtaaacaaaccgtgtcatgtctctgatgggagcggtgggtagtgtactgttaggtggacaggtcttttaacatgctactatttgtaaaagtttccgttgccataacagttcatgtagtagtctgtgaaaattcgaagctgtctgtcaagctgctaatatacaagttgtcatggtaccatgtaacttaaattgatgaatttctatgcaatttactattctctgaagcctatgaatgcagcctcatctcattttcagttaagggtactttatgtataattatgtcattgctgccttttatgtaggaaatgtaaaaaagttttaaaaggcgaaaataacattacagatttcatttttatacaggttacaatattaaacatgaaactaccaaattccaagaatagta

SEQ ID NO: 8059 - DNA, 2456 bp, Homo sapiens
gtgagcctctgcacccagccacagtggtgactattgaacaaaactgaataatagtcacatctcctgctcccttgaatgcagaagcaattgtacttcagggcatggtgttatctacttgcaaactttttattttttgatcttacagcaactacttttgatagtacctcactaaaaacatcagcaaggagccaccaatatacattgaccactctggttctaactgctttccccatagctagtctgcctttcaaattgttgctggtgtcagttttacctagtgattggtcaaaacataacaagggtctctagtttttcatcctgcaatatctgtttccacactgccggttgcctggcaacacaataccagagccacatattttagatttttgttatgatggcacttttccattcctacgtatcagtcagctagagctgcataacaaatagcaaagactgggtggcttaaacaaccaaaatttgttttttaacagttctgagggccaaaagttcaaggtcaaagtgttggcaagtttggtttctcctgaggcctctctccttggcttgcagatggctcccttcttgctgtgtccttacactaggcacttgtgcccctaatgtctccctgtgtgttccagtgttctcttataaggacaccagtcttataagattagggcccctctctatgatttcatttaaccttaattatctcctgaaaggccctatcttccaatatagttacattggggctttggccttcaacctataaattttgggggtctacaacttagtccataatattctggtactgaatttaaaactattagggtgtcggctaagccactgtaacagagaaacccccaaatactgtagttccaataagataatttattttctttcttgtagccatcaggaggtagcccatgaaattgtccagggacttatatttattctaccattatttttactctattattattttatattattattatacttattctaccatttattctgccattccctagagtgtcctcttcatagtggtcaacctgtgggatggagaagagaaaagtaaagggcaagcacatacatttgaataaaatgagatagaagttgcacacatcaagtttgtatattcttttggtaagaaattaactgcagaggaacctcttgctgagcagccatgccttctaaaacctgggacagagattttattattaaaatgaggaaagggagaatgaacgggggggaggattatcagttccttcctacattcctcttctatacatcttacattttgtattgagtatgagaagagacctgaaatttagatgattctttacatttttatttatctaaaattgaagtttacctaatttagtttaatttaattattttactgatttaaattaatcagaattttcttaaaattcagtaaaagaaaaaaacgtaagggaagctttgttgctttgcaaaatagggagatatttcaggaaggtaaggggagaggtctatcctacagtatggagtacagaagtgggacttagagatagccaagagagtttgaaatattcaaagaatatatacaatataatctgtagccttttttaaaaaaaaaattagaatttccatctctctgaatgtattccagttgtaaaaaaaaaatgtattgagtttcccatcatatggaagtttttaaaattgtaggaaataaaatattcagaaggctacacaaggtattaaaaaaggggacagggatataatagcttactagcttattagaatgaatttggttccttatgagggataatctagagaaaagaggcatagaataagatctttggaaccaaacagtctgagtttgaatcctggctctcccttttggcatctgtgtgatcttgggcaagctacctaatttctattacagctttgttatctcaactgtaaaatgaggctgatattgatatatcattggagaggactaaatgagaccatgcaaaatgtgtacttggcacagtgcctgatccacaaatactgatgatgatgatgatgatgatgatggtggtggtggtggtggtgatgatggtgataataacagtgatgatgatggtagtatagcattagtgcagcaaaaaggaaaaatggactcaaaactaatttttcctaaaaatttgtgcttttatttatcagatgcttctaacttagtccccaccagtctaagactagaacaatattgggattttccttttcagaagttctatcattggcaagttgtttttatttccagaactccaactcagaagaaatcacctctgaattcattgtctatttaataaagtcaagattcttcaaattctccattttattcagtattaaataactttcaaaatatggctatcttgaaagtctccacttcctcatacttagcaatttccagcattatttaaaaaaaaaat

SEQ ID NO: 8060 - DNA, 2458 bp, Homo sapiens
gtgagcctctgcacccagccacagtggtgactattgaacaaaactgaataatagtcacatctcctgctcccttgaatgcagaagcaattgtacttcagggcatggtgttatctacttgcaaactttttattttttgatcttacagcaactacttttgatagtacctcactaaaaacatcagcaaggagccaccaatatacattgaccactctggttctaactgctttccccatagctagtctgcctttcaaattgttgctggtgtcagttttacctagtgattggtcaaaacataacaagggtctctagtttttcatcctgcaatatctgtttccacactgccggttgcctggcaacacaataccagagccacatattttagatttttgttatgatggcacttttccattcctacgtatcagtcagctagagctgcataacaaatagcaaagactgggtggcttaaacaaccaaaatttgttttttaacagttctgagggccaaaagttcaaggtcaaagtgttggcaagtttggtttctcctgaggcctctctccttggcttgcagatggctcccttcttgctgtgtccttacactaggcacttgtgcccctaatgtctccctgtgtgttccagtgttctcttataaggacaccagtcttataagattagggcccctctctatgatttcatttaaccttaattatctcctgaaaggccctatcttccaatatagttacattggggctttggccttcaacctataaattttgggggtctacaacttagtccataatattctggtactgaatttaaaactattagggtgtcggctaagccactgtaacagagaaacccccaaatactgtagttccaataagataatttattttctttcttgtagccatcaggaggtagcccatgaaattgtccagggacttatatttattctaccattatttttactctattattattttatattattattatacttattctaccatttattctgccattccctagagtgtcctcttcatagtggtcaacctgtgggatggagaagagaaaagtaaagggcaagcacatacatttgaataaaatgagatagaagttgcacacatcaagtttgtatattcttttggtaagaaattaactgcagaggaacctcttgctgagcagccatgccttctaaaacctgggacagagattttattattaaaatgaggaaagggagaatgaacgggggggaggattatcagttccttcctacattcctcttctatacatcttacattttgtattgagtatgagaagagacctgaaatttagatgattctttacatttttatttatctaaaattgaagtttacctaatttagtttaatttaattattttactgatttaaattaatcagaattttcttaaaattcagtaaaagaaaaaaacgtaagggaagctttgttgctttgcaaaatagggagatatttcaggaaggtaaggggagaggtctatcctacagtatggagtacagaagtgggacttagagatagccaagagagtttgaaatattcaaagaatatatacaatataatctgtagccttttttaaaaaaaaaattagaatttccatctctctgaatgtattccagttgtaaaaaaaaaatgtattgagtttcccatcatatggaagtttttaaaattgtaggaaataaaatattcagaaggctacacaaggtattaaaaaaggggacagggatataatagcttactagcttattagaatgaatttggttccttatgagggataatctagagaaaagaggcatagaataagatctttggaaccaaacagtctgagtttgaatcctggctctcccttttggcatctgtgtgatcttgggcaagctacctaatttctattacagctttgttatctcaactgtaaaatgaggctgatattgatatatcattggagaggactaaatgagaccatgcaaaatgtgtacttggcacagtgcctgatccacaaatactgatgatgatgatgatgatgatgatggtggtggtggtggtggtgatgatggtgataataacagtgatgatgatggtagtatagcattagtgcagcaaaaaggaaaaatggactcaaaactaatttttcctaaaaatttgtgcttttatttatcagatgcttctaacttagtccccaccagtctaagactagaacaatattgggattttccttttcagaagttctatcattggcaagttgtttttatttccagaactccaacatcagaagaaatcaccatctgaattcattgtctatttaataaagtcaagattcttcaaattctccattttattcagtattaaataactttcaaaatatggctatcttgaaagtctccacttcctcatacttagcaatttccagcattatttaaaaaaaaaat

SEQ ID NO: 8061 - DNA, 2452 bp, Homo sapiens
gtgagcctctgcacccagccacagtggtgactattgaacaaaactgaataatagtcacatctcctgctcccttgaatgcagaagcaattgtacttcagggcatggtgttatctacttgcaaactttttattttttgatcttacagcaactacttttgatagtacctcactaaaaacatcagcaaggagccaccaatatacattaaccactctggttctaactgctttccccatagctagtctgcctttcaaattgttgctggtgtcagttttacctagtgattggtcaaaacataacaagggtctctagtttttcatcctgcaatatctgtttccacactgccggttgcctggcaacacaataccagagccacatattttagatttttgttatgatggcacttttccattcctacgtatcagtcagctagagctgcataacaaatagcaaagactgggtggcttaaacaaccaaaatttgttttttaacagttctgagggccaaaagttcaaggtcaaagtgttggcaagtttggtttctcctgaggcctctctccttggcttgcagatggctcccttcttgctgtgtccttacactaggcacttgtgcccctaatgtctccctgtgtgttccagtgttctcttataaggacaccagtcttataagattagggcccctctctatgatttcatttaaccttaattatctcctgaaaggccctatcttccaatatagttacattggggctttggccttcaacctataaattttgggggtctacaacttagtccataatattctggtactgaatttaaaactattagggtgtcggctaagccactgtaacagagaaacccccaaatactgtagttccaataagataatttattttctttcttgtagccatcaggaggtagcccatgaaattgtccagggacttatatttattctaccattatttttactctattattattttatattattattatacttattctaccatttattctgccattccctagagtgtcctcttcatagtggtcaacctgtgggatggagaagagaaaagtaaagggcaagcacatacatttgaataaaatgagatagaagttgcacacatcaagtttgtatattcttttggtaagaaattaactgcagaggaacctcttgctgagcagccatgccttctaaaacctgggacagagattttattattaaaatgaggaaagggagaatgaacgggggggaggattatcagttccttcctacattcctcttctatacatcttacattttgtattgagtatgagaagagacctgaaatttagatgattctttacatttttatttatctaaaattgaagtttacctaatttagtttaatttaattattttactgatttaaattaatcagaattttcttaaaattcagtaaaagaaaaaaacgtaagggaagctttgttgctttgcaaaatagggagatatttcaggaaggtaaggggagaggtctatcctacagtatggagtacagaagtgggacttagagatagccaagagagtttgaaatattcaaagaatatatacaatagaatctgtagccttttttaaaaaaaaaattagaatttccatctctctgaatgtattccagttgtaaaaaaaaaatgtattgagtgtcccatcatatggaagtttttaaaattgtaggaaataaaatattcagaaggctacacaaggtattaaaaaaggggacagggatataatagcttactagcttattagaatgaatttggttccttatgagggataatctagagaaaagaggcatagaataagatctttggaaccaaacagtctgagtttgaatcctggctctcccttttggcatctgtgtgatcttgggcaagctacctaatttctattacagctttgttatctcaactgtaaaatgaggctgatattgatatatcattggagaggactaaatgagaccatgcaaaatgtgtacttggcacagtgcctgatccacaaatactgatgatgatgatgatgatgatggtggtggtggtggtggtgatgatggtgataataacagtgatgatgatggtagtatagcattagtgcagcaaaaaggaaaaatggactcaaaactaatttttcctaaaaatttgtgcttttatttatcagatgcttctaacttagtccccaccagtctaagactagaacaatattgggattttccttttcagaagttctatcattggcaagttgtttttatttccagaactccaactcagaagaaatcacctctgaattcattgtctatttaataaagtcaagattcttcaaattctccattttattcagtattaaataactttcaaaatatggctatcttgaaagtctccacttcctcatacttagcaatttccagcattatttaaaaaaaaaa

SEQ ID NO: 8062 - DNA, 2210 bp, Homo sapiens
gcagtggcacgatctcggctcactacagtctccacctcctgggttcaagtcattcctctgcctcagcctcccgagtagctgggactacaggcacgcaccaccacgcctggctaatttttttgtattttagtagagacggggtttcacccgtgttagccaggatggtctcaatctcctgaccttgtgatctgcccacttcacctcccaaagtgctgggattacaggccaatgttttcttaatcttagaatgtgaataactgaaaatcatagtctgtggaaaggtgttgaattgagtataatcttcttctgtttatttttgtgttttgttttttaacagatgggtatcttgctatgttgcccaggatggagtgcagtagctattcacaggtatgatcatagcacactgcagcctcaagctcctgggctcaagcgatccccctccctcagcctcccaagtatctggggttactggtgtgcaccaccgtgcttggctccaataattttttttctaattcaaaagttacagtttcactgtgaaaaaggccttgaacacactatttatgacatcttttgaggcagctccagtgccttgacttcaatcccagtttccggttgcagcatccttgttgtcttagcaacacagtgaactattctgaagcatagagtaacacgaaactgggagtccgagaaataatcatctctgcatcacattatgggagacgaagtctgctttatccattttatctttattcagttgtctatgattaattgattacagagtagtagattagaatagtgcatggatatacatttgtgttgaaaaaaggggaagttgatatatatcaatcttagttttcatttatcagtttgatattcatgcatttacactaaacgcttccatttatcccgaaaaagtatatgcaactgtattctgtaggttgatttttggaaaaggggagaagcacactgaattcataaggtcacatgtagtcttaaggtcttacttgcttacagccaattaaatttgaagcaccttatttatacttgttaaaggtaaaacccaaaagaacaagcagaggacattttaaggtcataaaaggtaaataagcttaccttcttaatgttttcattctctttttgtataaatcagaaaatgatctaaactgctgtaacaaagagaccccaaaatatgatggctcatgtaagataatttatttttttctcacatagcaatccagaagtggcttcatttcacaaggtattcaagggatataggagtcatctaccttgttagttctcttaatacccaagggtattgttctttccatggtcaaagctggctcaagacttcctagcctgtgaaaaaagaagaaggtggagcaagccatttcctttttaggaaattacagccatcacttctgcccaccgtccattcatgaatacttactatatagctatacctagcttcaagaaagcctgggacgtgtctctaactagatggacatgtgccctactaaaactccagggaaagggttctattactaaagctaaaaagaggggaatgaatactagagttaaagacaaaaatgatagcagccaatggcccatgccgtgataatctgctgagcaggcatgatggagatcccttgcccagcagaaagtgttccttggtgaaatcatgaatctgctatctaggagaaactcccttgtccattgtcttctgtggccactagtttgacctctaggaaagtcttgctcgtcagcttctgtggccccgtctgaaacttttgagggacatcgcagcttttgcagcccctgcttgctggtgcagacttttagacctagattgccttagagactgaaaaatatacgcttttataggccggggttttagttcatttgactgtaataaagacttcaatgccgtttttaatgtttgactgctgacatctttcaagactcacctttcccttctcccttatgctgcacatctgggcaagctgatggaagcatgggtgcctcctcctttggccccagcaggaagttcaaatcacgcaagccctggcatgcatgcaggaagcttcaccccagcctcacactctaagacggataaaagccaaaccaattaagccgtttctcgaccctcctgggagcctgccctatctccctggaaagtctcagtatgtgagtaataaacctttttataccca

SEQ ID NO: 8063 - DNA, 2210 bp, Homo sapiens
gcagtggcacgatctcggctcactacagtctccacctcctgggttcaagtcattcctctgcctcagcctcccgagtagctgggactacaggcacgcaccaccacgcctggctaatttttttgtatttttagtagagacggggtttcaccgtgttagccaggatggtctcaatctcctgaccttgtgatctgcccacttcacctcccaaagtgctgggattacaggccaatgttttcttaatcttagaatgtgaataactgaaaatcatagtctgtggaaaggtgttgaattgagtataatcttcttctgtttatttttgtgttttgttttttaacagatgggtatcttgctatgttgcccaggatggagtgcagtagctattcacaggtatgatcatagcacactgcagcctcaagctcctgggctcaagcgatccccctccctcagcctcccaagtatctggggttactggtgtgcaccaccgtgcttggctccaataattttttttctaattcaaaagttacagtttcactgtgaaaaaggccttgaacacactatttatgacatcttttgaggcagctccagtgccttgacttcaatcccagtttccggttgcagcatccttgttgtcttagcaacacagtgaactattctgaagcatagagtaacacgaaactgggagtccgagaaataatcatctctgcatcacattatgggagacgaagtctgctttatccattttatctttattcagttgtctatgattaattgattacagagtagtagattagaatagtgcatggatatacatttgtgttgaaaaaaggggaagttgatatatatcaatcttagttttcatttatcagtttgatattcatgcatttacactaaacgcttccatttatcccgaaaaagtatatgcaactgtattctgtaggttgatttttggaaaaggggagaagcacactgaattcataaggtcacatgtagtcttaaggtcttacttgcttacagccaattaaatttgaagcaccttatttatacttgttaaaggtaaaacccaaaagaacaagcagaggacattttaaggtcataaaaggtaaataagcttaccttcttaatgttttcattctctttttgtataaatcagaaaatgatctaaactgctgtaacaaagagaccccaaaatatgatggctcatgtaagataatttatttttttctcacatagcaatccagaagtggcttcatttcacaaggtattcaagggatataggagtcatctaccttgttagttctcttaatacccaagggtattgttctttccatggtcaaagctggctcaagacttcctagcctgtgaaaaaagaagaaggtggagcaagccatttcctttttaggaaattacagccatcacttctgcccaccgtccattcatgaatacttactatatagctatacctagcttcaagaaagcctgggacgtgtctctaactagatggacatgtgccctactaaaactccagggaaagggttctattactaaagctaaaaagaggggaatgaatactagagttaaagacaaaaatgatagcagccaatggcccatgccgtgataatctgctgagcaggcatgatggagatcccttgcccagcagaaagtgttccttggtgaaatcatgaatctgctatctaggagaaactcccttgtccattgtcttctgtggccactagtttgacctctaggaaagtcttgctcgtcagcttctgtggccccgtctgaaacttttgagggacatcgcagcttttgcagcccctgcttgctggtgcagacttttagacctagattgccttagagactgaaaaatatacgcttttataggccggggttttagttcatttgactgtaataaagacttcaatgccgtttttaatgtttgactgctgacatctttcaagactcacctttcccttctcccttatgctgcacatctgggcaagctgatggaagcatgggtgcctcctcctttggccccagcaggaagttcaaatcacgcaagccctggcatgcatgcaggaagcttcaccccagcctcacactctaagacggataaaagccaaaccaattaagccgtttctcgaccctcctgggagcctgccctatctccctggaaagtctcagtatgtgagtaataaacctttttataccca

SEQ ID NO: 8064 - DNA, 2210 bp, Homo sapiens
gcagtggcacgatctcggctcactacagtctccacctcctgggttcaagtcattcctctgcctcagcctcccgagtagctgggactacaggcacgcaccaccacgcctggctaatttttttgtatttttagtagagacggggtttcaccgtgttagccaggatggtctcaatctcctgaccttgtgatctgcccacttcacctcccaaagtgctgggattacaggccaatgttttcttaatcttagaatgtgaataactgaaaatcatagtctgtggaaaggtgttgaattgagtataatcttcttctgtttatttttgtgttttgttttttaacagatgggtatcttgctatgttgcccaggatggagtgcagtagctattcacaggtatgatcatagcacactgcagcctcaagctcctgggctcaagcgatccccctccctcagcctcccaagtatctggggttactggtgtgcaccaccgtgcttggctccaataattttttttctaattcaaaagttacagtttcactgtgaaaaaggccttgaacacactatttatgacatcttttgaggcagctccagtgccttgacttcaatcccagtttccggttgcagcatccttgttgtcttagcaacacagtgaactattctgaagcatagagtaacacgaaactgggagtccgagaaataatcatctctgcatcacattatgggagacgaagtctgctttatccattttatctttattcagttgtctatgattaattgattacagagtagtagattagaatagtgcatggatatacatttgtgttgaaaaaaggggaagttgatatatatcaatcttagttttcatttatcagtttgatattcatgcatttacactaaacgcttccatttatcccgaaaaagtatatgcaactgtattctgtaggttgatttttggaaaaggggagaagcacactgaattcataaggtcacatgtagtcttaaggtcttacttgcttacagccaattaaatttgaagcaccttatttatacttgttaaaggtaaaacccaaaagaacaagcagaggacattttaaggtcataaaaggtaaataagcttaccttcttaatgttttcattctctttttgtataaatcagaaaatgatctaaactgctgtaacaaagagaccccaaaatatgatggctcatgtaagataatttatttttttctcacatagcaatccagaagtggcttcatttcacaaggtattcaagggatataggagtcatctaccttgttagttctcttaatacccaagggtattgttctttccatggtcaaagctggctcaagacttcctagcctgtgaaaaaagaagaaggtggagcaagccatttcctttttaggaaattacagccatcacttctgcccaccgtccattcatgaatacttactatatagctatacctagcttcaagaaagcctgggacgtgtctctaactagatggacatgtgccctactaaaactccagggaaagggttctattactaaagctaaaaagaggggaatgaatactagagttaaagacaaaaatgatagcagccaatggcccatgccgtgataatctgctgagcaggcatgatggagatcccttgcccagcagaaagtgttccttggtgaaatcatgaatctgctatctaggagaaactcccttgtccattgtcttctgtggccactagtttgacctctaggaaagtcttgctcgtcagcttctgtggccccgtctgaaacttttgagggacatcgcagcttttgcagcccctgcttgctggtgcagacttttagacctagattgccttagagactgaaaaatatacgcttttataggccggggttttagttcatttgactgtaataaagacgtcaatgccgtttttaatgtttgactgctgacatctttcaagactcacctttcccttctcccttatgctgcacatctgggcaagctgatggaagcatgggtgcctcctcctttggccccagcaggaagttcaaatcacgcaagccctggcatgcatgcaggaagcttcaccccagcctcacactctaagacggataaaagccaaaccaattaagccgtttctcgaccctcctgggagcctgccctatctccctggaaagtctcagtatgtgagtaataaacctttttataccca

SEQ ID NO: 8065 - DNA, 622 bp, Homo sapiens
aatttacatgattcatattcattatgcattacttggtatacagacttattttcataatgcaaattaataaaatgacacttttactgcactatagaaatattcatgtatgttaaacttttctgattgaggctaactggaaaaagctggggtcgtattctaagtgctaaagaaggctgcttctactgtatagaacccagggctctgaaacagctctagccgcctaatgcacttcacaggtaactccccaaggtaaaactagactctcttgttggttcgcaaagaaaagttaggacttaacacttttttctaaaattttataattcaatttccaaaagtctactctattttatactgtttctacaaaatattccttataaaaacaaagaacaaaaattgaatatttaatgaattgacattttataaccaacctgtttttatctacggtgggaatctttgatgccagaaatttataaagaggttctgtatcttcacaccttgaataagcataataccataaaaaatgacacttgacatgtcaatgtatttgtcatttcattttaaactcgtatttgtggtttttttcccagataaaaatgaaattaaaccatttctttttaagaaa

SEQ ID NO: 8066 - DNA, 1511 bp, Homo sapiens
gtaaaataaactgatatttctgcagctctacgctgtattcagcgctaagagcaggtagtcaaactgtaaagcaaaccaggtgtcatgactctgccttcctggttttcctgctacctctctgactgccccttaagaggtcctctctctcctcctgtcctctcatttttagtttccctcaaaggcttagtcatgggcctcagaccttctaaatatgctcctggcttcaattatcacctctatgcagctgaatccaagtctatacagctagtcctaaattgcacctgatttccaactgtctattaaggcttcctctcttaagtgggaaggtcatatcctatggctcccaaccccatatattcaaattaaatgcacaatctttctgctcctcatgctccacaaaccacttccctttctaagtgctcaatttctatcagctattaaatttatatcaaatatccctattatttctttatcaccttggcctgaaacctcagtattccctttaccactacgcctcttgtagttttcttaataatgtccaatgtcctccaaaatgtcacttggattcacctttcctcctccttttcctcacttcattcctgtgattgttttctcgctgtatttattttctcctccatttgattcattttcactcaccatcagacccatttttctaaaatcgttttcatcaaatcaatctctctgcacaactcaagaaggctcaattgaatcactactgattgcagcctcaaggctaaactgttgtgacagactctcaaagccatccataatgtgccccctctcctctccccagttatctaaatttatctccccttcattccaaatcagtggttctcaattttgctgccgagggacatttggcagtatctggagacatttttaattgtcatgacttggagtaggggggagtacaaccacatctagtgggtgaaggccagggattctgctaaacatcctacagtgccaggacagcccccaacaacaaagaattagccagcccaaaatagcaagagtgccaaggccgagaatctgctccaaatcaaggctctctgtccccagaccatgctatatctatacctctgctcagaatatttccctagcaacttagaatgtcgtctctcttccccttaactatcaatgttttatttatcttcaaatcccattctaagtctatagcccatggctttaaataccatccagtggtgacgcctccaaaatgtttatcttatcttctgagttccttacccagctgcctactagacatctcctgagtgtactatttaacatatctgaacctgaattcctgactcccccaaaactccttctcctcaaataggtatacagccccagcaatcacccagttgctcaggaaaacaggtgggagttattctggatgctctcctcaacgttctctgctccagtgtcttgccacaaatcaatccattagcaagttctgtcaagagtctacctccagacacatcttaaatcca

SEQ ID NO: 8067 - DNA, 154 bp, Homo sapiens
gtactttttggagagacagggtttcgcctgttgcccaggctggtcttgaactcctgagctcaagctatctgtctaccacggcctcccaaagtgctgggattacaggcacatgccaccatgtctggcctactgtaatttttaatttcatatttac

SEQ ID NO: 8068 - DNA, 273 bp, Homo sapiens
accaccctagaccttgaaattttctgaagaagccatgttgtttgaggttccaaacccttgcacttacagggtttgctgccctgcaaaggactttcccacctttccactatccacctagaaaattcctaccaaatccttcaagacacggagcaggtattgtttcttcagtcacctcacaggccccattcctccctcaggtgacctcacccccaggtttgcacagcactcgtcctatcctattgcaattatttttatacccatttgtcttccctt

SEQ ID NO: 8069 - DNA, 142 bp, Homo sapiens
tttcttttggagacggagtttcgctctgttgcccaggctggagtgcagtggcgcaatctcagctcactgcaagctccgcctcccaggttcacgccattctcctgcctcagtctcccgagtagctgggactacaggtgcccgc

SEQ ID NO: 8070 - DNA, 147 bp, Homo sapiens
cacaatttttttttttttttttttttgagatggagtctcgctctgtcgcccaggctggagtgcagtggcgcgatctcggctcactgcaagctccacctcctgggttcacgccattctcctgcctaagcctcccgagtagctgggacc

SEQ ID NO: 8071 - DNA, 143 bp, Homo sapiens
catttcttttttttttttttgagacggagtctcgctctgtcgcccaggctggagtgcagtggcgcgatctcggctcactgcaagctccgcctcccaggttcacgccattctcctgcctcagcctccccagtagctgggactac

SEQ ID NO: 8072 - DNA, 170 bp, Homo sapiens
cagtctttttttttttttttttttgagacggagtctcgctctgtcgcccaggctggagtgcagtggcgagatctcggctcactgcaagctccgcctcccgggttcacgccattctcctgcctcagcctcccgagtagctgggactacaggcgcccgctaccacgcccggc

SEQ ID NO: 8073 - DNA, 159 bp, Homo sapiens
tatttttctttttcttttctttttttttttttttgagacggagtctcgctctgtcacccaggctggagtgcagtggcgcgatctcggctcactgcaagctctgcctcctgggttcacgccattctcctccctcagcctcccgagtagctgggaccacag

SEQ ID NO: 8074 - DNA, 1843 bp, Homo sapiens
gcccggaaggccaggactggagacagcagtgcttgaacttggaacagccatcccacatgtctgccgttgcaacctcggttcatggctttggttacaatagctctcttgtacattggatcgtgggagggggcagagggtggggaaggaacgagtcaatgtggtttgggaatgtttttgtttatctcaaaataatgttgaaatacaattatcaatgaaaaaactttcgtttttttttttgtttgttttgtttttgagacagagtctcactctgtcacccaggctggagtgcagtggcgcagtctcggctcactgcagcctccacctacctggttcaagcaattctcctgcctcagcctcctgagtagctgagattacaggagcctgccaccacacccagctaatttttttgtatttttagtagagacagggtttcatcatgttggccagactggcctcgaattcctgacctcaggcaatccacccgcctcggcctcccaaagagctgggattacaggcgtgagccaccgcaccctgccgaaaaaaacttttttttttttgagacggaggctcgctctgtcccccaggctggagtgcagtggcgagatctcagctcactgcaagctccgcctcccgggttcacgccattctcctgcctcagcctcccgagtagctgggagccagcgcgcccagcctaaaaaacttttcaagtcaatattactacgatttaacattagagtgtggacatgtgatttaatcgctatagctaaaatacgtcaaatatacgttgtcatgtgcttgaacatgatgctaaccctgacaggatgaaggaaagtaatattctttcagtgtagttcaggagagcatttgttttcttttctaccaattaacccatcattgcttttaaacaaccatctgaaggagcagagaggcagggtagaagacagaagggggatctatgtggtaactaaagaatgtttctgttttgttaattattgtgtgtgtgtggttttattgtttgcttaagagaatcaaaaactgaaaaaaatgagaatacaggaaatggctcttgtttatttttttgctgtgtttacagcttgttaatgctctactgtctttgtttcaagagagatttgttcactgcccagctcgttttgtgtcctgagccctatggccagcccaccttataaatcatgcctgtttagatgtttgattttgttctgtttgctattgttatcttaaaggtgtataactctgacatgccagacatcaaattaagctcaaattaagctctcgtttaaatgtttaagcacctaatttatattctaattgatcccagccactgatgcatgtactttagctacttctgctaaataagcatattaattttccacatcagaccatcagatcttgagaaccaacagttatctagaattccgtgtctactaatgtttcacctgcatgcagccttcattaattttgtagcaaaatataaagtgatcattatgtagcttctggattaaaaaaatttgtgtgtgaagttgctttgtaaagtgcatgtggaattaatgggacagtgtgccctttgtgttagatgttagagcaaaagaaagggcttatagtgttagtattggagcactttgaagatagatattttcagaaaagatgtaggatttaaaagttaaattttaaattttagaaaaagatatgatggcaattggaaatagtcacaatgaagttcttcatccagtaggtgtttaacagtgttattttgccactggtaatgtgtaaactgtgagtgatttacaataaatgattatgaattcattggtgttcttgtccagat

SEQ ID NO: 8075 - DNA, 154 bp, Homo sapiens
caatttctttcttttttttttttttttttgagacggagtctcgctctgtggcccaggctggagtgcagtggcgtgatctcggctcactgcaagctccgcctaccgggttcaagccattctcctgcctcagcctaccgagtagctgggactacca

SEQ ID NO: 8076 - DNA, 150 bp, Homo sapiens
  SITE (130): n equals a,t,g, or c
aagttgtttttttttttttttttttgagacggagtctcgctctgtcgcccaggctagagtgcagtggcgcgatctcggctcactgcaagctccgcctcccgggttcacgccattctcctgccccagcctnccgaatagctgggactacag

SEQ ID NO: 8077 - DNA, 155 bp, Homo sapiens
ttctttttttttttttttgagatggagtctcgctctgttgcccaggcgggagtgcagtggggcaatctcagctcactgcaagctccgcctcctgggttcacgccattctcctgcctcagcctcctgagtagctgggactacaggcacccgctacc

SEQ ID NO: 8078 - DNA, 162 bp, Homo sapiens
tttgttcttttttttttttttttttttttttttttttttttttttttgagacggagtctcgctctgtcgcccaggctggagtgcagtggcgggatctcggctcactgcaagctccgcctcccgggttcacgccattctcctgcctcagcctcccaagtagct

SEQ ID NO: 8079 - DNA, 153 bp, Homo sapiens
ggccccactgctttcttttttttttttttttttttgagacggagtctcgctctgtcgcccaggctggagtgcagtggcgcgatctcggctcactgcaagctccgcctcccgggttcacgccattctcctgcctcagcctcccgagtagctggg

SEQ ID NO: 8080 - DNA, 158 bp, Homo sapiens
attttcttttttcttttttctttttttttctgagacagagtctcgctctgttgcccaggctggagtgcagtggcgcgatctctgctcactgcaagctccgcctcctgggttcatgccattctcctgcctcagcctcccgagtagctgggactacaggc

SEQ ID NO: 8081 - DNA, 141 bp, Homo sapiens
ctcttttttttttttttttggagatggagtcttgctgtgtcacccaggctggagtgcagtggcgagatctcgcctcactgcaagctctgcctcctgggttcacgccattctcctgcctcagcctcccgagttgctgggact

SEQ ID NO: 8082 - DNA, 1432 bp, Homo sapiens
atttttagtagagacaggtttcatcatgttggccagactggcctcgaattcctgacctcaggcaatccacccgcctcggcctcccaaagagctgggattacaggcgtgagccaccgcaccctgccgaaaaaaacttttttttttttgagacggaggctcgctctgtcccccaggctggagtgcagtggcgagatctcagctcactgcaagctccgcctcccgggttcacgccattctcctgcctcagcctcccgagtagctgggagccagcgcgcccagcctaaaaaacttttcaagtcaatattactacgatttaacattagagtgtggacatgtgatttaatcgctatagctaaaatacgtcaaatatacgttgtcatgtgcttgaacatgatgctaaccctgacaggatgaaggaaagtaatattctttcagtgtagttcaggagagcatttgttttcttttctaccaattaacccatcattgcttttaaacaaccatctgaaggagcagagaggcagggtagaagacagaagggggatctatgtggtaactaaagaatgtttctgttttgttaattattgtgtgtgtgtggttttattgtttgcttaagagaatcaaaaactgaaaaaaatgagaatacaggaaatggctcttgtttatttttttgctgtgtttacagcttgttaatgctctactgtctttgtttcaagagagatttgttcactgcccagctcgttttgtgtcctgagccctatggccagcccaccttataaatcatgcctgtttagatgtttgattttgttctgtttgctattgttatcttaaaggtgtataactctgacatgccagacatcaaattaagctcaaattaagctctcgtttaaatgtttaagcacctaatttatattctaattgatcccagccactgatgcatgtactttagctacttctgctaaataagcatattaattttccacatcagaccatcagatcttgagaaccaacagttatctagaattccgtgtctactaatgtttcacctgcatgcagccttcattaattttgtagcaaaatataaagtgatcattatgtagcttctggattaaaaaaatttgtgtgtgaagttgctttgtaaagtgcatgtggaattaatgggacagtgtgccctttgtgttagatgttagagcaaaagaaagggcttatagtgttagtattggagcactttgaagatagatattttcagaaaagatgtaggatttaaaagttaaattttaaattttagaaaaagatatgatggcaattggaaatagtcacaatgaagttcttcatccagtaggtgtttaacagtgttattttgccactggtaatgtgtaaactgtgagtgatttacaataaatgattatgaattcattggtgttcttgtccagat

SEQ ID NO: 8083 - DNA, 150 bp, Homo sapiens
gccaattcttttttttttttgagacagagtctcgctctgtcgcccaggctggagtgcagtggcgcgatctcagctcactgcaagctccgcctcccgggttcacgccattctcctgcctcagcctcccgagtagctgggactacaggcgcc

SEQ ID NO: 8084 - DNA, 142 bp, Homo sapiens
tccattttttttttttttttttttgagacggagtctcgctctgtcgcccaggctggagtgcagtggcgggatctcggctcactgcaagctccgcctcccgggttcacgccattctcctgcctcagcctcctgagtagctggg

SEQ ID NO: 8085 - DNA, 1372 bp, Homo sapiens
aggcaatccacccgcctcggctcccaaagagctgggattacaggcgtgagccaccgcaccctgccgaaaaaaacttttttttttttgagacggaggctcgctctgtcccccaggctggagtgcagtggcgagatctcagctcactgcaagctccgcctcccgggttcacgccattctcctgcctcagcctcccgagtagctgggagccagcgcgcccagcctaaaaaacttttcaagtcaatattactacgatttaacattagagtgtggacatgtgatttaatcgctatagctaaaatacgtcaaatatacgttgtcatgtgcttgaacatgatgctaaccctgacaggatgaaggaaagtaatattctttcagtgtagttcaggagagcatttgttttcttttctaccaattaacccatcattgcttttaaacaaccatctgaaggagcagagaggcagggtagaagacagaagggggatctatgtggtaactaaagaatgtttctgttttgttaattattgtgtgtgtgtggttttattgtttgcttaagagaatcaaaaactgaaaaaaatgagaatacaggaaatggctcttgtttatttttttgctgtgtttacagcttgttaatgctctactgtctttgtttcaagagagatttgttcactgcccagctcgttttgtgtcctgagccctatggccagcccaccttataaatcatgcctgtttagatgtttgattttgttctgtttgctattgttatcttaaaggtgtataactctgacatgccagacatcaaattaagctcaaattaagctctcgtttaaatgtttaagcacctaatttatattctaattgatcccagccactgatgcatgtactttagctacttctgctaaataagcatattaattttccacatcagaccatcagatcttgagaaccaacagttatctagaattccgtgtctactaatgtttcacctgcatgcagccttcattaattttgtagcaaaatataaagtgatcattatgtagcttctggattaaaaaaatttgtgtgtgaagttgctttgtaaagtgcatgtggaattaatgggacagtgtgccctttgtgttagatgttagagcaaaagaaagggcttatagtgttagtattggagcactttgaagatagatattttcagaaaagatgtaggatttaaaagttaaattttaaattttagaaaaagatatgatggcaattggaaatagtcacaatgaagttcttcatccagtaggtgtttaacagtgttattttgccactggtaatgtgtaaactgtgagtgatttacaataaatgattatgaattcattggtgttcttgtccagat

SEQ ID NO: 8086 - DNA, 166 bp, Homo sapiens
ctgcctacatgttttttttgttttttttttttgagacggagtcttgctctgtcacccaggctggagtgcagtggcacgatctcggctcactgcaagctccgcctcccgggttcacgccattctcctgcctcagcctcccgagtagctgggactacaggcgcacgcc

SEQ ID NO: 8087 - DNA, 906 bp, Homo sapiens
ggcatgggcaaggacttcacgtctaaaacatcaaaagcaatggcaacaaaagccaaaattgacaaatgggatctaattaaactaaagagcttctgcacagcaaaagaaactaccatcagagtgaataggcaacctacaaaatgggagaaaattttcgcaacctactcatctgacaaagggctaacatgcagaatctacaatgaactcaaacaaatttacaagaaaaaaccaaacaaccccatcaaaaagtgggcaaaggacatgaacagacatttctcaaaagaagacatttatgcagccaaaaaacacatgaaaaaatgctcaccatcactggctatcagagaaatgcaaatcaaaagcacaatgagataccaactcacaccagttagaatggcaatcattaaaaagtcaggaaacaacaggtgctggagaggatgtggagaaataggaacacttttacactgttggtgggactgtaaactagttcaaccattgtggaagtcggtgtggcgattcctcagggatctagaactagaaataccatttgacccagccatcctttgctatatacccaaaggactataaatcatgctgctataaggacacatgcacacgtatgtttattgcggcactattcactattgcaaagacttggaaccaacctaaatgtccaacaataatagactggattaagaaaatgtggcacatatacaccatagaatactatgcagccataaaaaatgatgagttcatgtcctttgtagggacatggatgaagttggaaatcatcattctcagtaaactatcgcaagaacaaaaaaccaaacactgtatattctcactcataggtgggaattgaacaatgagaacacatggacacaggaagaggaacatcacactctgggg

SEQ ID NO: 8088 - DNA, 368 bp, Homo sapiens
ctcattgtggttttgatttgcatttctctgatggccagtgatgatgggcattttttcatgtgtcttttagctgcataaatgtcttcttttgagaagtgtctgttcatatactttgcccactttttgatggggttgtttgtttttttcttgtaaatttgtttgagttcactgtagattctggatattagccctttgtcagatgagtagattgcaaaatttttctcccattgtataggttgcctgttcactctgatggtagactcttttgctgtgcagaagctctttagtttaattagatcccatttgtcaattttgtcttttgttgccattgcttttggcgttttagacatgaagtccttgcccatgcc

SEQ ID NO: 8089 - DNA, 4704 bp, Homo sapiens
agagaaaaaagaataaaaagaaacaaagcctccaagaaatatgggactatgtgaaaagaccaaacctacgtctgtttggtgtacctgaaagtgacggggagaatggaaccaagttggaaaacactctgcaggatattatccaggagaacttccccaatctagcaaggcaggccaacattcaaattcaggaaatacagagaacaccacagagataatcctcgagaagagcaactccaagacacataattgccagattcaccaaagttgaaatgaaggaaaaaatgttaagggcagccagagagaaaggtcgggttacccacaaagggaagcacatcagactaacagctgatctcttggcagaaactctacaagccagaagagagtggggggcaatattcaacattcttaaagaaaagaattttcaacccagaatttcatatccagccaaactaagcttcataagtgaaggagaaataaaatactttacagacaagcaaatgctgagagattttgtcaccaccaggcctgtcctaaaagagctcctgaaggaagaagcactaaacatggaaaggaacaaccagtaccagccactgcaaaaacatgccaaattgtaaagaccatcgaggctaggaagaaactgcatcaactaatgagcaaaataaccaactgacataataatgacaggatcaaattcacatataacaatactaactttgaatgtaaataggctaaatgctccaattaaaagacacagactggcaaattggataaagagtcaagacccatcagtgtgctgtattcaggaaacccatctcacgtgcagacacacacataggctcaaaataaagggatggaggaagatctaccaagcaaatggaaaacagaaaaaggcagggattgcaatcctagtctctgataaaacagactttaaaccaacaaagatcaaaagagacaaagaaggccattacataatggtaaagggatcaattcaacaagaaaagcaaactgtcctaaatatatatgcacccaatacaggagcacccagattcataaagcaagtccttagtgaactacaaagagacttagactcctacacaataataatcagagactttaacaccccactgtcaacattagacagatcaacaagacagaaagttaacaaggatacccaggaattgaactcagctctaaaccaagcggaactaatagacatctacagaactctccaccccaaatcaacagaatatacattcttttcagcaccacaccacacctattccaaaattgacatagttggaagtaaagcactcctcagcaaatgtcaaagaacagaaattataacaaactgtctctcagaccacagtgcaatcaaactagaactcaggattaagaaactcactcaaaaccactcaactacatggaaactgaacaacctgctcctgaatgactgctgggtacataacgaaatgaaggcagaaataaaggtgttctttgaaaccaatgagaacaaagacaacataccagaatctctgggacacattcaaagcagtgtgtagagggaaatttatagcactaaatgcccaaaagagaaagcaggaaagatctaaaattgacaccctaacatcacaattaaaagaactagagaagcaagagcaaacacattcaaaagctagcagaaggcaagaaataactaagatcagagaagaactgaaggaaatagagacacaaaaaacccttcaaaaaattaatgaattcaggagctggttttttgaaaagatcaacaaaattgatagacagcaagactaataaagaagaaaagagagaagaatcaaatagacgcaataaaaaatgataaaggggatatcaccaccgatcccacagaaatacaaactaccatcagagaatactataaacacctctatgcaaataaactacaaaatctagaagaaatggataaattccttgacacatacatcctcccaagactaaaccaggaagaagttgaatctctgaatataccaataacaggcactgaaattgaggaaataatcaatagcttaccaaccaaaaaaagtccaggaacagatggattcacagccgaattctaccagaggtacaaggaggagctggtaccattccttctgaaactattccaatcaatagaaaaagagggaatcctccctaactcattttatgtggccagaatcatcctgataccaaagcctggcagagacacaaccaaaaaagagaattttagaccaatatccttgatgaacattgatgcaaaaatcctcaataaaatactggcaaaccaaatacagcagcacatcaaaaagtttatccaccatgatctagtgggcttcctccctgggatgcaaggctggttcaacatacgaaaatcaataaacgtaatccagcatataaacagaaccaaagacaaaaaccacatgattatctcaatggatgcagaaaaagcctttgacaaaattcaacaatgcttcatgctaaaaactctcaataaattaggtattgatgtgatgtatctcaaaataataagagctagctatgacaaacccacagccaatatcatactgaatgggcaaaaactggaagcattccctttgaaaactggcacaagacagggatgccctctctcaccactcctattcaacatagtgtggaagttctggccagggcaatcaagcaggagaaggaaataaagggcattcaattacgaaaagaagaagtcaaattgtccctgtttgcagatgacatgattgtatatctagaaaaccccatcatctcagcccaaaatctccttaagctgataagcaacttcagcaaagtctcaggatacaaaatcaatgtgcaaaaatcacaagcattcttatacaccaataacagacaaacagagagccaaatcatgagtgaactcccattcacaattgcttcaaagagaataaaatacctaggaatccaacttacaagggatgtgaaggacctcttcaaggagaactacaaaccactgctcaatgaaataaaaggggatacaaacaaatggaagaacattccatgctcatgggtaggaagaatcaatatcgtgaaaatggccatactgcccaaggtcatttaaagattcagtgccattcccatcaagctaccaatgactttcttcacagaattggaaaaaactactttaaagttcatatggaaccaaaaaagagcccacattgccaagtcaatcctaagccaaaagaacaaagctggaggcatcacactacctgacttcaaactatactacaaggctatggtaaccaaaacagcatggtactggtaccaaaacagagatatagaccaatggaacagaacagagccctcagaaataatgtcacatatctacaactatctgatctttgacaaacctgacaaaaacaagcaatggggaaaggattccctatttaataaatggtgctgggaaaacctgctagccatatgtagaaagctgaaactggatcccttccttacaccttatacaaaaattaattcaagatggattaaagacttacatgttagacctaaaaccataaaaaccctagaagaaaacctaggcaataccattcaggacataggcatgggtaagaacttcatgtctaaaacaccaaaagcaatggcaacaaaagccaaaattgacaaatgggatctaattaaactgaagagcttctgcacagcaaaagaaaccaccatcagagtgaacaggcaacctacagaatgggagaaagtttttgcaacctactcatctgacaaagggctaatatccagaatctacaatgaactcaaacaaatttacaagaaaaaaacaaacaaccccatcaaaaagtgggcaaaggatatgaacagatacttctcagaagaagacatttatgcagccaaaaaacacatgaaaaaatgctcatcatcactggccatcatcagaaatgcaaatcaaaaccacaatgagataccatctcacaacagttagaatggagatcattaaaaagtcaggaaacaacaggtgctgagaggatgtggagaaataggaacacttttacactgttggtgggactgtaaactagttcaaccattgtggaagtcggtgtggcgattcctcagggatctagaactagaaataccatttgacccagccatcccattactgggtatatacccaaaggattgtaaatcatgctgctataaagacacatgcacatgtatgtttattgcggcactattcacaatagcagagacttggaaccaaccgaaatgtccaacaatgatagactggattaagaaaatgtggcacatatacaccatggaatactatgcagccataaaaaaggatgagttcatgtcctttgtagggacatggatgaagctggaaaccatcattctcagcaaactattgcaaggacaaaaaaccaaacagcacatgttctcactcatagatgagaattgaacaatgagaacacatggacacaggaaggggaacatcacacaccggggactgttgtggggtagggggagtggggagggatagcattaggagatatatctaatgctaaatgacgagttgatgggtgcagcacaccaacatggcacatgtatacatgtgtaacaaacctgcacattgtgcacatgtaccctgaaacttaaagtataataata

SEQ ID NO: 8090 - DNA, 1984 bp, Homo sapiens
tttcccatggagacagaatggctttcttcaaagtcagctaccattttctgattgctctgctcacttacaattggacacagccaactctaagtgcctctgtcaatagctaaaacttcctgtcacctgagacaacagacatggtcatccagacagcaacataaagttcctccacagctcttgatgctgagaaacagagagccatgctgacttccttcttcttttcctatattgctctctttcttgccttagggttttaaattatcttagaaatcaccacttactgcttacatagatcagtacctttcaaacatccagccctccaaaggaaaggcttttgatagctaaagattaatgactgtatattccagattttcacccctaataggtgctcaataaaaattacttaaacttcatcaagggtttatcttgtgttattctttaatggcaagtgcattgcatgtactggtgaaaatgtttaaaatattttttcaaaaggaatcagtattcaattttacattaggttggatggcagtcacattacaatatgacaatattaattctaactcttctatgctagacaaagacaaggtttcattttcttacttaatgcactgacattttggtcaatgcccattttaagtgatgacaagaatgcttcttaaatggtatactgcttgcttactattggctcaaatataaactcaatcttctttaggatgaccacttaactacaatatcatcaaaacactgcaagtaaataaatgtacgttcctcatcacaactcctgaaggaaatttcttactgatcatccttaacgtaaggattcaaagatacaaagaaaacttaagaaattgaaagttctatcctaaaactatcacctgtaagggctggttaaatatatatatatgttaattatagagcactgccacataccacaataaacttaagtagaatacaattatcttaggacagtgcctacttggggaatcttttagtttaatctaacaaacacttattgagcacacattaaataccaggtacactgttactcattggaaatatgaaagatacggtctttcccccactgagaaactcagaccaatataaatggctgttgtcttgggaacgtaacaccagatgacatgctttgaatatgaatgtaaggaaaacaaatctacttttttcttataaaaaaaagtcccattttaaatttcctataactgctatataacaacaaaaaaagaaaaagccatcataggtatggcactctcctatgtacctcagaaaaatcacgtccaccctacgctttgccttcagaatcaggactgaagcatcaccattcagtcagagcttaaactaattgcaattaaagttgttttaaggagaaaaaaaaaagcctaagttaaatgaccaaacccaaatttagaaagataatgacagcaaacatcacatgaagctaattctcatttttcattaccatacaattaaagttacaatttattcctccctaagagtcaaaaaaagagttccctgcatgtactgctctagcatattctacatgtagaatcttttttctacaaattatatatttctcttcttacaatattatatatttcaagaacttaaaaagaagatgtcagcttcatattaaagaccagtcttgaataccagacaaaattatccttctcttttcccctcatttttctctttctaaccataggggcattccatagttcctttgcctctagcacacaactaagaaattctgaaagaatattgaactcaactaaaccaatttaataaacacataaaagatatttaataaatatgtaaaggtagtacactttttatctgctatttaaaattttgttttggtttggggagagaggtcaaagaggaaggaagataaactgaaagtgttatagagaggagggaaatttgaagacaccatattagaaacatgatcctatcagaatgacacagc

SEQ ID NO: 8091 - DNA, 128 bp, Homo sapiens
ttttttgtatttttagtagagacggagtttcaccgtgttagccaggatggtctcgatctcctgacctcgtgatctgcccgcctcggcctcccaaagtgctgggattacagacgtgagccaccgcgccc

SEQ ID NO: 8092 - DNA, 2300 bp, Homo sapiens
ggaatggaatactgctgccacttttcaacctctttttcatcttaactgatactatttcttatctgtgtttatatcagattctctttttataagagtaaaattgtttctaattccttggaactatcataaaagaacaagttctttaattataggctgtggtttaaaatacaagacagttgaaggccaggactaagatagatgggaaaggctattttgtcagggaagcctcaaaaatgctgtattttggggaaaaacatggaactctgattttcatttgattctcatacaacaacactttctctaaaaatatcactttaattagctgggcgtggtggcgggtgcctgtaatcctagctgctagagaggctgaggcaggagaatcacttgaaaccgggaggcagaggttgcagtgagccgagatggtgccactgctctccagcctaggtgacagagtgtgacactatcttaagaaaaaaaaaaaaatatatatatatatatatatatatatatatatatttatttatttatttatttaatggctgtaccctatattcttcttgatttctagccttttattggctctcagattgccagagttgggactcaatagtaagtaaccattttgttgaggtggtagtgattctaccagggtgagttatcatgacagcagaatcactgcgtttttctctctactctgtggcatagactctatgcatagagtgacgtgtgaaaggcttgaggctccctacctacgagacaccctggtccattctagcagtatggcacgtgctgactgggttttgagtctcttgctgtataatcacattactgcacttccctgcattttctcatccaaaaatggggattacctgctttgtggatcggtttgcagatgaaataacacacgcagggtatctagcacggtcccccacatggcacattcagtgttagccacacttccatactaactgccctgcggggatatttaatgagctcttaaatggcagaaatgttgtgtcttttcctgttcccttagtattcctatttttgttggtaatttttcttatgaaccatgcagttgtctagttcaggccattttagtatgcagttttatctttgcttccaacatgatttaatgttcccaaattggatttcacataatcctagtgtcctttgagacttgaattggttctaggccaaaaaagggtgagggggaaggaagaaattcagagtcaaatttggcaaataatatatccctgtcgttttgttttttctttttaagacttgggccaggtgtggtggctcacgcgtttaatcccagcactttgggaggctgaggcaggcaaatcacctgaggtcaggagctcgagaccagcctggccaacatggtgaaaaatacaaaaattatccaggcatggtggcccacgcctgtagtcccagctactcgggaggctgagacaggagaatctcttgaacccgggtgagccgagatcgcgccactgcactccactctggtcgacagagctagattccatctcaaaaaaaaaaaaaaaaaaaaagacgactcagtatacaaataaagactggaaagtcctatattaaaggaactagttaaatactagtttattttacttaatctagtgaatttttaaatattttctttccatctttttttttttttttttttttgagacagggtctggctctgtcaaccaggctggagtgcagtggcacaatctcagctcacctcaacctccacctcctgggctcaagccatcctcccacctcagccttctgagtctgggactacaggttcccaccaccatgcctggctaattttgtattttttgtagagacagggttttgccatgttgcagaggctggtctcgaactcctgagttcatgcaatctgaccaccttggcctcccaaagtgctgagattacgcccggcctaaatattactttcaaatagaaccatcttcatgggtagcagtttataatacacaagtagaatttgggaaatgtagtcccagtcttccattcttcacagtggatgcttcagccagtttcctgtctctgcacacacactgcccgacagcgggctttcccttctccttcagagcagtagcagttccctttcttcattcccacccatcacagtgcagccccctctgccctcctgtattctgaatcccacccttataatatgcttagattttgcctttctcccagccgttttgtgagcattgttcgtgtgtaccaattttttctcatcctttaaaaagaaaaaaaaaagcccc

SEQ ID NO: 8093 - DNA, 1561 bp, Homo sapiens
ggaatggaatactgctgccacttttcaacctctttttcatcttaactgatactatttcttatctgtgtttatatcagattctctttttataagagtaaaattgtttctaattccttggaactatcataaaagaacaagttctttaattataggctgtggtttaaaatacaagacagttgaaggccaggactaagatagatgggaaaggctattttgtcagggaagcctcaaaaatgctgtattttggggaaaaaaaatggaactctgattttcatttgattctcataaaacaaactttctttaaaaatatcactttaattagctgggcgtggtagcgggtgcctgtaatcctagctgctagagaggctgaggcaggagaatcacttgaaaccgggaggcagaggttgcagtgagccgagatggtgccactgctctccagcctaggtgacagagtgagacactatcttaagaaaaaaaaaaaaatatatatatatatatatatatatatatatatatttatttatttatttatttaatggctgtaccctatattcttcttgatttctagccttttattggctctcagattgccagagttgggactcaatagtaagtaaccattttgttgaggtggtagtgattctaccagggtgagttatcatgacagcagaatcactgcgtttttctctctactctgtggcatagactctatgccatagagtgacgtgtgaaaggcttgaggctccctacctacgagacaccctggtccattctagcagtatggcacgtgctgactgggttttgagtctcttgctgtataatcacattactgcacttccctgcattttctcatccaaaaatggggattacctgctttgtggatcggtttgcagatgaaataacacacgcagggtatctagcacggtcccccacatggcacattcagtgttagccacacttccatactaactgcctgcggggatatttaatgagctcttaaatggcagaaatgttgtgtcttttcctgttcccttagtattcctatttttgttggtaatttttcttatgaaccatgcagttgtctagttcaggccattttagtatgcagttttatctttgcttccaacatgatttaatgttcccaaattggatttcacataatcctagtgtcctttgagacttgaattggttctaggccaaaaaagggtgagggggaaggaagaaattcagagtcaaatttggcaaataatatatccctgtcgttttgttttttctttttaagacttgggccaggtgtggtgctcacgcgtttaatcccagcactttgggaggctgaggcaggcaaatcacctgaggtcaggagctcgagaccagcctggccaacatggtgaaaaatacaaaaattatccaggcatggtggcccacgcctgtagtcccagctactcgggaggctgagacaggagaatctcttgaacccgggtgagccgagatcgcgccactgcactccactctggtcgacagagctagattccatctcaaaaaaaaaaaaaaaaaaaaagac

SEQ ID NO: 8094 - DNA, 2296 bp, Homo sapiens
ggaatggaatactgctgccacttttcaacctctttttcatcttaactgatactatttcttatctgtgtttatatcagattctctttttataagagtaaaattgtttctaattccttggaactatcataaaagaacaagttctttaattataggctgtggtttaaaatacaagacagttgaaggccaggactaagatagatgggaaaggctattttgtcagggaagcctcaaaaatgctgtattttggggaaaaaaaatggaactctgattttcatttgattctcataaaacaaactttctttaaaaatatcactttaattagctgggcgtggtagcgggtgcctgtaatcctagctgctagagaggctgaggcaggagaatcacttgaaaccgggaggcagaggttgcagtgagccgagatggtgccactgctctccagcctaggtgacagagtgagacactatcttaagaaaaaaaaatatatatatatatacatatatatttatttatttatttattttatttatttatttaatggctgtaccctatattcttcttgatttctagccttttattggctctcagattgccagagttgggactcaatagtaagtaaccattttgttgaggtggtagtgattctaccagggtgagttatcatgacagcagaatcactgcgtttttctctctactctgtggcatagactctatgccatagagtgacgtgtgaaaggcttgaggctccctacctacgagacaccctggtccattctagcagtatggcacgtgctgactgggttttgagtctcttgctgtaaaatcacattactgcacttccctgcattttctcatccaaaaatggggattacctgctttgtggatcggtttgcagatgaaataacacacgcagggtatctagcatggtcccccacatggcacattcagtgttagccacacttccatactaactgctgcggggatatttaatgagctcttaaatggcagaaatgttgtgtcttttcctgttcccttagtattcctatttttgttggtaatttttcttatgaaccatgcagttgtctagttcaggccattttagtatgcagttttatctttgcttccaacatgatttaatgttcccaaattggatttcacataatcctagtgtcctttgagacttgaattggttctaggccaaaaaagggtgagggggaaggaagaaattcagagtcaaatttggcaaataatatatccctgtcgttttgttttttctttttaagacttgggccaggtgtggtggctcacgcgtttaatcccagcactttgggaggctgaggcaggcaaatcacctgaggtcaggagctcgagaccagcctggccaacatggtgaaaaatacaaaaattatccaggcatggtggcccacgcctgtagtcccagctactcgggaggctgagacaggagaatctccttgaacccgggtgagccgagatcgcgccactgcactccactctggtcgacagagctagattccatctcaaaaaaaaaaaaaaaaaaaaaagacgactcagtatacaaataaagactggaaagtcctatattaaaggaactagttaaatactagtttattttacttaatctagtgaatttttaaatattttctttctttctttttttttttttttttttttgagacagggtctggctctgtcaaccaggctggagtgcagtggcacaatctcagctcacctcaacctccacctcctgggctcaagccatcctcccacctcagccttctgagtctgggactacaggttcccaccaccatgcctggctaattttgtattttttgtagagacagggttttgccatgttgcagaggctggtctcgaactcctgagttcatgcaatctgaccaccttggcctcccaaagtgctgagattacgcccggcctaaatattactttcaaatagaaccatcttcatgggtagcagtttataatacacaagtagaatttgggaaatgtagtcccagtcttccattcttcacagtggatgcttcagccagtttcctgtctctgcacacacactgccgacagcgggctttcccttctccttcagagcagtagcagttccctttcttcattcccacccatcacagtggcagccccctctgccctcctgtattctgaatcccacccttataatatgcttagattttgcctttctcccagccgttttgtgagcattgttcgtgtgtaccaattttttctcatcctttaaaaagaaaaaaaaaaa

SEQ ID NO: 8095 - DNA, 299 bp, Homo sapiens
ctcaattgtacatcgcaaatcccactcttgccctcctgcagtgtcagaggacttggctgtgatgggaataagccttggctctgttctccttgcatacttagcccatgggaacccagtttctggcctcaccaggaatgttgttgtgctttgagctccctgtggccttgcatgatgcctccgttggtccttacaggaggtgattggctggcacctcacttgctttctcctgtggacccttctttctctgtccttccttgaatgctgcctttgtccctcatgattatgctatcaacattctt

SEQ ID NO: 8096 - DNA, 415 bp, Homo sapiens
gtgttacactaaagaaattgactgttgcacagactacttataattattgtaacttagtaaaaatttagaaacagcctaataatccagcagaaaattggttcagctgtttacaaatctctgtgtagctcttagaatattcactcttcaacatcatttcagtgacatggaaaaattttaaaaggaggtttacttttaaaatataaaaagaaggccgggtgccgtccctcacgcctgtaatcccagcactttaggaggccaaggtgggcggatcacctgaggtcaggagtttgagaccagcctgaccagcatggagaaacccctactactaaaaatacaaaaattagccgggcaaggtggctcatgcctgtaatcttagctactcaggagactgaggcaggagaattgattgaaccgg

SEQ ID NO: 8097 - DNA, 415 bp, Homo sapiens; identical to SEQ ID NO: 8096

SEQ ID NO: 8098 - DNA, 300 bp, Homo sapiens
ctcaattgtacatcgcaaatccaactcttgccctcctgcagtgtcagaggacttggctgtgatgggaataagccttggctctgttctccttgcatacttagcccatgggaacccagtttctggcctcaccaggaatgttgttgtgctttgagctccctgtggccttgcatgatgcctccgttggtccttacaggaggtgattggctggccacctcacttgctttctcctgtggacccttctttctctgtccttccttgaatgctgcctttgtccctcatgattatgctatcaacattctt

SEQ ID NO: 8099 - DNA, 461 bp, Homo sapiens
cgtgcacctgtagatccagctactcaagaagctgagttgggattgcttgagatcgagaggtcgaggctgcagagagctatgatggtgtactgcgctccagcctgggtgacagtgagatcatctcttgctctcaaaaaaagaaaatttactactaatatttttgtggttctaaattttccaaaaactagaattatagtctacattctgcttgtaatttgcatcttttaaatttagaaatataagatgaatttcacttttattatattttctttgcatccacttcattatttaaaatttatcattgcttaaaacaattacatcagtagtaatgtttattataaaaatttgattcacctctttatgtggcaagtttctgaaatcacatatggggcaagagtatcgtgtccctctttggaaaatgccatctgccatagcttccttgagtgcagggattctcgagg

SEQ ID NO: 8100 - DNA, 139 bp, Homo sapiens
ttttttttttttttttttttgagatggagtctggctctgtcacccaggctggagtacagtggcatgatcttggctcactgcaacctctgcctcccaggttcaagtgattctcctgcctcagcctcccaagtagctggga

SEQ ID NO: 8101 - DNA, 1593 bp, Homo sapiens
gcaagatctctgtctgttaatctgcctcatgaaaatgacgaaccaggagaatctatgggacagtaggaaaagctgccagtcactcagatgataataacatttaccttatacatttataatggaaatcctgccactgtttacaccagaaacagtttctttttttttttttaattttattattattatacttaaagttttagggtacatgtgcacaacgtgcaggtttgttacatacgtatacatgtgccatgttggtgtgctgcacccattaagtcatcatttatcattaggtatatctcctaatgctatccctcccccctccccccgccccacaacagtccccgatgtgtgatgttcccccgcttcctgtgtccatgtgttctcattgttcaattcccacctatgagtgagaacatgcggtgttttgttttttgtccttgtgatagtttgctgagaatgatggtttccagtttcatccatgtccctataaaggacatgaactcatcattttttatggctgcatagtattccatggtgtatatgtgccacattttcttaatccagtctacaccagaaacagtttctattgagaaaatggattttaatagaaaattctcatttaaaatttgggcagatatctgtattgttgagttaaccaaatgagaagagaaaaatccttacaacgtagcttgtcatttgcctgacttgatgcagactgctttgcttagtaatcatgcagcactatcaagactgtgtacataatgtcaggatccatctacataagatgtagtatggactgatgccaagtgagcctggggtggaaatcagaactggatgcaaatcctgatgttatccgagaacaggcacctgttacataggctgtgttactgtggcaaaggtaatggtaaaacacagactggccagaagcattgtgtacaatgagaccttgcaactttgtgtatattagtatgtggggggatgtgaattattaaagacatttaaaactgactgaatcagcaacctctaatctataaaaaaaaattccagacgtccagccgggcacgttctcgtgcctataatcttagtgctttgggaagctgaggcaggaggatcacttgaggccaggagtttgagaccagcttgggcaacatagtgagacccctgtctctacaataaaagtaaacaacttagctgggcataatggcatgtgcctgtagtcccagctactcaagaggtggagatgggaggatcacttgagcccaggagtttgaggctgcagtcagccgtgactgcaccaccatactccagcctgggtgacagagcgagatcttgtcttaaaacaaaacaaaacaaaacccagacttcctataattcctaaaaataaatgtgggtttgagaggcctaccttgaaatgtacaagatcctggccagacttcacctatctaacaatatgctagtaactatttgttgacatgtcttaaagaaatgttcatcagggcctcagaaagcaaggcagagaacaggtccctgaaatttactagcttgcaccaaaccatcagataaagataggttaatatttgacagaaaaaactc

SEQ ID NO: 8102 - DNA, 171 bp, Homo sapiens
gatagagagaatttggaaaacgagcagggttccaaagtactgagcaattttcaggaggagtataaaagcctaggggataattcctatgcatctgcatagggaatttatttgatagctatattttcaggacctgttgacattttattcatccttaaaggcctctttcagttg

SEQ ID NO: 8103 - DNA, 174 bp, Homo sapiens
gatctcagctcactgcaacctctgcctcccgagttcaagtgattctcctgcctcagcctcccaagtagctgggattacacatacaggtacgtgccaccatgcccggctaatttttatatttttagtagagacagggtttcaccatgttggcaaggctggtctcgaactcctgac

SEQ ID NO: 8104 - DNA, 10468 bp, Homo sapiens
ggggatcgcaacatctggatcgtgaagccaggagccaagtcccgcggacgaggtgggggtcagctcctgcttcctgcactggcacctcaccacctgcatctaccagtagaggccaaggaagttaatagtgcaggtctattgaagccaaattgcctgggtttgagtcctagctctgctactaatgtgcttcgtgaccttgagcaggttttagcgcctccctgaacctcagttccctcatctgtgacatgaggaggatgataatacctcctgtgaggtgaggattaaatgcagtcatgcagctaaagcactattccaaatcctcaacgtgcttcaatttatgcaatcctgggaaacggaggcacgtgtaggctttcacatgatccagaaggatatccataaggtcctggaagcagcagttggctgcctctagacaaggagatacattttttattgtatgccctttcgtactgcctaatttttgttttgttttatagtctatttattattggtaggaacgtaataggtgcacatactttaaaaaagcccccaacactggccaggtacagtggctcatgcttgtaatcccagcagtctgggaggccgaggcgggtggatcacttgaggtcaggagttggagaccagcctggccaacatggtgaaaccctgtctctactaaaaatacaaaaattggccacgtgtggtggcaggcacccataatcccagctactcgggaggctgaggcaggagaatcacttgaacccgggaggcggaggttgcagtgagctgagctcgtgccactgcactccagcctaggtgacagggctgtctcaaaaaaaaaaaaaaaaaaaaaaagtccagcactttaaatttgtatccatgtatgtattcctgtttaatcaaacaaaactggttaattaggaaaaatttaaaatccttagcaaattcctggctttcccaaagggaactgggttctgattgagggagacagccttacccactcagccctatcagctccgaggggacaagagctcatgacaagctggcccttctcctggcccacgcctgaccttccaatccctgactgccctcttcccccgtaggcatcatgtgcatggaccacctggaggagatgctgaagctggtgaacggcaaccccgtggtgatgaaggacggcaagtgggtggtgcagaagtatattgagcggcccctcctcatctttggcaccaagtttgacctcagacagtggttcctggtaactgactggaacccacttaccgtgtggttctaccgcgacagctatatccgcttttccacgcagcccttctccctgaagaacctggacaagtgagcccctctgctcgcctcccacgagctccctgcctagttggggagctggcaagcaaacaggcgattacagtgcaggggactcgcgcagcagcgctaggctccacacacagactgcaggcaggcaggccctcatcctgccagctgtccttgcatccaacagatttttttttaacagacagggggcggtctcactctgttacctaggctggagtgcagtggcatggtcacggctcactgtagccttgacttcctgtgctcaagcaatccttcctcctcagcctcccaagtgtctgagaccacaggcatgtaccacagctgatttttaagttttttaatgtagacatggggtctcactatgttgcccaggttggtctcaaactcctgggctcaagcgatcatcccaccttggcttcccaaagtgctgggattacactatgcctggcccctccaacagatttgaccgagtgtgtaccttgtgccatgcactgttctgggcacttggggtatagcagtgaacaaaacaagatcccagctctcaagggcttacattctagcagggagaaacaggcaagcaagaacacaagtgaaattatctaacaggttaaaagattatttgggctgggcccagtggctcatgcctgtaatccaagcactttgggaggccgaggtgggtggatcacctgaggtcaggagttcgagaccagcctgaccaatatagcgaaaccccgtctctactaaaaatataaaaattagccgggcgtgttggcgggcgccagtagtcccagctactcgggaggccgtgacaggagaattgcttgaacctgggaggtggaggttgcagtgaactgagatcgtgccattgcactccagcctgggtgacagatcaaggatctgtctcaaaaaaaaaaaaaaaaaaaaagattatatttgtcgttgggggaaaaagggaagcaaatgtagagcaggggaaaggaggtcaggagttttgaaaactaagatgtcgtgttaacttctagggtgagagaaagccttgttaaagcctgaattccaattctgtctctgcagcttccaagttgtttgaatctggtcatgtgaaaacctatttaagccttggtttccacatctgaagaatggaggcagtagtatgaaattcatagctatcaattattgagtgcttcatatgtgatagtgctgagcactttgtatacatgatctcattcttaataagaacccagtgcatacttcttgttcaccaggtctgaagaaaaatataaaaaacagtgaagtgggtactgttactacccccattttgcagatgtgaagagcacacaggttagatgacttccctaaggtctcacaactagtgtggagatggcgcttgaacacgtcctggcgatgacggggccatacccttacccaccctcttatcttccagacactgggatggttaactgagactatgcacaaagcacttactactgcggcccccgtaactagcgccctcagagcagccctgagagataagagtggttctggccctagaagaatgtggtggggcccaggcctctgtcctttttgtccttcccagtagggccccatctcaagttgaatagtgcagggtggcccagggctgcttccaggacttgcctgtcctccctgagtttggatgggagagacacaagggcctggacctcagttttctgttctctgccccagctcagtgcacctgtgcaacaactccatccagaagcacctggagaactcatgccatcggcatccactgcttccgccagacaacatgtggtctagccagaggttccaggcccacctgcaggagatgggtgccccaaatgcttggtccaccatcatcgtgcctggcatgaaggatgctgtgatccacgcacttcagacctcccaggacaccgtgcagtgtcggaaggccagctttgagctctatggcgctgacttcgtgttcggggaggacttccagccctggctgattgagatcaacgccagccccacgatggcaccctccacagcagtcactgcccggctctgtgctggcgtgcaagctgacaccctgcgcgtggtcattgaccggatgctggaccgcaactgtgacacaggagcctttgagctcatctataagcaggtgaggaggttgggcccaggcaggaccccagagagtctgcaccctcttccaggcagccctgcagtggagcataggactctgcagtcagacccagtttaagacccagattcaagtcctggtcctgctaaggtgacctcacttccttgagcctcagtttcctgatctttgaaatggggatattattaccatctttctcatgggaatgggagaataaaatgaattcatgtatgaggataatatttctagagaggcatatagcatagccataagagcagagattctggaatctccttgggttcaaattcctgttcagtgacaacaagctatgtgactttggacaagttcctaacccctaggtctccttgtccgtaagaataaaaatagtacctaactcacaaagttaggtactatgagttgtgagaattaaatgagttgataagtaaagtacttcatttatttatttttgagacagagtctcgctctgttgcccaggctggagtgcagtggcatgatcttggctcactgcaacctctacctcctgggttcaagcgattctcctgcctcagcctcccaagtagttgggattacaggtgcctaccaccacgcctggctaatttttgtatttttagtagatacagggttttgccatgttggccaggctggtctcgagctcctgacctcaggtgatccgcccacctcggcctcccaaagtgctgggattacaggcagaagccaccgtgcccagccagtaaagtactttagaatagtgcctggcacgtagtaaatgctactaagttttagctaatgttattattacctaataaggttaggagtttcatcatgtataacctgtaaagtgcctgaatgtatagtaataggcaattactggtagctactattattagtagtattataattatttcactcgtcttgctccaaaaagagattggagtctacttgtaaaatagaacagcattttaaaaaatcagtcagaaaattgattgcaaggctttctgagttctggatagaatttcttgtggcagtttaagtggcttctgattagcctccggtttctgtcaaggtttggttacaggaagagaacgtactgatcacatgacctaagtgacctcgcctttgttacagttgttattgatcatttcttaaattaatatattggcgttttggtttcaaaaaatgtaaacggggaaatacatgggcaggaaaatatgagcaagctgagggaaaaggtgccattgtagtgcagtgctcccaatgccagtgcccaggccagaagcatctgaaagcttctaaaggtatggatgtgaggaggctccacccccagagattgacccaaaatgtctagcttggggaggagactatgtatatctgcatttttcaaatgccccccaaatatcttttttttttgagacggggtcttgctctgttgcctaggctggagtgcagtggcaccatctcggctcactgcaagctgcgcctcccgggttcaagcgcttttcctgcctccgccccctgagtagctgggactacaggtgcctgccaccatgcccggctaattttttgtattttagtagagatggggtttcaccatgttagccaggatggtctcgatctcctgacctcgtgatttgcccgcctcggcctcccaaaatgctaggattactggcatgagccaccgcgccaagccctctaaatgtcttttattgctgatttgttcttgtttttgtttttaggccagcacatagtaaaggcttataccttgcactgtttttttttgtctcttttcatctaggccagccccagtgccttttgaccccatagttttgatcttttgaggggccaggcgggttgttttgtagaactgtcccacattctggatttatctgattgtttccttatggtgtgatttaccttggtcttctgttagctgattgtctcaggaactagaagttaggtcaaatagtttgatgaggttaaacatttttcccaagagcacttcagaggtgatgccgcgtacctcatgtggcatcacaaggcacatcctgtgagagtgtctcacagttagtgctgctgagtttgactgtgggttacagtggtggctaccagattctctccattataagctacatctcccctttgcaattaatttttctgtaaggtgctgtgttggctctgtccagattacacattttcctgtcatcctttcatctaattgttttgataccagttttgattattgcctattttattagagttgcaaaatggcaaatgtctaattctgttgttccttctgcatttattagctgagattcttctgtaaagatgaactttccctcatcatctggggctacttgggagtgctgatagctacatttttatttgatttttttttttttttttttttagacagagtctcactctgccacccaggctggagtgcagtggtgctagctcggctcactgcaacctccgcctcccggattcaagtgattctcctcagatcccgagtagctgggattacaggcgcccaccatggccggctaatttttgtgtttttagtagagatggggtttcgccatgttggccaggctggtctccaattcctgacctcagctgatccgcctgtcttggcctcccagagagccaccgcgcccggcaatagctgcattttttttttttttttttttttgagacggagtttcgctcttttcacccaggctggagtacaatggtgcgatctcggctcactgcaacttctgtctcctgggttcaagcaattctcctgcctcgacctcccgagtagctgggattacaggtgcctgccaccatgacctgctaatttttttgtatttttagtagagacagggtttggttatgttggccaggctgatctcgaactcttgacctcaagtgatctgccaaccttagcctcccaaagctctgggattacaggtgtgaccaccatgcccggccaatagctgtatttttaacaagctccaagtaattctgatgtttagatagattctgatcaggatccttcagtggcacagaagatacctccaactggctccaggttgctagcaaggcacagggagctctcctggagcccagctgagggcaggacatacagcttggcctgataggaactgagagttgtaagggagtccctctcctggacccttctctctgccttcctctgcatattcgttacttcattctctccacagactgtcttctttaaggttcttagtttctgctaccccataacctggattcacacgaggctctaggcaggctccaaacctcttacttgttgggtggcgtaactcaaattctctgtgcagagaatctgattggctcagctcaggaagctgtccaccagcagtggcctgtgcagtggagccacacgcattccagcaggggctgggggcagcttaggagggaaatgtggctgaggggtgctggtgggacatggctaggattcccccttcctctgggctagcaattcctggagctctgtgactctaggtactgactcagaggtgggctttccatttctcagctcagaaacgcctctttgaccaggtgcctcagaaagtaattccacccatctctactctgggtcccgctgggccaaggattccagtaccactgactgagtgggccttgtctcctcttcttgcccacagcctgctgtggaggtgcctcaatatgtgggcatccggctcctggtagagggcttcaccatcaagaagcccatggcgatgtgtcatcggcggatgggggtccgcccagcagtccctctgctgacccagcgaggctctggggaaggcaaggactcggggacccctacccacaggtcagcttctaggaaaggcactggggccaggagcctggggcacagtgagaagccagtctccactgccaccacttcagcccccggaaaggggaagaaaggcaaggcgaaaagggccacagccctggtctgccccaatctctgggagtgggatgcccccagcaccaggatgggctgcattttcaccatgaccttttctagtggggacaggcaaccccaccacttgaacagattgccactgagtccgaagaacccccgggccctgggtaagaccattcccccaaaacacccgagtgttccaaggcgatttattcctgctctccaggcccctcccaaccacctggatcagccaccccaccaaagagccaccagtagcaagtaaaagccactactcacaaagtattgtttaaaaatacacagccaaattagctgggcacggtggtgtgagcctgtggtccaggctactcgcgaggctaatgaggatcgcttgagcccgggaggttaaggctgcagtgagttatgatcgcacctctgcactccagcctgggagacagagcgagatgctgtcttaaaaacaaagacacaaaaaaagcactttgggaggccgaggcgggcagatcacttgaggtcaggagttcgagaccagcctggccaacatggtgaaaccccatctgtactaaaaaatacaaaaattagccgagtgtaggggcaggtgcctataatcccagctacttgggagactgaggcacgagaatcgcttgaacccaggaagcggaggttgcagtgagccgagattgcaccattgcactccagcctgggcaacaagagcaaaactctgtctcaaaaaaaaaaaaaaaaaaaaaacccagccaaatgagtattgtctcctccaaagtagtcactctgcctcacagagtgacttatttcaaagatgacctgatttcaaagatgccaggacttaagcccaggttgctctctccagcgcccacgcttttcccactgcagtattctgcctttgccttcaagcagtcacctctcggggaaagaactaacacatgtccagcacttaacagtttgccccataccgctacctgcccagctcctttagtgtttacaccaacctagcaaggtaggtgctattatccccattttccagccgaggtatcaggaagtttaaggaagttgcccaaggttgcacagctcagaaggggcacagctgggatgcagacccaggtctgttggactctaccctgttttcttctcactgcctctggaggaggaaccgggagggctccgtcggccttcaccccattccctccatatccccccatcctccacacgtacctgttagggcagctaggccaccttgggccccaccccagggcctcacagcttctcttgctcccacagcccgtcaccacttccccagcctccacaccaaggcccagctgccttctccccatgtactccgacaccagggccaggtcctcagacgacagcacagcaagctggtgggcactaaggccctgtcgaccacaggcaaggccttgaggactctacccacggctaaggtcttcatttccctcccaccgaaccttgatttcaaggtggcacccagcatcctgaagccaagaaaggtgggcctcgacctgtgactcacacccagtggacagtgctgagcacggggtcagggctggagggcacaggcagagggcagctcccaggctggctggcaccccaagggaagagctggtctccctcagaagccccttcctccacagacttctgatcatctccctcttctcccctcctttcacaccgaggctcctgctctcctgtgcctccgaggcccccagctggaagtgccttgttgcctctgccctttgaagtcggaacaattcctagcacctgtcggaaggtcaaggccaaaggcaaattcaaggccagactgtgacaaacccagggctgaggcctgccccatgaagaggctgagccccctgaaacccctgccccttgttggtacattccagaggcgcaggggcctgggggatatgaagctagggaagcccctgcttcgattccccactgcccttgtcctggatccaacaccaaataaaaagaaacaagtgaagtatttggggcttgactccattgctgttggagggtcaagagtggatggggcgaggccgtgtaccccagggtccacagcaagagcctgaggccatcagcagctcctccgtgcagcgaggcccagaattcccacctaaggacagacatggggcttcctatttagggactcccccagcatctccgatccaggggtggggagcgtgagccttcactttacagatgaagaaactgagtctgaaagaggaggcatggcttacccaagatcacgtggcagtgagtcgacgcagggacatattgccagaactgccgagcactgggagccccccaaccccagagaacaagccaagctagcagaatgacacctaccgggcataggaacgttaatgccatgagacaggggaaggaattggccttgcctaaacctcagcccttctgcagagggcatgggtctatcccttcttcagcaaggggccaaggtcacctaaaaatgaaacatccaataagccacacccacctgaagaaaagtgtggcactgcttagttgtagtgggttgaactgtggtcccctgaaaagagatgtctacttggaccctgtgaatgtgaccttatgtgggaaaagagtctttgtagctgggtatggtggctcacacctgttatcccagcactttgagaggccaaggcaggagatcgcttgagcccgcaagttcaagaccagtctgggcaacatggtgaaaccgtttctacagaaaattagctgggtgtggtggcacacacctgtagtcctagctactcgggaggcctaggtgggaggattacctgagcctgggaagatcaaaactgtggtgagctgtgatcacgccactgcgctctgagcctgggagacagagtgaaaccctaaatcaaaaaaaaaaaaaaaggtctttgcagatgtaaataaatttaagatcttaaatgagataatcccaa

SEQ ID NO: 8105 - DNA, 93 bp, Homo sapiens
gagggcattcgtgaaaatatatggaaagcccttgtcacaatgcctggcacatagtggtgctttatcattaggaactggaatgattaaattctg

SEQ ID NO: 8106 - DNA, 6195 bp, Homo sapiens
tccgtaataaacatttactttcttagcaaatcctcaaaaccataacatgaggtaggaacttttattatcacaagtccagagaggtaaagttacttgcccaatgccacacagcaagcaagtggcctgtccaggatgtgatcttaggtttgtctgactgcagagcccccaccctcactttccagtgtgtgtgagggggtcaggaacagagggaggactattgtaagcggagccccaggcactgtagggtcctggagaaataagggggcagtggtgccaggagctcaacaggggtgtccctggccctggtgcctgggagaaggagccgatgtaggtggaggtgcaagggcagctgggcagcctgggagggggtcaggtggaggcgtctgaggagggcttcatccaggacctggagcgggagaggtacgttgtgttcagccccacattttccaagcagctgagtacccagctctaagggaaatgggagtaaggcgggcgcttcctccattccccactgttctgcaactgttaatcatttcctctttgcacacagatgtgcacattcacacaggcactcacactgcagcagagactggctagggggtcacccaatcagtttcctcctaggcacacacctcaactccatttcccagccctctcacagcttggtgagacgtgagtgagctctagctgagtgaatgtgggtggcagtatgtatgccacttccacacctggcccagaaaaaccttatccacttgaacctacactgtctcccctcatctggctgggtatcaacagcctgggtccctgagtacttagtgcttgaagcagagcccactcccattatttgaccttaacatgagggcacagttcttgtgtgaagactctggtagtctgggcttagtgtgttagagcaggtagaggcatctggtgtcctaatacacgcatgcctttgaccctttgtaccagactcaaagaatggcagacttaagagggctttagaaattagccacatcaactcccttattgaacacatggacagaatgaagcccaagagagtgagtgttacttgcccaaggccacacaccaagatgtgggtacggatacagccttgggagccaaaagggctgcctcccagtagtcccaagctgcacagataaggtctggagatgctgcccatgctcacctctccctccacccctcagaaagcagcaggcaggtgggctggagtacctgtctttggggcttgttgttctcagctggcagcagaaatcgctggcccaggacagtgcccacacgggcagagtacatgtggtccccaagcacagggcagagctgtagtaccatgtgcacctgtagttgactggagaacactgggcaacaggaaagccaggagagacagtgggcagctactcgttctgtgccacccagtatcactcctccccttttcctttggggaaacaccaccccctttctcagatcatatgtttcagtgaggtcagtactatggcccctgcatccagagagggacacataacacgtcaggacgatcacagctatcaatctgcctggctgtgggatccactcatgatgagatgcaaccctgatttaattgctgaagccaccgggcctaaggactgttctttcctgttggggtgctagcctgaagctgcctcctctagctgggcctggtcacatacacctctgggggccatcaaatgctccccaggctgctgctgataccactgtctccccagctccttgcctccctaagccaagtgcagttttttttttttttagccagcgtttcactctgtctcccaggctggagtgcaatggtgtgatcttcgctcactgcaacctctgtctcccaggttcaagcgattctcccgcctcagcctcccaagtagctaggattacaggtgcgtgccaccaactccagctaatttttgtatttttagtagagacagggtttcaccatgttagcctggctggtttcgaactcctgacctcaagtgatccatccgccttggcctcccaaagtgctgggattacaggcgtgagccaccgcgcctggctcaagtgcagttttttttttttttagatgaagtctcctctatcacctagactggagtgcagtggcatgatcttggctcattgcaacttctgcctcccaggttcaagcgattctcctgcctcagcctcccgagtagctggttttacaggcgcctgccaccgtgcccagctaatttttgtagtttttagttgaaacagggtttcaccatcttggccagactggtcttgaactcctgacctcgtgatccacctgcctcagcctcccaaatcaagtgcagttttaaaggctggctagggtgccagacctacctgtcagtggctgcagctggaccagggcacagccagagcctgtggctaccacacgaaagtgactgagagtcttcttgacaccttccaggatgtcctttcgggatggggccttcactggaactgtctgtggtgccagccaagagtgaacaagccttacacaggtctgggagctatacccagaccctccctgctcccaatagactccgggcagggccacagtataggcagtggtcacttgcctgttttaggggacaggagagccagccatcccaaatccatacccctgactcctctctgtaggggtactatatctagaagcacccctcctcttcccagacccggactcacgagattgaccccatcaatgtgttccagtttcagggcagcctggatcttcccctcagaagcagctgggatcccatcagtgacagcactgagaaaggggcaggaggaggtcacagggtggcttgctgggacctccccaccactctaggaacctcccagcacctctcaccagtaggtggctgtgggcctttgggctctccgtgcatgggtgaagtacttctggaggcgactagctgtctggggacagctggagaggagtacaagcccagagctttctctggaataagcagacaaatcacacaagttaaagtcccttgaactcgcccactaaaaaggaaactcttaggaacactgacctgcttcaggccaaacactaacaccaggactataacctagaccaactcctgagaaacaagtaaggtttccccttctttgataacaagactatgtagcttaatgtgtttctcattttgccccggcccccagggaactcagagccaaatgtcgtaacgattgtctaccatgtgccagaattctactagaaattctgtacatattagctcttaaataagttctctacaaaaaagctcatgagtttgtggaactgcagaaatatttcatctcaagtaccatctttaattgatggcagttagaggaaagagtatcatggatcgactagcaatgcctgccacgagtaccgtcatggagaaatgactgcacactgagcataggtattattttctctattttaccattaggggaactgaagctcagggagggtatttgttttgttttgtttttttgagacggggtctcattcaggttgtttaggcttgcgtacagtggcgggatctcagcttattgcagctgccatcttctgagctcaggtgattctcccatctcagccacccgagcactacaggcatgtgctgctatgcccagctaggtttttgtgtgtgtgtgtgtgtgtgttttattttgttttttaagtaaagatagggttttgccatgttgcccaggctggtcttgaacttatgggctcaaggactcctccttcctcggcctcccaaagtcctattgattataggcatgagccaccacgcggaaagttttgttgttgtttttccagagatggggtctattttgcccaggctggtctcgaactcctgggctcaagtgatcctcttgccttggcctccagaagtgttgggattacaggtgtgagtcactgtgcccagcgtcagggaggtgtcatgctttgcctggtatcacaccatttgtacttgaggatttgaacccagagccatcggcttcctcttcttcacagtacttgtatccacctctatgatctcaaaccttcccatggaaaatgtctcagcttatccccaagcagctgtttccccaccacagatggatgcctgtactcctagcttcctgtcacccctaccacttacttcccagatgctcggacaacctgaagctcctgctccctgagccctagggactggctcagctctggcagcactgagaacaacgtcagctctcctggttttcctggaaagtaagaaagaaaaattacaagaggccaaagcttcatgccttcacttttccctccctcagtcacgaaacccccttccgctgcattcccttcccacatccccggcccatacctgtcactggtagaccctgtggcttgttcaacgtcactagaggtcctgaaacatacatcacacgaacatcagcaaaagcaacggtaaccctttatgcagcactaaagagtttccagagcactttctcacgcatcttagcacatgtccccatcatgactctcagacatgagttaactaccccacaccaaattcaacttctttctgttcctctgccacctcagagcctcggcacttgctgtttcctgtccccaaatttcccaggtctggctccctatcatcttggctcaaatgtcacatcacggagaggtctgaatctccaatctaatgtctgccttcctcctgcagttcctcaccatcataacaccctgttttagtttatgcatagcacttaccactagtaacttgttcatttattttctgacatccatttctcccgttagagagaaatccatttctcccctgagagcagaaaccatatctatctttttcagcactgtatagcctgcctagaacagtgcctggaacatagcatatgttcaagaaatagttgagaaaaggaataaatcactgaatagagagtggggttcagagaaattcagttattttcctaaagccgcacagcaagctgatcacagagcctaggtatgtctgactccaaagcctgtgttttgtccgtcgataaataatcattatttatttatttatttatttagactgagtcttgctctgtcatcccaggctggagcgcagtagcacgatgtcggctcactgcaacctctgctatccgggttcaagtgactctcctgcctcagcctcccgagtagctgggattacaggcggacgccgccacacctggctaatttttgtgtttttagtagagacggggtttcaccatgttggccaggctagtctcgaactcctgacctcaggtgatccgcccgcgtcagcaccctaaagtgccgggattacaggcgtgagccaccgcggccaataaacaataatctagtatagcaactcccgtaactgagcgccggctatgtgcaaggctcggtagttatttgcatcttctccccactcttaaccctactgcatcatggcagtagggttaaaagcggggagagggtgcaaattaggtggcttgtcccagctcatgctgctagtgggaggcagaagcagggctgatcccgtggcttcaatggagagcccaactgcacgccgaggcagtcccctcccggtccttgtgcggccgtgcctctcacccctcacctttccggtccaccacggctgcccgcagcgcatcaaccagctcctcccgactgaggttttttggcagcagccccgcgaagggctggtccccgaggggccccgaccgttggcaggagccgcggggttgcctctgatgcctggacaaggagggagaagcaatgggagtcattccatcccgaggtgccacccattcctatctccggacgcctcttcccaaatcctgcggcctctgacaaatgcctcacaatgtctgggctgacctcgaaaattcaggtacgaccggtcccattctacagcggagggcaccgaggctcagagaggccaacggggctgttttcgggtaacatctacctgatccagatcccgcacgtgccttccccctgccctagcctccgtcccgcatgagagagggggtacttaatcaccgggcttcggtgccaaagcctgcgtcctcgggcactgggcggacacccaggccccgccgccagccactccagaaccggcccaaaacacggcggccgtccatctcccg

SEQ ID NO: 8107 - DNA, 851 bp, Homo sapiens
gagagcatgtgtgtcaaggaccttgctgggtcaacaattcatttgcctttgtctggagtctgccagcagcagtagctaatgtctaaaagacacaggggccaggagagaaaagggaggaaagaactaagtctctcctagtctatggcatgctatcatggggtcaagtaggggcagggaggcttcatggggcctacctttgggatgacattaccccagtgggcattgtttgggtggttttcttttaaactatttacactgatatgacagactcaaactcatatttgctattctccgagcacatggaaaggtaactcactctgtacattcagatatcaaactatgcactgtgagggctatgagaagcgcaaacagtaaacgcttggcaggagggaacacttcctctctctgaggaagaggctggaagctggtcttccccctccaagaatacacgggtgcactgagtctttatgcaaaggcaacactgagccatggccaagggcatctctgcggggaccctgggaaaggagcctgctccaggtgtccccaaagagatggaaaacaagacagtcatttggaacagtgatgcataataaaatgtatgtggccaccttacaatactgctaagttgctaaaatatataaagttaatatttgagttctatttttataaaatagttctagatttatggcaatataaacgtgtatagccttttgattttaatttctagttttgtgctttgaagaaatatatgtaagattaaagaactgtatattgtaagcattatattcaaattatttaaaaattgttctaagtctatattcaataaaaagtaatgccaagaaagatgatgt

SEQ ID NO: 8108 - DNA, 851 bp, Homo sapiens; identical to SEQ ID NO: 8107

SEQ ID NO: 8109 - DNA, 2026 bp, Homo sapiens
tcttccctttcaatctgcaccctctccccaatgagtataagaaatcctacccttggattatccatctggcagcaagacaggcagtgaccagtggtggtagttcttctaactttaaaagatgagaggctcaccctaaaacatcttcattcctctaccagtgagactatcaaccatggatctatctatctattttttaagcctgcatcacttcttgagataatgaggtttctacctccaaagcctgctgggtgagcaccttgctcattatactggttctgaatttacctctttgaagtttctagatgcaccacttcctgctcacagcctggaattcggttaacaagtcagtgtcaacctacctttcccttcatgatttatagacttttgggagtaccttctggtagcttttgtcttcccataggaaagaggcccaatcccagtttgtcctcacaaagcggccagctccgtgatatctcttttgcgggcagagttaagattgtacacagatccccacaagtaccacgatttttgcctcaggaaggataaagcacatgtttgtttctgctttcgttttcttttttctttttttcacgaagccttatggagaagtatgtttctgctttctttcctgaggaagcctggcttctgggccacgggactgatcctgtccacatcctctttccctccattctccatcgtgtctctgcccccgtctcaccccaccccgtgcccctctctgcctcagcttcccctcttcccctgcagtgagtttcctgcgcagcggcactaagctcatcttccgccggaggcctaggcagaaggaagctggcctgagccaatcacacgatgacctctccaacgcaacggccacgcccagtgtccgaaagaaggccggcagcttttctcgccgccttatcaagcgcttttccttcaaatccaaacccaaggccaatggtaaccccagcccccagctctgaggacccagctctgaaagggcacgagttctctcagcccattccccacctccccttccataccccttcctggatctccagtgcctgggccaggaaagccctctgggttccgggaagccccgtccaccctgggccatggggccggttggaaggatacttggaacgggaagcacatgagaggtgggcacccggtgccgaggacatggacgagggactggtggctgggagggagaggagggccctgtccggcatgtgtgggtattccccagaagcatttgcctcctgctgagcctggtccctgagcggagtcccagggtgctcagctcttcagctgacccttcttcccttatttattctcttttctatttatatgtgtggcttaggaccctccgtgaacagatgatagagggcatctctcccaggtgacccttcttttctgtcccaggagggtgggtaattccctttgggatggggctcccacacctccctcaggtccccactcagaccagcaccagtgtctgcctctgagaatgttggcagctcacagagagcagggccggcccgggatggggggcaggtactccccaccttcctgcctcccctcctgctcctcatccctccctccccctttattaccgttttttgtacttgatgccttctctgtgagcagtggctctgtgggaaggagggagccgggagcctggtgggaagccttccccagagagatggctttaggggctttatttaaagactgtgatgatggagccacgcaaggctgcacctctgtgtgttgggagacgatgatgatgtccattgctgtgtgatggcttggaatttaatttattaaagtcaaattggagtttataaactggacaactggttatcctttgaaaggcagtaggcagccaggctgtgacatggatggtgtgggaggatgagacaggggcccggataatgaggttgggtagatgacacacattgtggatctgctaagaagttcctgcagggaagaaggggtgtgcagagaaaggatggaagagacaggaggctct

SEQ ID NO: 8110 - DNA, 2025 bp, Homo sapiens
tcttccctttcaatctgcaccctctccccaatgagtataagaaatcctacccttggattatccatctggcagcaagacaggcagtgaccagtggtggtagttcttctaactttaaaagatgagaggctcaccctaaaacatcttcattcctctaccagtgagactatcaaccatggatctatctatctattttttaagcctgcatcacttcttgagataatgaggtttctacctccaaagcctgctgggtgagcaccttgctcattatactggttctgaatttacctctttgaagtttctagatgcaccacttcctgctcacagcctggaattcggttaacaagtcagtgtcaacctacctttcccttcatgatttatagacttttgggagtaccttctggtagcttttgtcttcccataggaaagaggcccatcccagttgtcctcacaaagcggccagctccgtgatatctcttttgcgggcagagttaagattgtacacagatccccacaagtaccacgattttggcctcaggaaggataaagcacatgtttgtttctgctttcgttttcttgtttctttttttcacgaagccttatggagaagtatgtttctgctttctttcctgaggaagcctagcttctgggccacgggactgatcctgtctacatcctctttccctccattctccatcgtgtctctgcccccgtctcaccccagcaccgtgcccctctctgcctcagcttcccctcttcccctgcagtgagtttcctgcgcagcggcactaagctcatcttccgccggaggcctaggcagaaggaagctggcctgagccaatcacacgatgacctctccaacgcaacggccacgcccagtgtccgaaagaaggccggcagcttttctcgccgccttatcaagcgcttttccttcaaatccaaacccaaggccaatggtaaccccagcccccagctctgaggacccagctctgaaagggcacgagttctctcagcccattccccacctccccttccataccccttcctggatctccagtgcctgggccaggaaagccctctgggttccgggaagccccgtccaccctgggccatggggccggttggaaggatacttggaacgggaagcacatgagaggtgggcacccggtgccgaggacatggacgagggactggtggctgggagggagaggagggccctgtccggcatgtgtgggtattccccagaagcatttgcctcctgctgagcctggtccctgagcggagtcccagggtgctcagctcttcagctgacccttcttcccttatttattctcttttctatttatatgtgtggcttaggaccctccgtgaacagatgatagagggcatctctcccaggtgacccttcttttctgtcccaggagggtgggtaattccctttgggatggggctcccacacctccctcaggtccccactcagaccagcaccagtgtctgcctctgagaatgttggcagctcacagagagcagggccggcccgggatggggggcaggtactccccaccttcctgcctcccctcctgctcctcatccctccctccccctttattaccgttttttgtacttgatgccttctctgtgagcagtggctctgtgggaaggagggagccgggagcctggtgggaagccttccccagagagatggctttaggggctttatttaaagactgtgatgatggagccacgcaaggctgcacctctgtgtgttgggagacgatgatgatgtccattgctgtgtgatggcttggaatttaatttattaaagtcaaattggagtttataaactggacaactggttatcctttgaaaggcagtaggcagccaggctgtgacatggatggtgtgggaggatgagacaggggcccggataatgaggttgggtagatgacacacattgtggatctgctaagaagttcctgcaggaaagaaggggtgtgcagagaaaggatggaagagacaggaggctct

SEQ ID NO: 8111 - DNA, 6734 bp, Homo sapiens
gcgttgccagctctctgctgaggaggtgcggttcccagtctctgtgacccagcagtcccccgctgccgtctccatggagacctaccacgtcactctgacactgccaccaacacaggtagaaggggatgtgggaaactgagttgggcaggggcggttccattggctcagcttcttccatttgtttcctctctgggatggaattcaggaagggagagtcctcgaattaggagtccttgggtaaatggggcaagtcagcccagtcactttgttcctgtctgtagttggaagtcaacctggaggaaatccctggtgaggggctgctcatatcctgggccttcactgatcgcccagatctcagcctaacggtgcttcccaagcttcaggccagggaggtaaggaggcagagctggcagagaagaggcagaacggggagggaggcagaggtgggggatccacctccttgttgttcccttcttctctctgcagagaggtgaagaacaagtggagctctccacaattgaggaactgatcaaggatgccatagtcagcacccagccagccatgatggtcaacctcagggcttgctctgccccaggaggcctggtgagttggcacccaaagcaaaagatttgcatgcaccttgttcctagggtgctatgtcaggattcttgctctttggaccttcttctgctcttaggtacccagtgagaagccacccatgatgccccaggctcagccagccatccccagacctaaccggttattcctacggcagcttcgggcatctcacttgggaaatgagctggaaggtgagagctggaagtggctgcgggactgccaaggctatggttggttgcagatgctctctgcccctctgccaagggtacagcctctttattctgcagtgacttcccatctctgatctgagcatcttctaacttctggttcatcacaggcaccgaggaactgtgctgtgtagctgaactcgacaaccccatgcagcagaagtggaccaagcccgcgagggctggatccgaggtggagtggacagaagacctggcactgtaaggagtaaccctgccccgaccccatgctccagagcagagaggatcaaacctttccagcacagtccttgcaggaatcagctctgttttcagtagcctttggcgtgagctcctattgtatgccaggccctggcgtgggtcttagggatacagacttgaccaagatacagcccccacccctgggtcaatgacaagcttgaggcagagacaggtgtacataaagaagatggtaaaaccgctccagttgaggtttatgtaatgtgccgtcagagtgcctaggtgggggggagattaattcccatgagggaataaggatcagagtaggcttcacagaggagatgacatttaaaccacactttagagcaagagtgggatttcatcagagtgtgaaagtattctcggcagagggaagagctggagcaaatgaaagagggtggcttgcaactgagagactggcaagacaggaagagcaggaccagggaggatttgaatgcatagctgagaagcatggtttccactcaggccctgtccctttctcttgggacgagagagaatttggaggccaggagaatctgattggagcatttatgccgttttatttatgtacacagctctctgcctctggcctgtgatccactcaagtgtgggttcagcttgctaattttctccttcctgccccatctcctcttgtcccacagggatctgggcccccagagccgggagctgaccctcaaagtgctgaggagcagcagctgtggagacagtaagtgaggggtgggaggggcacccctgggtgggtacagagtggggtctggccatgggcccagctcacagtgccatccctttccccagccgaactcctaggccaggccacactgcctgtgggctccccctccagaccactgtctcgaagacagttgtgcccactcaccccagggccagggaaagccctgggaccagcagccaccatggcagtggaggtgagaagctgacccctggggtaggtgggaggacacaggggatgggcagtctccgaggctctgtctcttctctctcccacccctgggcagcttcactatgaggagggctctccccggaacctgggtactcccacctcctccactccacgccccagcatcacacctaccaagaagattgagcttgaccggaccatcatgcccgatggcaccattgtcaccacagtcaccactgtccagtcccggccccgtatagacggcaaattaggtaaagagaaggagcctgggagcccagctctagccaggggcccgggactgcagacccaaggcaggacagtgaaagaggagagagccttaattccaattccccctgttttcagacattccattccagtcctaccacatcttcctcccaatctttgtctcttccaaactttcccttacctcctgccatttccccagcaattcctctcactctgccacccttctggatcctcctgcccctcctcatacaggactgttgcactcctaccttccagcttcccctctggcttttcacaggtgtccttagccccagctgactataattgtccatcctgctaccctcagccctccagcaccccctggggtcctccaacaaacccagaggcctctgtggcatttctaccccactcagtgggcccccatggcacttctgccattataggggccccactgaattgccccaacttcagggagccccagtaccccctctgtccccgctccatattttcatagcatctccccacaccttcagcaggccccatggcactttcctacactcccattagctcctggggtgtcttttagtccccacggcatcttcctaatcacccttgtgattaatcaccctttaatcattcttgccctctgagtcacccaaagtctgcatctcaacaaagacagtaggggtgggggccactctgaagcacctcccagctcactgaccctcccccacccaccagactccccctcccgctccccgtccaaggtggaggtgaccgagaagacgacaactgtgctgagtgagagcagtggccccagcaatacctcccatagcagcagccgtgagtggggaatggggtgcatgagtgtgggttggccctggtgccccagcatcaaaaagtactctgggtgggataggaggagttccaatccaagaaagagccagggagaagtcaggttattcattctctgcacccctagcaggggacagccacctttccaacggcttggaccctgtagcagagacagcgattcgccagctgacagagcccagtgggcgggtggccaagaagacacccaccaagcgcagcactctcatcatctctggtgtttccaaggtaacagggctctggggagaggagctgggatggggagaaagccctaatgggtcggtcactcctgcccattaaaacccgtccctcctgccaggtgcccattgctcaggacgagttggcgctatccctgggctatgcggcatccctggaagcctcagtgcaggatgatgcagggaccagcggaggcccctcttcacctccctcagacccaccagccatgtctccaggaccgctagatgccctctctagtcccacaagtgtccaggaagcagacgagacaacccgttcggatatttctgagaggccatctgtggatgatattgagtcggaaacggggtccactggtgccctggagacccgcagcctcaaggatcacaaaggtagggggacgttggcagggtgcccctcatctcttcttttatacacatatcatgacctgggggacctcgagccagtgtgccttctccttcctcccctaagagatagccggattcccagcctagttcagccaagctagcctagagggggatcttggtgccttggttcctggcctagatctgacatgcttgtgataggaagggatgccaaattatttccctttacctccattgttctttcttcctgagtctcagtgccatttttcctgccctttaaaaaaaattataaaaatttattcctaggcagggtgtggtggctcacaccggcactttgggaggccaaggcgggtggcttacctgagtccaggagttcaagactagcctgggcaacatggcgagaccccatctctactaaaaatacaataaattggctgggcgtagtggcacacacctgtaatctcagctactcagggggctgaggagggaggattccttgagcctgggaggttgaggttcaaggaggttgaagcagtgagccgtgattgtgccactgcactccagcctgggtgacagagtgagaccctgtctcaaaaaaaattttttttttccatggctgggcacggtggttaatgcctgtaatcctagcactttgggaggccaaagcgggtggatcacaaggtcaggagttcaagaccagcatggccaacatgggtaaaccccatctctactaaaaatacaaacattagccagacgtggtggcaggcgcctataatcccagctacttgggaggctgaggcaggagaatcgcttgaactggggggttggaggttgcagtgagcccagatcatgacactgcactccagcctgggtgacagagtgagactctgtctcaaaaaaaaaaaaaaaaattcttccctttcaatgtgcaccctctccccaatgagtataagaaatcctacccttggattatccatctggcagcaagacaggcagtgaccagtggtggtagttcttctaactttaaaagatgagaggctcaccctaaaacatcttcattcctctaccagtgagactatcaaccatggatctatctatctattttttaagcctgcatcacttcttgagataatgaggtttctacctccaaagcctgctgggtgagcaccttgctcattatactggttctgaatttacctctttgaagtttctagatgcaccacttcctgctcacagcctggaattcggttaacaagtcagtgtcaacctacctttcccttcatgatttatagacttttgggagtaccttctggtagcttttgtcttcccataggaaagaggcccaatcccagtttgtcctcacaaagcggccagctccgtgatatctcttttgcgggcagagttaagattgtacacagatccccacaagtaccacgatttttgcctcaggaaggataaagcacatgtttgtttctgctttcgttttcttttttctttttttcacgaagccttatggagaagtatgtttctgctttctttcctgaggaagcctagcttctgggccacgggactgatcctgtctacatcctctttccctccattctccatcgtgtctctgcccccgtctcaccccaccccgtgcccctctctgcctcagcttcccctcttcccctgcagtgagtttcctgcgcagcggcactaagctcatcttccgccggatgcctaggcataatgaatctggcctgagccaatcacacgatgacctctccaacgcaacggccacgcccagtgtccgaaagaaggccggcagcttttctcgccgccttatcaagcgcttttccttcaaatccaaacccaaggccaatggtaaccccagccccccgctctgaggacccatctctgaaagggcacgagttctctcatcccattccccacctccccttccatactccttcctggatctccagtgcctgggccaggaaagccttctgggttccgggaagccccgtccaccctgggccatggggccggttggaaggatacttggaacgggaagcacatgagaggtgggcacccggtgccgaggacatggacgagggactggtggctgggagggagaggagggccctgtccggcatgtgtgggtattccccagaagcatttgcctcatgctgagcctggtccctgagcggagtcccagggtgctcagctcttcagctgacctttcttcccttatttattctcttttctatttatatgtgtggcttaggaccctccgtgaacagatgatagagggcattttttcccaggtgacctttcttttctgtcccaggagggtgggtaattccctttgggatgggggtacccacacttccttcaggtccccactcagaccagcaccagggtaagcgtcagagaatgttggcagctcacagagagcagggccggcccgggatggggggcaggtactccccaccttcctgcctcccctcctgctcctcatccctccctccccctttattaccgttttttgtacttgatgccttctctgtgagcagtggctctgtgggaaggagggagccgggagcctggtgggaagccttccccagagagatggctttaggggctttatttaaagactgtgatgatggagccacgcaaggctgcacctctgtgtgttgggagacgatgatgatgtccattgctgtgtgatggcttggaatttaatttattaaagtcaaattggagtttataaactggacaactggttatcctttgaaaggcagtaggcagccaggctgtgacatggatggtgtgggaggatgagacaggggcccggataatgaggttgggtagatgacacacattgtggatctgctaagaagttcctgcaggaaagaaggggtgtgcagagaaaggatggaagagacaggaggctct

SEQ ID NO: 8112 - DNA, 246 bp, Homo sapiens
atatatttggggggacaagtgcaggtttcttacatgcatatattgcatgcatagaggtgaagtctgggctttttttagtgtgcgcatcgcccaaatagtgaacatcatacccaataggtagtttttcaaccctcacccctcctcccaccttctcacctttcatagtctccgatgtcttttattccactttatatttccatgtatacccattatttagctcccacttataaataaaaatatgccata

SEQ ID NO: 8113 - DNA, 520 bp, Homo sapiens
ctactcaccaaatatgagatatccgggaagaatggagggtatagattttttttttcaattagataatttagttttatatatttggggggacaagtgcaggtttcttacatgcatatattgcatgcatagaggtgaagtctgggctttttttagtgtgcgcatcgcccaaatagtgaacatcatacccaataggtagtttttcaaccctcaccctcctcccaccttctcacctttcatagtctccgatgtcttttattccactctatatgtccatgtatacccattatttagctcccacttataaatgagaatatgccatatttgactttgtttctgagttatttcaccgaggataatggcgtccagttccacccatgttgctggaaaacacatgatttcattcttttttatggctgagtagtattcccctgtgtgtgtgtgtgttgggcgatgataatgatgtccattgctgtgtgacagctggaatttaatttattaaagtcaaggtggagtttataaa

SEQ ID NO: 8114 - DNA, 521 bp, Homo sapiens
ctactcaccaaatatgagatatccgggaagaatggagggtatagattttttttttcaattagataatttagttttatatatttggggggacaagtgcaggtttcttacatgcatatattgcatgcatagaggtgaagtctgggctttttttagtgtgcgcatcgcccaaatagtgaacatcatacccaataggtagtttttcaaccctcaccctcctcccaccttctcacctttcatagtctccgatgtcttttattccactctatatgtccatgtatacccattatttagctcccacttataaatgagaatatgccatatttgactttgtttctgagttatttcaccgaggataatggcgtccagttccacccatgttgctggaaaacacatgatttcattcttttttatggctgagtagtattccactgtgtgtgtgtgtgttgggcgatgataatgatgtccattgctgtgtgacagcttggaatttaatttattaaagtcaagttggagtttataaa

SEQ ID NO: 8115 - DNA, 8420 bp, Homo sapiens
ggggagaccggcattggcaaatccacactgatgaacacactcttcaacacgaccttcgagactgaggaagccagtcaccatgaggcatgcgtgcgcctgcggccccagacctatgacctccaggagagcaacgtgcagctcaagctgaccattgtggatgccgtgggctttggggatcagatcaataaggatgagaggcaagaggcgggaagggcggccccacccagcctcctcccaccccacctacattggcccctataacagtagcccagccctcacactgcagggggccagggagggcctcttggggaatatctgaggctctgtggtcaccaacagaccagttactcctttaggtgtctggagaaggggtcagctgcctgtatccagtcagggatctcaggcagaagctgttcccagaaagaaaaggccagggggcagcctggcttggccccgagccctgagccccccaagccccaagcccctgatctcagctggcagcctcctgggtgatggagctgtctgtagttacaggcccatagttgactacatcgatgcgcagtttgaaaattatctgcaggaggagctgaagatccgccgctcgctcttcgactaccatgacacaaggatccacgtttgcctctacttcatcacgcccacagggcactccctgaagtctctagatctagtgaccatgaagaaactagacagcaaggtatccctgtccccacctgctgtcacaggctccatagtcttctgctgcgatgcgatgtggtggctgcctcatgcctgaacaccatggtcctcagggacctggtcgggggcttgtgggtggccccccattggctcggtcctctctctgtcttgcgtctgttcctcctgctccagtggcccccaatgctctgggctcattctccagagtcctgtgccctgggtctgaccctgagccccttgcttgcagctgaatcattctcattgtcagcccctcccgctcccgatagtgtttgttccccttcgctccagggaacctcccttcccatctcagcctcttctctgctcattttctatctctcaattcctaatttctagctcctcctttcacttcccccttcctccctgacataaatgtcctttggttccttctgagcccatcagggagaggagagttaaggcccagaaatgggatgtgaatgaggggtgggtactgtaggggtagagaagggaggcagcttcatgggaaggactggaagtgctgtgcatcttgaagggcatgtgaccccacatcccttgtcagctctcacgtgactgccctcccatctcaggagttcatttttattgtaaaaaacgggatagcctgggcctgggagattttgggatcttcttatggctactgctgatgggtccttttacctgcttagtggggagcatagcccccccaccactccttctgttaggccccaggccaattaggaccttcaaaggattctgggtcaaagctgggtatgcctagggggaccagttttggggctggatggtgatttgggggaaccagggctgtaagaagcactgcagccaattgttgaaactcatcagaatggccacaggtggctgggtttgcactatggctgcccgtgggagtggctccatctctctggcctccttccccctgcccagggatatggcctgggcatgtctatccatatcctgggcatggcatgggaaccaccgctcaaaagagccaaccagcctgctgtcccctcccctgatcctggcaggtgaacattattcccatcatcgccaaggctgacaccatctccaagagcgagctccacaagttcaagatcaagatcatgggcgagttggtcagcaatggggtccagatctaccagttccccacggatgatgaggctgttgcagagattaacgcagtcatgaatgtgagcgttgggtgagggcctcagggccctggggccagagggcgaggagccggcacagatctgacacagccccaggagactcttgttccccaggattccagccttagcttctccaggacagaagggtgggcatctggagctggccagtcctacatctgtgggcaggggacaggaagaatctgatagtgggcctacactggggaccccaggtttgggtgtcataagatctggactcatggaggagcctggaaatggaagcagttgagcaggcttaagggtttgggaacctggaagggagccaggctcacaggtcctttcaggaagctctaatggcccctgggaggcccgagtgctgaaagaacagcctggagaatcaggagcaccagggagggggttgagggttcagcccactcccctgtttggagttctgggacatttctccagaagagagccaggaagtaagcatctggccctggagcctttgttcaggtctggctgcccctccctaggacccaggggcagggagggagagtctgccattagtctgtgtcagctcagggcttacgcatacccgggcccctttccaggcacatctgccctttgccgtggtgggcagcaccgaggaggtgaaggtggggaacaagctggtccgagcacggcagtacccctggggagtggtgcagggtgagtgtggacaggaaatgcatcctgggggtagaactgagttccctggcctgccctgctgcctgtagtaccctgtgctgtttcctcctcatgcccacctgcgtgcctaccctgactctggagtgtgcccgcctgcatgcctgcctgataccccaccggccctctgctttcagtggagaatgagaatcactgcgacttcgtgaagctgcgggagatgttgatccgggtgaacatggaagacctccgcgagcagacccacagccggcactacgagctctaccggcgctgcaagttggaggagatgggctttcaggacagcgatggtgacagccagcccttcaggtgacagcctgagccagagtgagcctgtcttcacagctgtggccagacacaccaccctggcatctgttccctgagggaccccacatcctcttacccctcgtgcccacatgattctacttctctggctctgccctgccctatcccattccgtcataatcccatccttggcctcttttctctgggtctccacagcctacaagagacatacgaggccaagaggaaggagttcctaagtgagctgcagaggaaggaggaagagatgaggcagatgtttgtcaacaaagtgaaggagacagagctggagctgaaggagaaggaaagggaggtatgtgccaggctgggggctgggatggggaagctgagggagggaaggcctggctgagggtagaggtgggggtgccttcctggcccaggctcaagccctcctcttgctccccgcatcttctgccccctttctgatgccagctccatgagaagtttgagcacctgaagcgggtccaccaggaggagaagcgcaaggtggaggaaaagcgccgggaactggaggaggagaccaacgccttcaatcgccggaaggctgcggtggaggccctgcagtcgcaggccttgcacgccacctcgcagcagcccctgaggaaggacaaggacaagaagaagtaggtggcaggctgcgcctgcgctggctcctcttgctcctgtgggctcttgctttcgttcttgtccctcacctcccttctcgctctcctgctcgccctctcttacccctttcctgtttggttttccctcatcttcagtggctctccccccagctttcttggttgcctttttctttcactagtgatccagtgtctcgccgtctggattgctctgatactcatgcagtctcacttgcacaggcaatcttgtgctccccctccctctcccttctccctttttctctccttctcttcccccttcttcctcttcctccaactttcttgctcacccattcgctctcccatagcccccttggcagctgtggccctgttgcagcgtggtgaaggtggggctgcacgggtgaggagcagcgtggagagggcgaagctgcagggctctgggaatgctgggaatggtctttcaggccaggggcgggacaggacctgggaatgtcagcatctccagccagattccaaaagccgtggtggtttctgcttggacacctgtggcgcatccctcctcagtctgtggggcagtggtgtggagcccgtattggctggcaggtggtgatggagaactgcgggcactcgcgccagccaacactggcctcctggagactggtcaccacacagctgttctgaagggcccgcagggcttaagggaggaaagcggcttcccacaggggctctgtgggttcttttggggagaagagctgcccctcaagtagaggctggagttgttcctgcagagtggagagaggagagaaagactggatggcagggaggcctttcccagcaccaggagtgcagtcaacggagtagtcaggtggggacaactatgagtcacttctccctggcgatcttcatagcctgtttccacacccttagctggagtccagatgtcctggcttctggggctcaccctcgcccacccacctcattcacagccatgctatgtcacactgtggggatcccatccatccctgcttctccctgccccggcctatcttgggtaccatccttctcttgccaacctaggaactaagcaggtgaacccaacctggccgtcattctcgggatccatttcctcctgggatatttggggatgtgtatgcccaggcccttccttccttggtggcaatggagcctagccattagggccagcgggagtctgtgacccaggtactggcacccaaagtgactttgccctgcttcctgccatcttgttaaagaaaaggtagccaggattccctaggaaataagctgtggagaaaccactcagcaactgcagacaggggtctgtggccagttcagggtctgagggccagtgaaggtgggtgcaggcaggctgaaaggacaccagcacagccctcggggtgggggcttgtcactggtgtctggtctccctgcttttcccatgtggcctgggctccatgatacgttctccaggcctgggcctggaaaacaggtctttcctgttctctggacctgctagaaagcttcagtcagtttggtccctgggagagaaaacgctcttcccatgacggctctgtggaggccaggaatggggtaggtgggttgactgggagtactccttcctgccgccctggtcaagggactagtgtgagtcgggagtgcatttttggaatgggggcaggggtgtttttcatgaccatttatttgagtggttttgattggttatgcatactctttaaatttgaatccaaattttttgcaaaattacttcccaatcagatcttgacccttagcctgggacaccacaaactgaggtgaattctctgctttgctcgtcacaaatgccaaactgactgccctttcacggtgtccatcttgctgtcttttgcttctgtttgatttggtctgcatatcttttaatgtgtctgtttttgttttgtttgttttatttttatttttcagttaacgcacgcacagacttacatgtcaagagtggactttagactttcatgtgttaagttgcttgagttacaccttgtgacccttctcccataacatggtgtgaggacggactgggagccggtacagactccagtgtttacagccttgctttcctcccaccgaccctggccccaggctgccccgggcctggcgggccacccctctctatgcaaacacgtaaaagccatgaatgctggaatccaaaactgacgaggtttatttttttcagagccagtggctggtcttccatttacagtgtcactattccctgacggagctgttatgtgccgctctagcgaaggccccagccgggatgctaggcctaattgttcagcgtggagatggcaactcacgtggtgccctaggtgcagctgcgtggtctggtatacatgctgcaaaattcacccagttcccctcattttaatttttctaacctacagcttaattttaataactttaaaacacttctaaatatttattttggcaccagcgtcaagacaaataatatcctctcccattattttcataagtaacacagattccctgatttttaaaaactaaaaatacagctaaacctttcttatgtataaagtatgcctatcatatacagggagaggtgggtaataaacttcctgtaatgacagtgtttggcatttctttatggatggaattggaacatgaacaagaccatgtccagcgtttttactgtgaatgtaaatggaacagcagcccaaagctgttgtctgtgccccagaggtgctacctgtagacagggaccaactccatgtgtgtgtgttaagtgtttgactccaattaagactcccaagcaaatcctgcatattccaaatgtaaagagtactcagtgggaaaaaggttgttacctcaaagtcattgcttctttcctggctgggtcacagggtgaagagatgaaggtgtctgatgtatatagacaattagggaaaaatgagcggcaaaggagctttccccttcagctgcactctaaaggggaacattttaaggaagtactagcagctttgactcttctatgctcctgttggtttacaagccaccaagaatgtcagtgttgagaatacggcctggtaaaatgggagatgtaaaatgactaaatgaaaggaagggtagttttaatgttgaagcaccgtgctgggcactggagctacccagaggaatgcacaacgctcccctcaaggagctcacagtctagcctactccctggctggaagcctcaggaagacgtgctaatttattgtggaattggtagtttgcttttcatgcccctgtcttccttctcatgaccatttccccctttctgtctggcttgcattattgatttccaggaccaagtcctggcttcctcctgccttcctgagatgatgttctgctcagggagaagtggaggggtgagctgtgtgtgtccaccgaggcacggccaggaagaggcagcctttacctgtgaggggctccatgctccagcagcagagcaggttctagtgacaattcaactttttatgctatgaccaggggtggatctaaattttatggggctgaaagcttgaattatttagaaagacttctttaagaaaaacaatgttaatataaaattaggtacagggtcttggaaggggccctgaagattaagcttccttagcgtcacaataagtccgtatctggttgcaattgaaaactgatgcttcagtgagggtatctaaaaaggtaaactggcatatccagggcaaatgtgggctgccaatggctcatctctagggtaattttatgtctgaaagtgtatgcagttgggtcagagcatgacctttaagatagcctctctcagctaacatatttatgaagatgaggcctggtgacccagcaggttcattggatacataagaaatgagaattcctggttcatgggccaacctaggactctggagtatgcagacttggccattcgtccattgtggcctgcgggtcgcaccccaggcatactgaaaggccatactcgtggctggctgcctgcgggcctaagccttcccaggatcttcaggacacttgacagacttgtgttttctggtctgagctgcctccacaggtccctccagcaagcctcactgcacctctcccctgctgtttgtgtttggaattttgtcttctttagctgagaccaaattaaaccttggtgcataaagtgagcttaaaacttgccactgtttagtaagttagcccccatagaatgtgaccctgtctgcagagtctcatttacccctctttttctcattgtcatttgttggctttattagggctgtcttacaggatcatgttggcatttactatcatgtctttatcataaaccatgtttgtttgaggtagaagaatcaccatataattcgttgcccaaattgggactattgagagagaaaggggatgctattaattacaccagatcaaaaggcataaaccagacctgtcccaggccgatgtggaaatatgttctttctagttgtgggtaccctgatctaggtggtttgtaattgtgcattactgactgcatatgtttgtgtatgtgtaaatgtgggctccctgttaagtggggctcatggatacgaggcctgaggaagtgtggcttgctagtctgttacgttaacatgcttttctaaaattgcttcacgtgttaattcatttactcctgcattcattgactgtttttgttcttttccattcactttgtacttatttttttcattaaattttgcatttattttgagtt
